United States Patent Application Publication US 2007/0161031 A1 - sequence listing, part 20

SEQ ID NO: 24819 - DNA, 2300 bp, Homo sapien
ctaataaggatataaagaaaaagaatataaaccttcaaccaatgtggcagcttttgcctgtagagcaagacacatccaatgtaacagaaatgaaagtctctgaaaaaagtcacaatacatttaaggcaaccaacaaaaagcgggagactgatgttcacttgaaaagccaggactttctaatgaaaacaaatacttccacaggcttaaaaatggcaatggaaaggtccttgaatccaatcaactttaaccctgagaataatgtaaaagaaagtgagtgcccccttccacctccatctccacctcctccaccaccttctaatgcatcatctgaaattgaatttcctcttcctcctccacctcctttgatgatgtttcctgaaaaaaatgggtttcttccctcactgtccacagagaagataaaggctgaatttgaaagttttccaggcctccctcttcctccacctccagtagatgagaaatctgaaagagaaagttcatcgatgtttctgccgcctcctcctcctccaactccatctcaaaagccagcacatctcctttcctcctctgctccggaaaagcacagtggagacttcatgcaacaatattcccaaaaagaagcctcgaactctcagaattctcaggctaaaatcataacaggaaaaaccggtgtgttgccacctcccacattgcccaaacccaaacttcccaagcatataaaagataataagaacgatttttcccccaaagttgaactggcaacctccctgtcagatatggaatgtaaaattactacctcaaaggatcagaaaaaagtaatggtgatgaccagcagtgaacacacggagacaaagcagaacgttattagtaagagtcttgatgaaagaaaacaattatctattgactctgcaaactgtctctcacacacagttccaggaacttcagcacccaggaaaaaacagattgcgcctcttataaaatctcattcatttccagagagttcaggacaacaaaatccaaaaccttatatgagaaaatttaagacacctttaatgattgctgaagaaaaatatagacaacaaaaagaagaaattgaaaaacagaaacaggagagttcttactacaacattgttaaaactcaaagccaaaatcaacacataacagaggtggaaaaggaaatgccattacaaaaaaccaatgaggaggtttccctatctggaattgattcagaatgcactgtggttcaacccagcccaggctctcaaagtaatgctcggatactaggagtgtgttctgataaccaactctccacaacatcgccagaaacagtcgctgccaagaggctccaccatgttttagcagcttcagaagacaaagataagatgaaaaaggaagttttacaaagctcaagggacattatgcaatccaaatcagcttgcgaaattaaacaaagtcaccaagaatgtagtacccaacaaacacaacagaagaagtatttggagcagttgcacttgccccaaagcaaaccaatttccccaaatttcaaagttaaaaccatcaaacttccaactctagatcatacattaaatgaaacagaccacagctatgaaagtcataaacagcaatctgagattgatgttcaaacctttaccaaaaaacaatatctgaaaaccaagaaaactgaagcaagcactgaatgtagtcataagcaatctctggctgaaagacattatcagttacctaagaaggagaaaagagtgacagtacaattgcctacagaatccatacagaagaaccaggaagataagctcaagatggttcccaggaagcaaagagaatttagcggatctgacagagggaaacttccaggaagtgaagaaaaaaatcagggaccatcaatgattggtcgaaaagaagagagattaataactgaaagaaaacacgaacatctgaagaataaatcagcaccaaaggtcgtcaagcaaaaggttatcgatgcacatcttgattcacagactcagaattttcagcaaacacaaatacagaccgctgaaagtaaagctgaacataaaaaattgccccagccatataatagtctgcaggaagaaaaatgtctcgaagtcaagggcatacaagagaaacaagtcttctctaatactaaagattcaaagcaagagattacacagaacaaatctttcttttcctctgtgaaagaatcccagcgggatgatggaaaaggtgccttaaatatagtggaattcttgagaaaacgtgaagaactgcaacagattttgtcgagagtg

SEQ ID NO: 24820 - DNA, 2300 bp, Homo sapien
acaaagataagatgaaaaaggaagttttacaaagctcaagggacattatgcaatccaaatcagcttgcgaaattaaacaaagtcaccaagaatgtagtacccaacaaacacaacagaagaagtatttggagcagttgcacttgccccaaagcaaaccaatttccccaaatttcaaagttaaaaccatcaaacttccaactctagatcatacattaaatgaaacagaccacagctatgaaagtcataaacagcaatctgagattgatgttcaaacctttaccaaaaaacaatatctgaaaaccaagaaaactgaagcaagcactgaatgtagtcataagcaatctctggctgaaagacattatcagttacctaagaaggagaaaagagtgacagtacaattgcctacagaatccatacagaagaaccaggaagataagctcaagatggttcccaggaagcaaagagaatttagcggatctgacagagggaaacttccaggaagtgaagaaaaaaatcagggaccatcaatgattggtcgaaaagaagagagattaataactgaaagaaaacacgaacatctgaagaataaatcagcaccaaaggtcgtcaagcaaaaggttatcgatgcacatcttgattcacagactcagaattttcagcaaacacaaatacagaccgctgaaagtaaagctgaacataaaaaattgccccagccatataatagtctgcaggaagaaaaatgtctcgaagtcaagggcatacaagagaaacaagtcttctctaatactaaagattcaaagcaagagattacacagaacaaatctttcttttcctctgtgaaagaatcccagcgggatgatggaaaaggtgccttaaatatagtggaattcttgagaaaacgtgaagaactgcaacagattttgtcgagagtgaaacagtttgaagcagagccaaataaaagtggccttaaaacatttcagacactattaaatactatcccaggatggctgataagtgaagataagagagaatatgcagttcacattgccatggagaataatttagaaaaagtaaaagaagaaataacacatattaaaactcaagcggaagatatgcttgtgtcctatgaaaatataattcagacagccatgatgtcctccaaaacaggaaaaccgggaaataaacccactagtcttgatgaaacatcatccaaagtatctaatgttcatgtcagcaataataaaaatagtgaacagaaagaaaataaaattgccaaagagaaaacagtacagcaccaagtagcagctcatcatgaagcaactgttcgtagtcacgtgaaaacccatcaggaaattaaacttgatgatagcaacattcctcctccctctttaaaaacacgcccaccgtcaccaacttttatcacaatagaatctactgcccgacgaacagaaaaccctactaagaacgagctttctcagtcccctaaaaaggacagttatgttgaacccccaccaagaaggcccatgtcgcaaaaatctgaaattcacagagcaaacacttccccttctccacccaggagtcgctctgaacaacttgtcagactcaaagacaccactgcaaagttatccaaaggggccatcccatgtccagcagcaaccccggttccaattgtagagaagaggtctgaaatcatcatgtctcctgcaacacttcgtcgtcaaattaagatagaaactcgtggtagggactctccacctacaatcacaataccagtaaatataaatcatgctgctagtggttccttcagagaatctgtggacgctcaagaggaaatcaggaaagtggagaagagagctacttatgttcataaagatggactaaattccactgatcacatggtgcccgacactgaaagttatgatgcagttgaaatcatccgcaaggttgcagtgcctcctcgcctgtcagagcacacacagagatatgaagcggccaaccgaactgttcaaatggctgaaaatttcgtgaatgaccctgaaaatgaaataaacagatggttcagggaatttgagcatggcccagtttctgaagcaaagtcaaatagaagagtttatgcaaagggagaaacaaaccataacatacaacaagaaagtcgtacattttgtaaggaggaatttggattaacatctttaggaaacacgagttttacagacttttcttgcaaacatcctagagaactgcgagaaaagattcctgttaagcagcccaggatctgctctgaaaccaggtctctaagtgaa

SEQ ID NO: 24821 - DNA, 2300 bp, Homo sapien
cccttttctttgttcaataatattttatagaagatgcttcatattaaggcttcatatatttcaataatgtttatgtttttttccactctttccatagtaaattctacaaaagcaaggaaatgttttaaaaatatcgtagagtaaaatctttcaggtgctatttttccaatgtcaacattcagtacatgtttaaattcttaaaagctacctccattattttatcaatattattaagcaaataatctagtaagtgctatatgcactttaaagagcagaatgagggttcatgcagactaaaaactgactacatgctctcctgtcttatgcttacttacatggtacactcccattattagaataagacattttttacataaggcaaaggattcccaagtgttgcaatacttttgattgtttctgggactcttttgctttggtatttgacttgataagcagttggtgtttgtctgtttggccaaatagacgtgctctcctttaaagttctgaaatttgtcttcaattgaacaaatgacaaggcactggagaggtaggttaagcagctgtctaggctgagtagatctaagttcaaacaaacactggctccactaatcccaggatgacattgaacaatagacttgctctccctcagtcatgttttctcattattaaaatgaaggtaataatacaaaactaagaggattgtggagatgatgacagataatacgtataagtaacttggtgtaggcattcagtaaatgtgggtagttgttacaaatactagctaacgttgatgactacctatgcaagcaccatcctaagcactttctatgtattcatttatttgaacctcatgacaactctaggattcaggtaccgtcatcatgattttgcacatgggacctagaaaggttaagtatcatcagtggctgagtcagtctctaaacccaacccatacacttacccatcacacaacagtgattatcatagaaacagagagtcttttaacagaaactggaaccagcaaatggatccactggaatccacttgtgcctctgtccatattgttcacatggggccacactgctgaaacaccatcccaaacaaatgcctttgataagagttttatttcatatgaggacccatcacatttcagtcactcagcattacccagaacttactctatgatatacatgaacagttagttagaatagaacattccactttttattatgaagctttgtatacatatatagcttgagacccaagaatctgatcaatagaaggcaggtctagttggcttccatcctgttatttaaacaaacaggtctggatcagattcagccagtggcagagtggtcataagtgacactaaaaggtcttaagtgaaagggaaggtgcgcatgcctaaaatcccagctgtgccgtgaatgaaccaaatgtctttgcccaaaggcagcttcagccctctggaccttttttatcacttggaaagttaagatgttgcagaagaccttaggtaaaagctggccatccatgtgccaatcctgacccctcacgtggactttggttttagccttgtctgacctgtgcagttttgttttatttttaaaattagatcctaaagtacaaaactcaaaatatttcacatttaaaaaatctatatttctgtttttccctaaaaattggacgttgtgacatcattgggcctgtttatctttgtggcatcagtcaaaatcatcaactagacctgagcagtagctgccccttcaggtggggcatgggctcagtagctcatcacagtacccaccattccttattatctcacacccagtctgctggctcattgataccacctgcatgggcttgaaggcatctgagtttgtaatcctagtaccagctgaaaccctaaatgaggttaatttcttcattcttttttcattcagtccacctctattcaacgcctacccacatgccattctttgtattgtattgtccttaaatagaaatatttttttaaagtggcagttctgttttcatttctctgaacccaattcatttccgttatttctaaatttttctctcttcttggtgtccacttagggctacgcagcttgctcctggcacgggcaccttgaatctcctcctcacacagatggagaccatgcttgatttcctgaacttgtagtaagaagaaggaaaacacagcacgctggagccaacaggtaggcgagaaaccaggtaggcgagaaacacgtttctcagttatgcagcccagcgtcgaggaaaaataacagcaactc

SEQ ID NO: 24822 - DNA, 2300 bp, Homo sapien
ttactttatttcattttttttcctagatctacagttagctgttttgtagagagaattccagatcttctggtggttctgcaaccttgagactttcagtactttaggagagattagattatacgaggtacttcaggctaattgacctagagcctattatgtagatcccagcttagggtcctgaactcttggggccattaaagttagttaggagagagccattggtagtaaaacgtattgaagccgttttgttctgcagtctgttcttggacacagaccgagtgtgcagtgttacaaggtgttttgcccattactctgtcactgtaatctcttctgtccagaacaaacaagtgataaaccagctgcctgcctgaaagtaagaccacgccgttttcatcatcccctggcttctggttgtagatgcttgttatgaggtccgatgtcagccattcatgcggtgccaggtgttggtcatgaccagtgcctacactcaaggatagcactgcagtttccataatcctatgatcttaaccattcataacttttagagttgagaaccctatttttcttttttcctgaaccattgcattgtttttaaaaagaacgtataaccttgagattacagcctcactggccctgggctggttttgaacctcatgtaatcacatggcttctctgagcctcgatttccccaccttcccaacctccaagggtttttatgaagttgaaatgtgacagtttatgtaaaacacttatgcagattataacagagattctaaaaatgctttttttgccttcttctcccttccctcattgtgcgtcagggaacattttgtaaggaaggagttgtgtattatacaagtgagcataaggaagtatttaaatgtcatgtgagaattgtcttttattttcttaaggaaattattgtctaaggttagtgaatttcatcctgctctttcgttcttccttcctgtctctgtagagcacaataacccaacagctacaacctcatgctttagataaaactgttcttgctcttctgccaacatacacagtcctagaagtttccttaaggactctgaattactgaagcttacttggaactctaccatttatttttgttttaattgtatgatttctgatttcttaatttactgatgaatttttaagttgaaattagaaagttagcctattgagtgtattttttaaacagttacaatgaatgcatctgtttgaacaaagtaaacatttttggtaataaatgacatctgaatcagctcgtcttcctctgacgttttctgtgatatgttatttctatggggtctctcctgcttttctctttaccttatcaagagatatttgcctgtcccccttttcctgacagaagcttcatgcctagttcagtggttctgaaacttactgtgagatacctgggccctttaaccagacattcacattctacaggtctggggacaggattcaggactctgcatttttaataagcaagccaagtgagagtggtgcgagtgactgagacagcctctgtgtcttgtctccttgttggagaggaagccatattgctaagttcactttacaaaaagaaaaatctggtagtcctgccatgtgattatatagctttaacaaaaatgcctatatttcacaagctactttcctctctttgcccactggcccacctcactgtcatttataattctcttttttcactctgaatgtcactggagcagcccttcctagttgttgcatgtaatatgtatcttatctggtaatattccatgtgtcttcgctgtgttacactgtgtgaaacagagctgcaatatttatctgcttaaacaatggcttcttttggtattgtttgataggtcttatattcattattaaagtgggcatatctgtctccagagagctctgactttactagcattattaatgtggcactcatttaccattgacattgtgctcctttctttgatgtataatagagggggggatgtgacattctagcttgtggaggaggcaagatggatgaattagcctttgacatatcctggtatggacatagaatggtgtggagagtttctatttagacaatggagaagagggctgggaaacagtttagggctcattttataggagagtttctaatcatggaagccgggcaaagatgaaatagactggaactgcaatcataaaggatctctagaactggaagataccctatttgtcctttcaaccagagcttcccacccagtggccagagcacactggtggacggtgagtaggta

SEQ ID NO: 24823 - DNA, 2300 bp, Homo sapien
ctttaaaaacatttagacccttatttttcctttctatttttaacatcgctcactgaatgtactctttatgcattgaaataaaccttgtttatattttaaaggcacccgcctccatccccatctttcaatttaaatttagtaatggattttccgggaaaagtgcatatcagttgaatacttctaaaaaacatatatttctaagttttaagtaccattttacccaattgtttacagaaacattaactctaatgcttttgtataattttaaaatattattcatattctgttcttcatttataaaaatgatgccaaagagcaatgccaggggacattcttctttaaaccgatttactgtagaaatgatggatgtgcactgagtcatccactcaagcaagtcttcatcctggtagccatttggaaagcggttgactagagaccgacatgtagtctgtgactggggaacagttgctttttgtgggagactaattgatctgtgtttgattcaattctgtgatattgatcttgacggcatcatgttttcctactaagtcccaagaacattcctggtcttcataatcccacttcatggtttgaaagtcaaaaatagaaattcatatgacaaaatggaagtcatattcatttgatcatttttcttttcctttaaaaacagtccttaaaagttctttggggtagggtggaggcagcacttgaagaggtcagcagccatggcttggtataaagagctcccctgttcctcagaggcctagaatttgtttatgaagggctctgtttcttgacagacatgacaagacacagtttttgaagtcctccgcatcaaagaatgtacacttagttcagcatgaacttctgcttcaagaccagagcgaggtagctgctttactccaacttttgtaatgctccaagagattaagtgccctcatcttcagtggacatcaatgttttgattagacaactaactttcctaataaatttctgggcttcttctgaataatctttcaaaaattttagtgagatttctgtacatacactcgggagacaaaatcatgatatccctagagtttttattacatcctcattattcttacctatttcttcagcagtcctagcaatgagaaccagacaagatcatcttggccaaacgaccaatactattggtttactgccccgtttcagttggagacaagaacggtggatcctggtcacctccacggagggaacacagagaacattcactgttaaatatgacacctataattaggaaaacctatggttttaccatagcagttttacagacgaggttatttttggggtgttgaaaaaacagcaattaaaagcttccaacacagtttattcatgccccaataaattatttccccaccaagtatacgctcttaaagaaacgcctgatgtctggcctcagtgtcctcacgggctaacgtggcaattattaagggtgtagaatttgagcaaactttctaaacctctcctgcatgtcttattctaattccacagccccttaaatcgcctccctgggatccaggcggcttggaaaaaatgaagtctgaacagccagagacctaaggaatcaagtttcatttactaagaaaaactagaaggactgcgattagattaggcaaggtgggaaagggataccggcaagtaaagcgccggaaacttacaacttgggttattttctaactggcgtcttgcaaagggacaccatgtaggtatcccgctcgtcaacttgtaaatgaacttcaggttctctttggtggcaggagaattctgaatgtgagaacctggcggccgttcaacgaccccgccctcggggtccccagggggcgtcctccggcaagcctgatcgtctggggccaaggcgcagggcgagcagggagggaggaggagaaccagggccggtggccccgaaagcacacacaaagcggcctgactcctttggtgggaacttccccggccgccagcggagcgggagcgggagggggcggcggagagggggggcggcggttcccctcgccgaggcggagaacagcgcgcgctaggctctgggcgcgcggcgagcgcagcggccgccgcctcctcccttccccgcctccgccggcgctgcctcctccctccgcccagctcggcctcccttgctccctcccctcctagctggcttcggcggggacggcggcggcggcggcgggcggggagggcgtgcgccggccgagaggtgtcggcggcgaggcaaaggaagtttcaagtggaaggtcgtccgtcgg

SEQ ID NO: 24824 - DNA, 2300 bp, Homo sapien
gattaatagtttggtcatgagatagcttttagacatctgagtggtggtgttaaattgccagtggatttaagagtcagaaggtcaggaaaaagttcatggctagagatataaatatgggagctattagcatgacattggagggcatacagatgtcattaaaagccacgagactggataaaatcaccaaatgaatacattcagatagaaaagtgaagaggaaaaaagactgactcctaggccactataacttctaggggttagaaaagtgaggagtaaccaggaaggagactgagaagaaatggccatgaaggaggaagaaacccagaagagtgaggtttctggaagccaagtcaagaatgttttaagacacacgacctgacaactgggccaaatgctactgacagaggtgttgtgaactgctatgaactgaatgtgtgtgtcccccaaaattcatatgctgaaatcctagttcccaatgtgatagtattcagagacagagtctttgggaggtaattagctaatgagggtagaaccttcatgaatgggattagtgcccttataagaagatagggcactaatctgtgtttcctctttctgtgctctctgccatgtgaggatacacaagaaaacagctgttttcaaaccaggaagaggatccttgccagacactggatctgcctgcatgttgatcttggacttccctgcctccagaaccgtgaggaataaattctgctgtttaagccacctagtctaagcagcctggactaagataagaactgacctttgtgtttagcagcatgaagatcacaggtgaccttgggcagtttcaatgcagcagaggagacaaatgtccaaatggaagttcaaaagaaaatgaggggagagaaattggaagcaccagtataggccattcttcagtttcactttcaagagatagagtggaaagaggggagggaagagtaaaagaaactccctctctctgtgtgtgtgtgtgtgtgtgtgtgtgcggttatatgcccactggaaaggtttagtatagcctactggcagcaccaggcagaaaatgaatgtgagaaaaatgaacaaaaatgccccagaaccatgtatacatgggccatggaatgaattcacacatggctcctgtatcaatggggaaatgcattgcgggagggaaggtgcctgggttaggcctcacaggcctaatgccttaaaggttttagattcaaaaggcagaaataatgagcctgccgagtagcacagtggaggttctcatgatgtgccaggtcaaaatgtggtctagcagccttttcagagaggttagttgagaggggtggttttacagaacgctgcagttgctatcatcatcatcatcatcatcatcatcgtcatcaagtagcaattaataatcaaatagcaattaagtgcctaattttttgtaccacctcataaatcaatataggggggcttgttccctgggggagctactttgatgagaagcagcagtataaaagaccggaaagtcaaagattggggaaaggcaggcgtggggcagaggcagaaggctcttgccaaaccatcctgcctcagttcctgatttttcaccctgcctctccaagcgcgggagtggaggatcctttccctcccacttcctcctttgctctttacccctccccctccccccccctttttttttttttgctgtcctcctggagcagggctggttctgaagcttggcggcagcccctacctgctgacccaccgcctccgggcgcacgggaagaggactgagagccctgaaaccccagcggggcaggagccagcattctgagcatgtgcgagccagccagggggctagggcggatttggggggtcgactttaggtcgtcgccctaagcgcaaagcgaaagagcggtgagagcaggggcgggcgacactccccggagcggtgcccctgcgcccagggcgcagcgactgcgccctgccctgcgggtgtgggcgagttggccgcgtgtgtgcctcgctgtttgacgcgaagacgagccaatcagggcgggcggcccgagctgccatgtgacgggcaaggcggcccctttccccagcgcggccagagggaggagagaaccggggctcgccgcgagccttcgagagcagcggccgcggaggaggcggcggcggcgggcgggagcagcggcggcggcggcacaggctcggggccagccgggcgcgcatccccgggcgccctgcgcggtggagagcttggcgggctgcgggtgccgcaggacaggagtggacaaagcaag

SEQ ID NO: 24825 - DNA, 2300 bp, Homo sapien
agtttgtttccaggcagtgggcaagcagggctgagaacttgccccaggctaccagcctcccagctgtgaaagccagctgggctctttcaattgccctgacataccagtcacacaatgcagacatttaaaatcatgcctcatctcctggagttttaagttgtttgtaaagaaaatacaagtatgtgtagacacagatgtttatacatgtgtatatgttcacacatatgcatatgtatattatgaaaatatgtgtatacacatacgtttgtatgcacatatgtatgaaagttaaatccatgtatgtcaaggatctcccatccaattgaaaacaaatgtagttgcacagacttctgaccaataatttgtattttctatttgagaagatgctcttgttccttcctcactcagtgaaggggccataatcagcctaacaatctgtcaatgcttacatttttccaataaatgccagtgaacttgcactcctgcataagaaaataagccatttcacaaaatccaaccccattacaatgcacacaatgaagttcttagctgactggctgatgccatatgagctgcatgctgattgcaagagttgtgagttgctcacacatcagctatattcatactgcagcacctcatgttctaaataacaagggcccttttttcactaagagcatgggaagacagtgagactgagctgcccacttgaaccgagcatcatgatttctggtcctagccactattacatggtattacatattgactgtaaagctatacttagaaaatgagcagcatgaaacaatgggtgaacatgagatcatgaggttgccaagcaggaaacactgtagcaacagtgtttacacctatgatactcacagggtgatcctgggcaagtttaagtgtctcttctggagaaacaatcagaccgttaagttctcttgaactcttatattttgagtccaagtcctatattaattaagtcttgtatcttgatcctgcaatatttgacacaactggccattccaccttgtttggatcactgctgctgtgctcattccctttctgtcccaaccctctgcttctcttgccttgtgcacagaccacccttggtctgtcaatgccagtgacacctggggttccatcctcagccttcttttcacaccacgtgctcctgctaggtgaactcacccactccctgtatgctgggcaatcactgcctctaaccatctctatatccctggacacccaatgtcatttggacacccaaacgtcggcacctgaggctcaaaatccaaaaacaaacaaaacatattatctttctcccaggaatccactgtttcttccttccatctctgtcaaggacactattattcactcaatgtcccaggtccttgagtcttccttcgccttcaacccccctttatcccaggcatcaaacctcaaagttctgcattggaaatatccgtttcatttacttcctttgctccattccctcagtctcttccccagcccaacacacctagtctttacctttcttcaagaggtaggctggcattagctgagtgccacagccagacctgtaagccaggctgtcaattgattaatcatgacagagcagtcacaaagtccagactatttgctttgacatgaatgagagttactcctcctgcagaaaaatctacacaggaggttgcttgcaaaacacagaaaaagaacaagaggagtttgagatcttaagaagtgctgttcagacagatggcctaaggcactgtcaccaaagagcaattcttacatatccagaggccaacactcctaatcccccagtgctttaatattctcagccaacctgaaactcaaaatctctgcaataggcaacccatatgatgtctctgtgcctccacccttttcttagttgggtaaagctaatcaactgttgctctggcctagcctgggataacctctttagggagactagataaatctcattcttgtttcaccatatgtgaattaaacaaaacaacacaaaaaagccttaaccctgagttttcttcttcgtccatctcaacctttcatgatcctcctgcggttttctctggtctccacctcccaagaagtgtttatccccataagatattgttctaacattaagacaacatatgttattagtcatcctttaagtgaccaacaatcagttggaaattttcaactctgagtgaaagatctgtgtcttaaatcttctacgtaggactggctctcaggaagctatgttcactcagcctgggcatgaagacttcctccac

SEQ ID NO: 24826 - DNA, 2300 bp, Homo sapien
tatttatggtatctttagcatatatgttaaattgataatcgaacagacatttaggtgaaaaagtagtggtctacttcaattttattaaggatacacttattttatataagtacacatattatttgttacatattaaataatttcatatacatgtgtatattctaagtttaaaataatgtgaagttgcattcagttgaaccttgtacagcttggtataagaagcacaagttggacatgagataccctagttggtggtcatggggcctcactagctatgagacctaggcttagcctcttaacctgaattaactgacagcaatttcctgtcaactgtacaatctaggtctagaattatagtactaattttataggatttttatgagaatcaaagaaattaacatgtgagtgagcattgtcaactgcaaagcactcgtcggacatagtaattattataatgggatgaactctgtggtttccagatgctctctgagttgcccttataattcctctggggcctttccccaggtggtgatgtggaagtaagagaatatcattaaaactaaaatttacccttggctcaaagggtcctgagccagggcccgattttctaaacttcatttcagccatccatctgccctgaatatccattcttcatcgttaatgccttcaagttttacaaggacagttcagtaggaagtgtattctactcagggagatgctgaattcatgcttaggtctcagttcaggctgctacaagagaataccctaagagctcatgtcccttcttctaagggcactaaccccattcatgggggctccactctgatggcctaattagctcccaaaggccctgcctccaaataccgtcacattgggattaggcttcatcatatgaatgttagggggacacaaactttcagtccacagcagtgctcattgtcatttagactttaggattgctggttctagtatcctgtcccattgtgtattttgttgtcaaagatctatgcaggacaacttttccatgattcccatgcgtagagtgggtgagtgccagcttctcctgatagtcattcattatgctgctattggtgtacaaaacacttacatttcaattatatttaccatatatggtattgtcttgtgtataggggtatggacttgtttgtgtgatgagtttcaaatgtttttcattcattttaataaagcaagacatttcattacaactcaatataacaattaaaaacaactcatcacaaatgttttttgaaaactctcttgtttttagtgggattatgtgcaaaataaatattcctgacttccactgcctctctgagcctccccccgaccctgagcctctgaggcagttaaagcaggtatcactcccattttacaaataagtaaactaagacccaagttttatacctgctgagctgtagagctgagacgtgatccgatatcctggctgggtgcctagtctggtatctcctggcagccttcctgtccctctgatcttttagtaaatatttttgaataattctttctgatatttgaaatgtactgaacatttttttctaataacaaaaaaaagagctttctgattaatgcagaacttaaatctatgcctcagtgacccatacagcattccagttcctatcacctactgtcttgtccctatacttgcagcagttgtccagggttattctttgtctgtattagaattttttttcaggttgcttaaggaatcttgcagatacttgtgacaaagaatcataaatgctgttgttaaactgaataatgaattgagtcccaaatgttcgtgctaattaatgctttttgagttggagatgaaatgagagtaatatcatcaagctgtggattaaagttatcctcaaagccccatcatctacaaaaagaataggacaggaactgcctttgtgcaggtgcaagaccatgttacttttgagcagtgagcttgagatgtctgggatacaaattgggttccctattaactactaatcattccttttttttctttcaccttcagccactcacaactgaccttcactactattacatcctggagctgtcgttttattggtctttgatgttttctcagttcactgatatcaaaagaaaggtaagagcggttatgtcgtaaagtgcttgcaagcatgcatctttaatggcccttagcaggtgggtttagactctcaaaggcactcacccctgttctcctggcagccctaggttagtacgacttgctgcgttattacagaaagttctctatttttgtttgt

SEQ ID NO: 24827 - DNA, 2300 bp, Homo sapien
ttgttcctggaagtatttaataagttgcaaatgcagttcctttcataatatctcagcaccagaaacaaaaattaagattatcaaagcattttgaatagtgcactgccatgtgtcctgtctgtgaatgaagaagaattaccattctctctttgtaggcatgctgtatgtaattgacacaagggaacagtatttgcatttgtactgtcttagaatattatttatttttttgtatttgtaaatctgtggacaaaagagggtttcctcactccttttactcactgggctcatgacagtgaaggagatgctccatctgcttctccccctttctcttgctgtagtccaatgtgctatgagcatcagcttactttgtcacttagagcaagcaaaacccagtgcaagagtctcgttcagctctaaataggtttgctttcttttagttacagtgcccattttgaaattgcctatacagtcttagtgaccatttaaaccggacgaactaggtgtttaattttcactcttcatgttcaattagcagttcaaattaaagaagatggttattggagaacttttttgaatggttttgtattaaattgctttgaaatagatttcatttcttgtgcacacagccaagatttcttcaatgggtgtgagctagttgagggttaaccttgtaggttgcagagtgtatttgtttgtttgtttgtttttctctgtgatgaggtcagtgctctgattttgaaggaggatattcactgaagctcatagttataaacaaggaaatcactgttaagaatgggaatttgtcctgtgttctgggaataacataaagagagcaactgatttcagccaggttttgccactaccctataattagtgcagtcttatgttataaaagaaagaagttaactatatttggggacaaaaaaatatttcaagagttgataaagattacctgtgcagtgcagagcactttaatgcaaccagctttcaagaaaaagccctatctagtacttgatgttgatgtttttattttgctgagcaaaataaagccaatgggagaaagactattttaccctttgcttttctccttaaacgtaatccagatgactttcctgttactaaacactgagcagcattacactacaatgcttctttggtttccaggaatttttttcaaatggggctgtttctggaaaaatgaaaaattctattggacaatggcaatatcaacaatgaggaaaattactgaagaataagtttccataagtctcctacatagcagtgttatttatgtacagataagaaaaccatatgtcagccaaagattttatctcttcttctaacttttagtaagaggaaaaagggattataaaacccttcataaatcaagaaggccatcacttagaacgaaccccaaacaaaaatgccataatataaatgtgtgaatcagggctgtgaagacaacagcagaaatgctaacaagcgtgcagaaacaccagagagtgcgtatcctgctcagaaccattcacatttaattcaattcttggaaaaaattaaagctttttgcccacaatttgcaatctgtgggttaatagttaaaagaatgttcccaaccaaaaaattcttaccgtaatattatatcttgccctacttatttacaaaataatatgtttctgttatggtccttagtaataattgaagaggcttagaaatacatctgcttgtttattgagaaaacgatgcaaataattctgcttttagagccttgttattttatttcacaaaacaggcatatgtctaggagtgtaatttgtggatggttgagtttgtaagaacaatcataaaaggacttgttagtctccagaacatctgctaaaatgcaagtatatgtataaggtaatagcatattacagctgaaaattttgagaaggtaaaagtttcttaattaaaatatgaacatatttagcttgctttagtgtctggggcaagtcctctcaatggctaaaattaactttagagatccatgtgttcaggtttagatcatatgacactcgagcacagaagaataatttcaaggaggtcatcttgtaaattaaaggtttagaagaattgcataaaacgtagtaaatggggtctgtcattagcaaaggcaaatctaagcaatcatttttccccccagaagttacttagaaggagaactgggaacacttggggtctctctaactgatggcattcacttcacacagtcgtctatgttatccagagatttttatttcattttacattttagggcacagttc

SEQ ID NO: 24828 - DNA, 2300 bp, Homo sapien
caacaaaagctgcaaattagggctttcttatttatttatttattcatttatgatgagccagttggcaaacactccccagcacagtaaagatttgaccccagaccggagtgattccaaaacttacacgtactcattctggttcattacacagattccagtgtttgcatttgtttctgaagatgtgggctgccaagatttctactgcatttcaaattctccattggcttttttttttaatctacctccgttaatttttcttacagatctagtttttcctcctgtagttttcatctctatcttccctctttttggcgtcatattgtatagtcctttcaactatattggaagcttttcttggggaagacccccaataaatcaaatacatcaataactgaactcaatttttcaagttcactgtatcagtctaattcacaaagggcacatctccttcctcagtctaaccctgggaacttgcaagggcaaacataacccagaacacaggttcaaaaagaaccagtacaagcaattcagtcattcaatacattgcagactgaagaatggaagcgatctaggtagtaacgctagttttttagggatctgggttttaagaatgggctgaaagactcatagggaaaaagtcccaggggtgggtagtaggtgagggatgaaatgctacaaagcgagtttattttctgtaacttgagttataggaaataaaagagcagttcccagccctcctctttttgagtcatagctgttaatttgattcatcaggactgaactcttggctctggccaaagttcctgacccagagtgctagttactgtctggcaagccatcaagcaatcctatgttagatttcagactaattggagctatgtcaccaaagatgagttcaaaagggtccctagagtttttaagagcaaagagtattgtttttctctcagctgagggtactagatggtacatagaactgagccctgatgtactacacttctagtgctgccatttcttagttgtatcacttagaagtcatttctgaggagttataaaatagtttgcactatgctaaccagtagtttacactatgctacatgtaccaaattgtttacccacagagccagaacactaatgaaagcagtaaaatgcacatcaacattaagtcaataaatgtattgagcaccaatcgttcgagacattatgttaggctttgtgaggagtatgaggaagtcaggggcaaagctgctgcattgaagggggtctcaatacagttagggaggtaggccacaggcagaagttattagctctaaagatttttttttttttttaagacagagtctcactctgttgcccaggctggagtgcagtggcacgggatctcagctcactgcaacctctgcctcccaggttcaagtgattctcgtgcctcagcctcctgagtagctggaattacaggtgcatgccaccacacccagctaatttttttgtatttttagtagagatggggtttcaccatattggccaggctggtcttgaactcctggcctcaagtgatccacctgcctcggcctcccaaagtgctaggattacaggcataagccactgcacacggccagcaaaaggcttttaaaaataaaaataaaatctatagatataagacattggtatcatcgttatatcaaatatgttgtgagaatagtaattgccagaaaagttcagaggagagagaggttgtgttatagtagtcaggcagacatcagcaggccaggagagggctgcacgcccaaccaggaatgtcagacgaccatcaagtgatggtcaggtggttgttacactgttacaatcattatttctctaaaacaataattagtcacagccagcacgagggaaaggcaatctcccgacagacagaaaaaacctgaaactggttatcagcagcgtcccaataagatctcaggtgttaggtaagtgggctcaagcatgcgcactatgaggcaaaatgggggagtttaactggtatatgaccttcctctaggaacgttagattggtaatagaagaacgtctcaagtgagcatgcgtataactcccgtaaacacactgcgcatgcagcccttcccaagcactggtagggcactgggcatgcagacagcccaccagaagggaagaatcaggagaaaagggatgcaagatcccagaggtatgccaatatataaaaccctaaggcaaaggtcaagccagccacttgatccctcaagtggccagcttggccctcctcgaagtgtactttacttcctttcgt

SEQ ID NO: 24829 - DNA, 2300 bp, Homo sapien
ccaactcctcactcccaccttgtgtggattcctcttcacccccaccttgggctacgattctgccagctgcactgtcctcctgggcagacatctccatgcccaatttggctcccatcattccactccgggccacagtgattccctcacctagcagagatatctgctctgctctgtcctatttgaggtttagggactgaacagttcaggaagagaagggaaaggaatggaaaaagaaaaaggaagaagaaaaagtcatcaatatcatcatctttttttttttttttttgaggtaggatcttactctgtcactctggctggagtgcaagtggcaccatcatagctcactgcagccttgaactcctgggctcaagcatttctcctgccttggcctcccaatgtgcttgaattacaggtataaaccaccaagcctggctgtcatcgttactatttacatcattttttttttcttatcacttacctttcttatcactattttctttgctgatttatcttcttcttctcatcccccaaacatgggtatttctcaaggttctgctttggcaggcagtgcagaacagatcaaagcttggactaagttctttgcatcaccactttctggctgtaagaccaaggacaaagtttttaccctcttgtgcttcagtttatctgaaaaaaattaaaaaaaatgaaaatcacaacagcctccagtttcagtcttctacttccaatttttgttagacatgtccacatgaaaggactctcatcagcttaaattcaaaatgtaaaaatcaacccatttttcctttccaaaaactgaggcatcttctcacagctcctctttctgtaaatgcatattcattctacaggaatttattgggcacctgctgtgtagtggacactgtggctgataaggatcagctataaaaggtaaggcctttgccctcaagatgcttccattgagtccagtggggaaggccgtgtgataagtgttctgatggagttaaatggttgtaccttttcttctcaaggaagagcaccaaattcccaaaggctaaggctttctgggaagactaacttctaacacaaattagtcttcaaggccaagtaagagttagcgacatgaagaagaagaggaaagaggtctctgtggcagtgtaagcagtatggccagagtcctggagctgtcacaggcatggcacattctgagacagtgcccatggggagggatgaggatggagtggaaggtcaaggtcaggccactaagggggagaacaggtggtaggaagtggggtggaggctgcctcactgcttcacgctatgccctttgtctcaaatgcctttcctctttccacttgactcattcaaatactattcattcttcctagctttctgcttgaaaccttttcttacctgatcccagaagcagctgttacgagcagcgaatccttatgggtccgcagcgaactcaattcttagctccttagaagaaagaatttggggccgggtgtggtggctcacgcctgtaatcccagaactttggaaggttgaggcaggtggatcacttgaggtcaggcattcgagaccagcctgaacaacatggtgaaaccccgtctctactaaaaatacaaaaaattagccaggtgtgatggcgggcgcctgtagtcccagctactctggaggaggggggaggcagggaagaatttgaccgaggaaaaataaggcagactgagagactgaggcaagttttagagcaagagtgaaagtttactaaaaggttttagggcaggaacgaaaggaagtaaagtacacttcgaggagggccaagctggccacttgagggatcaagtggctggcttgacctttgccttagggttttatatattggcatacctctgggatcttgcatcccttttctcctgattcttcccttctggtgggctgtctgcatgcccagtgccctaccagtgcttgggaagggctgcatgcgcagtgtgtttacgggagttatacgcatgctcacttgagacgttcttctattaccaatctaacgttcctagaggaaggtcatataccagttaaactcccccattttgcctcatagtgcgcatgcttgagcccacttacctaacacctgagatcttattgggacgctgctgataaccagtttcaggttttttctgtctgtcgggagattgcctttccctcgtgctggctgtgactaattattgttttagagaaataatgattgtaacagtgtaacaaccacctgaccatcacttgatggtcgtctgacattcctg

SEQ ID NO: 24830 - DNA, 2300 bp, Homo sapien
gacaggagcaagatggaaggattttaattcagcagatgtccaggaggtctgagggaaagctagtcagcccactgggaatggcacacatgaggagtttggggataggagtgccctaccaatctataattcgtatacaaagatcacagtaggctttgtgtgacagcacttcttatggaaactggcaagggaggccaatttcctcagtttggactcagttgggactgaaatgaaacacagaacagcaagaaaaatggggcaggaatcacagagaaaacattgagctgtcccaagtcctggaatggtggctccggacaagtttatctaaaatctctgagggcagagaagccccctcaagtgggaatttgagttacatgttattaacctcagtctatatcctgtctctaaatttcttttaaaaaaaaaacaaaaaaagagatggggtgttgctatgttgaccaggctggtctcgaactcctggcctcaagcagtcttcccatctcagcctcccaaagtgctaagattacaggtgtgtgccactgtgccttacctaaatttcttttattatacagagttgctttgtctaattctagccctgtggtagctacccaagattgttgtaacctccagtgatcaagttctttggataagcaaagagggagggcattaagtgtgtggaaaagacccctcctctccactcttgttgcaaggcaagttcttttccttaattgtcccctgactcttctacgttgtttctggaagctttttttttttttttttagaagtagagtctcactctattgcccagctttgaacccctagacccaagaaatccttctgcctcaacctcttgagtagctgggactacaggcacataccaccacatcctaattaaaaaaaaaaaattatagagataggaatctcctgctatattgcccaggctgctctcaaactcctggcctcaagtgaccctctaggctcggcctcccaaagtgcttggattacatgcatgagccactgcaactggcttatttctagggactttgaatggagcctgcacaccaggggcaggtgaatggaggctgagtcagccagtcaggtgaaaactgaatgcttttaaactctgaagtgttccactggactgtgttgatggagctcctttcaaactggggcctgcccttgcctgccagtcaaacagaactgtccacagtctagcaaatggctgtcgtacatcaataggccattcattggaaatctaatgattggcaactgggaccacaggtacagggaatgcaatagaactcaagctgtggttgagttcttgttctgtctatccttttgagtgatgaaaaatgaggccagatctaggcaattttttctttacattgaaagcttagcctcttgatcctgttggggctggagcgagtgtggagttaggctcagagaagtggttaatgtacgctttgctcctgatagctgtttctgaacattctatagttatagttctataggtgtaggttcctagttgtttggtgtctggccctgtgggatttagggggtgggggaatatgggcttggtatttgagaactgggtaacagagatggtggggaggtttgggctctggatttgttggtttgcatattaaaggagtgctcacaggccagttgtttgctctctctaggaattagctaaccctcagagaggcagtctgtctccaagtccatgaggtccccaaaggtcaaagcatcatacaatacagaaaataaaaagcatgattaatactgcaggctgagaggatatgtgttcctgcactgtcagaccaagcgcaagaattgttggagacatgttacagcttctctgccttctctcaatgttacgctgttcaggactcaggatcctgccctctgagggtttacagaagtcattctcactatctcacactggccgtcttgacccagagcagttctttactttctcgggacacaaacgggatgaaagtccagggctgggacttcctccttggaatgtttgacaaggactgacgtactctaggccctttgaatcccggaagtccaggacacacccaaccttgattacagtgtccagaatgctggagcgtaggtgaaaggacaaaagccagacacatttcaacatgagggacccactgacagattgtccggtgagtagctcagtgtggtttgtgtgcctgcgtgtgaggagggtggagggtggatttgtatattaatggattttaacttaagaaatttgagacactcagaaaccaaacacatttagatattgg

SEQ ID NO: 24831 - DNA, 2300 bp, Homo sapien
agacaaaccaagggaagccttggactggtatgggagctatgttatgacttgcattccttcaacagggaaggactaatggttttagttaggtgtcttagcagtttagtcagagtttacttgggggtgtgatgtcagcttgcgcctcagctgtgggatgacatgtgaaggagtggtagagcatttggggtcaacttgggccttcttttatctgtgtcacaggtaaaatgaggaaaataaaaccaaccattgagttgtaggagttgcatgtaataaataatataaagaaatatttatttatttgagacggagtctcgctctgtggcccaggctggagtgtagtggcacaatgtcagctcactgcaacctctgcctcccgggtccaagtgattctcctgccccagcctcccaagtagctgtgattacaggtgcacaccaccacgcccggctaattttttgtatttttagtagacagagggtttcaccatgttggccaggctggtctcgaactcctgacctcaagtgatccacccaccttggcctcccaaagtgctgggattacaggtgggaaccaccacacctggcccagaatataaagacacttttgtaatgtgcaatgaaaaatatgtaaataaaatatttttatctgtatatgtttttatagaggctattccctttgctctaaatcctcacacttcttgtttgtgaagctccatctaaaggtaatctctcagccgggatcctaatttttctccttccttatcagcgaagcctgcatcctcccctcccaccttgagtcattagtttcccgtctttctccatgggtttctgtccctctgccactcatgtttagcaacctcctcactccaactctaccatcctattcttttttattcaatccttgaaataatgcatgtgaaagctcagatatcatgaatgattcctcatagcctatgtgataaaattcctacatcagccctaaaatctagcctcaactccctgaacaattttttcttcccctatttttttgctcatgcaacaggtgtctttattgttcctgacacatttcccacagtcctcccccagccctttgctcccgccatttttcctgcctggagtgccctttgccatctttccttgactagacagttacgtcttcttgcctcctcgaagctgtcagctgcctgcactcgtggtgtctgtagcattcgtgaatgcatgtggtcttgtattgctagtttctttaatgttatgcttcaaggcctaactaaatcataaacccattctggaaagagcatatgtgttttagctcacatcttcccagtactgagccaacacagaactcagtcaaaatgtcttccactcctgaggcagtcatagcctgaaacacatacatgatattacatttgggccattaaaggactctaacttgaacaaaagtaaataaggaagcagtaagtatacaacaaatagatttatcaagaaaatgaaatagctatagcaagggtccatcctcaaagaacaatctgctctattaaaaagtgctcggccatgtgacttaaaagttgtgaacaagacaatattttcttattcatcaggtctcgaacaggtagaacaatgtgtgtaaaactaaagattatcctgcttaaaaattttgttttattttataaagttaaaattaaatgcagccagtggaagtatcagaatggacagggaatagcaactcttacttcttcccccttgttagacatccttcttttttcctaaaggaagaagatcctaacagtgcaatggataaagagagacgaaagtctttactaaaaccaaaattattgagactgcagagagacattgaaaaagcctcaaaagacaaggaaggtgtgtaaccatctctttgaatggccagaaaagggaccatatgatgctcagaggtttcattcagagttaggattgatctgcttttgctatttggcaggggtcttctcatttaaagaaccatatatcaaacttcagttgtgtgaacaaaaaaaaaaaaagtagaagaaaaaagaaagccaaaaaaaaaaaaaaaaggaaaatcacattttggtctatttatgaaacctatataagtattatactactattttcagaaatgtagcattttaactgtgtttctgaaattggctagaatgagagataatgtgtttggtttaaaacatggtcaaccaactgtgcatgagagttttggatgagttttttggtttgtttcttttgacttttgaaacaatgtaaaaacctttcaaattaaattctgtacgtag

SEQ ID NO: 24832 - DNA, 2300 bp, Homo sapien
agcatgatttataatcctttgggtatatactcagtaatgggatggctgggtcaaatggtatttctagttctagatccctgaggaatcgccacaccgacttccacaatggttgaactagtttacagtcccaccaacagtgtaaaagtgttcctatttctccacatcctctccagcacctgggttgtttcctgactttttaatgattgccgttctaactggtgtgagatggtatctcattgtggttttgatttgcatttctctgatggccagtgatgatgagcattttttcatgtgttttttggctgcataaatgtcttcttttgacaagtgtctgttcatatccttcgcccactttttgatgtggttgtttttttcttgtaaatttgtttgagttcgttgtagattctggatattagccctttgtcagatggtaggtggcaaaaattttctcccattctgtaggttgcctgttcactttgatggtggtttcttttgctgtgcagaagctctttagtttaattagatcccatttgtcaattttggcttttgttgccattgcttttggtgttttagacatgaaatccttgcccatgcctatgtcctgaatggtattgcctaggttttcttctagggtttttatggttttaggtctgacatgtaagtctttaatccatcttgaattaatttttgtataaggtgtaaggaagggatccagtttcagctttctacatatggctagccagttttcccagcaccatttattaaatagggaatcctttccccattgcttgtttttgtcaggtttgtcaaagatcagatagttgtagatatgcgggattatttctgagggctctgttctgttccattggtctatatctatctccgttttggtaccagtaccatgctgttttggttactgtagccttgtaggatagtttgaagtcaggtagcgtgatgcctctggctttgttcttttggcttaggattgacttggcaatgtgggctcttttttggttccatatgaactttaaagtagttttttccaattttgtgaagaaagtcattggtagcttgatggggatggcattgaatctataaattaccttgggcaatatggccattttcacaatgttgattcttcctacccatgagcatggaatgttcttccatttctttgtgtcctcttttatttcattgagcagtggtttgtagttctccttgaagaggtccttcacatcccttgtaagttggattcctaggtattttattctctttgaagcaattgtgaatgggagttcactcatgatttggctctctgtttgtctgttattggtgtatataagaatgcttgtgatgtttgcacattgattttgtatcttgagactttgctgaagttgcttatcagcttaaggagattttgggctgagacagtggggttttctagatatacaatcatgtcatctgcaaacagggacaatttgacttcctcttttcctaattgaatgccctttatttccttctcctgcctgattgccctggccagaacttctaacactatgttgaataggagtggtgagaggacattcctgtcttgtgccagttttcaaagggaatgcttccagtttttgtccattcagtatgatattggctgtgggtttgtcagagatatcctaccatcccctaatttgggttgatctcattggtgtcttgattgcctgtctctcttcttggaattgatctgtgttcctcatctcccaggctctgcttgaccccctcataggcctgctgtgttctgttgccacccaaatccagaggaaaaagacatctaagtcccactgctgttgtctaccagataactctgacttcaggcaagcagctgaacccaccttggactccgtctgtttctgtgacaccaggggttatactggatcatctctagggtctcctagaatttggaaactcctctaggaaccaaggagcctcttccttgtctgtctccacccatccatcttttttctgactgtttcaagctaataatcatgaatgcaaagtgctgtgacatgcaggtagaactccatccatttcaaaagaaaaacatgtaaaggtaagagcactttattcttatttgaaccacactgtattgttgattaccgagtgtgaaggtagtatgttcagagtcttgttttatgcctttgtagctgtgttgccagcatttgaaggtaactcctccacataagcggcaggaaaatggccttttttcccattcaaagatccaaaccaccatcctccttcttttttct

SEQ ID NO: 24833 - DNA, 2300 bp, Homo sapien
tgtgaatgtcagcataaatgtgaatgtcgtaaagagaaccttatacttacaggtggggaacttatagtctaaaccatggcattattcacgatcattcctatctttagctctgccccccaagatgcaaagtatctacccagcaagtgtatgtgtaatagaggacaatgatcttttatccttatacgccattatcattcaccctttggagaaagaattaagttttcaggggaggagcaatggagcattcaatctgagcaagactataaccaccatccagaaacacctccagcctgggaacatgtggcatctttctattccccaccctgcagaaacccaaccctgggtcacagaccgtatatcccagagaaggcagtgctcagctcagtacctggcacaaaatagaaactcaataaaccctggttggtttgaaatgaaaggtatgtaagtatggtggtggtggtcatggtggagttgtgtgaatgataatgggtcggggggtctgttttcccctttttaatgctgagaaagctgaaggccctattctgtgtactgagcagaaagaagagctggttgtctctagctatccttggggattagagagaaattattcagccagtctttcagaaatgaaaattttgacaaacgacaaacttcttcctcacatcctggttggggaggagcactcacagaataaaaaacaatagacaacctgaggctgccctaaaaacagcacattggtagggcaatcactcccctcagctgaagacccaaagagagcaagaatcttcactgaacagtctgataaagaccagtgtataaacccagtgaggaattcatcaacatggtaccaaatcagccctcttccatgaatcttcttaaatactgtcttcactaatttggtactgagaaaaccctaaaaatgagtaccagcactcaatcagctgaaattctgagatgctcaactcataaaattttgctttaaggtaaatagtatcagatatataaaattagaagttcttgggaaaatatttgcaaatgaaaggagatttatcatagtaaactctatgtctaactgtattaatagcagtctctaggctgcaaggtgacttttgggtatattgtgaagtgttaaatattcataataacttgtcctgatttcataggtcttaatttagttcttggataaagaatggctaatatctggtcctctgagaatgttttttacatatttacttcttgttggtgtttgtattgttgatgaaaatgaaaagaaactagtatagtaaagaccttttggtgtataataagaggctttattttcacaaacatatcatagtctaagattaaaataataactttgacttcattattttagccaactttattttccattcttcagaaagcatattctctaggttctttccctagttttctttcttcctcagctttaccaagaaggattcaaataccgaatctatgtcacctttcagagtttctggacaacgctgattccctgcagcttgtctactctggcaaatcctagttgaataccttgtgcctcattcctgtcctcaaggaaatagcaggtgattttgatagtgctctagtttcttccacttctgcaagatagtaacatagtgttctattaggcctcaaaaacattgttagagaagctgggggagtagaaaagaaggaatatttttgtaagcagtaaaaacctattctgaggaccatctgaatgtttctgcccactcacaattgaagtcaactttacaaggtgaatacaaagaagaggatgtatttgttgcaaaagatacgattaaaggtcaatatctgtatttgttccagaaacctttatttgaagccgataaatgacttgtcgtgggcgagcccttcgggtgctattaatactttcgggtcacagcggagactctggctgttgttcagaaaagaactacgaatcccagaatgccctgttcccccattttcccctcgagaatccaagggtgagttcaaccaatcctgtcaaggagagcctgcgctatcggccaatcagaaggccagcctgcgcctggaggcgggtggcgggaagtgcactaggtttgaaatcggaaagttggcggggctgcgggagctgagcctagagtccggctgttggctagagtgggcgcggatctggtgtggggaaggcggcgggactcaggcctgcctgcgaaggtaagggagttgggcgccgagctgggctccttggcccccctgtcgcaataagggaaagtgaatttgagggcgggatgtgtgta

SEQ ID NO: 24834 - DNA, 2300 bp, Homo sapien
gttgattcagactcctagtttcctatatttctgttgtgtaagccacccagtctggtattttgttatagcagccctagcagactcaaacaaccccctaggagaaaagagtgtgtgagagaaagtattgtcagaggagtggtgaggatgctggtcagagaaggcatcaccgatggatgcatagaagctaagatatgaaaagactaaaaatgatgaactacgaggaataagcagattagcagatgctgttaaagggtgaaagaaatcaagatgcttttgcttcacttaattatcccacagtctacagaaccaggtagttctcgagagaaaatctttctaaattaactaccatagatgaaaggctaatcacagactctgaggtgctgaagagcaggaagtttaatttttaagtggaagacaaaatgtatttgatatcattcacatcctgatttaaggataagacatttctgaagaaaatgagtattatgaattacgtagatcaaacactttttagaaaaagaataaagggaagttatgctcttcctcatggctcattaaagagattatggaaattacagaacctgaatatgcaaaacaaagaaaagccagaagcatagactctaattagtcaaggataattccttatatgaattgccttagtgcaatgattctaagccccttataccacattggaaccacttgagaagtattttaataataccaatgcccaaattccattaccagaaatataactgatctcaggtggaacacagttatggcaatttaaaaagcaccccaaaagatgttaatggtcagtcaatgcatttcttccaggtaaggtaccaatagacactgaagcccagtaacaatggtgctgttaaatgatgggacacaaaactcgaagagaagttcaaagtgatagttatagcctgtgaaggactctagtgaagtcttttgtctttacttaggccatggtaagcaaagacaaaaatctgaatgacaaaataacaagtaaggttacctagatccatccctggccaccttgtgaggctttgttgctttcccactaatcctagacacaatccagctctctaaacccaacatctctctgacttagatccatagcctctttgtgctacccttctgttcattctcagtctaccctggtccatagtccagggtccagtcgtagtctatagtccaggaccagagtcctggtctatagtctagtcatagtccacagccgtagattatggacctatgacttagatccacagcctctttgcgctacccttctgttcattcttagcatttgtttggtgctttccacttctgtttaacactctgttctcaacaaaccattttcctgattggtcaaaagccctttgatgtctattcctatctttgtcacatgaatcattccctattcctctcaactgtattctctagttaataaaagatacaatttgatcctaacacatttctattatccaaatgactttcatttctgctttcttgtcttatagtcaaaaaacaacacatttctttccctgttccatatatattctatcattctcttggataaagaaaattgaactattcttattttaaatcagtgatcagaacataatctgtcatatcatatatttttcatacccagatatttattcaaccattttcctcaaagacccaataaaatagagagccacagcctatcttaaattaaaatgcagggctttatgggctatttgacatgcaataattatttgcaaagtcttttcaccaaacatagaaattgctaatgtctgaccttggaggaaatgaactgtacaaaaaatttcaagcaaacatgatccaactgttcgcacaaaagggaggttgcataagaaattcattgtgtttctatccaaatttccccctcgaattgccacagatcagcatgtacttcactctttgccaccaattaaaatcataaatagatgagctattcagcagaggagggctggtgtgccctctccacagatggtcagcatcacatgttgcagtaatggctcgacatgccacaaaggcacagtataaaaacggtgggaatcagagcacttcagctccaattgctctatgtttagaattgcctctttttcaagatggatttccttcacaggaatggagtgctcataattcagcatttgcagaaggactaccgagcttactacacttttctaaattttatgtccaatgttggagaccccaggaatatctttttcatttattttccactttgttttcaatttaatcagacagtt

SEQ ID NO: 24835 - DNA, 2300 bp, Homo sapien
acacaaacacactctctctctcacacagcatacgtacacacactccctatcatatccctttcctgcaatgcttttctccataccatttacaccatctgatgtattgtatgtgttacttctttgtctcctctctatactgccccctccctgcccccagaatgtaagattcctgaggcagagattctcgtctgtcttattcattcctgaatcccagaactgagaacagtgtttggcacataaacattcaaaaagagccggtattttaattgggtgactgtagggaccacaaccctacctattttcagaccgtgaaccataaagaagacaagcttatagctgaagtgaattaagcacgatcaactcagtactcacactgcccagatgtgtctggccagcatgagggtgcagaggaagacaccctgaactctccagggccctggacagatggccactctgtcttcacttttctcatctataagatgaagttgttggatgatatatcaatatttacaatgttgtttctagctctaaaactctatgcttttatcttcccttggatcttcatggcaccagaaggaaagtcttaggacccttggacctgtgagcagatcagctatagtcctgagttgacaaatttctcttggcatttttaccctttgactgctgtcaataacttcagcacagcaaaggtagcaaaattctattgggaatcttttcccaatcaaagctacagccccatagctgtgttgcctttttggttttgtgtgaagcaaaatttttttcctgggtcctaattggtgccaaatccaatattactacatttgcgtcaactcagaagtcaacccattcagtttgcatagaggaaacatctagaaatcttgcttttctttgctgaccttgatatatttgagatttgaacatataataacatataaaattatatgttataattttgggttttatgggctaagtcataaaccatcttatacataaattccaatagagaaaaaatggtggatgctgaattttaataaaaaatttatgacagagaaacctaaaattgagaaaatttgatcttacagtttaatttctgcaaattaagaagcactggcccatcaattgcatttcagagcacagagtggaagaaggttagcacagactggcatgtggcttcacatctactagttgttacaccttaggaggattatttaacctctctgtgcttcagtttccccaactataaaatagaaatgacatgatagcacccaactcctagggctgttgagaggcccaaatgaggtgatacaaataacatttttgaagtgggccaggcacccaaccaagtcttgaccaatgttgcctattattattcattgctgaaggctggagtgagaggcatttagggaaaagtaagctcaggcaaaggagaaaaaataagaacattgtaggaaaaatggaaagattcacaagaagggagaggaagaggcagcacaaatatattggaggagctccacatgcttatttgactcaagacctgttcatttgaacctttagaaaatcgttcatctttgcttatacagagcttcatctggtgtgtccatgccagggtgcaagagttgtctgtgcactcagacttttgagcaaggctgtttcaaatgttcttttagggtatttgtctccacaaaactctatagctgggccaggagcatctggatcctgcaaccagggattttccaagagcaatcttttatattgagggggaaagtttaaaggtattttttttttttgtcttgttatgtttttaagtaacttttcacaactacaggcctgtaaaaaataagggttgggatagcctgaattccagggctcttgctgggcccactctgctcaatttgcctctcgttccaaggtgaatcagcaatttccaaggcctgttgacaccctcagagggtttcccaagcacactctgtgtttggggttattgctctgagtatgtttctcgtatgtcactgaactgtgcttgggctgcccttagggacattgatccttaggcaaatagataatgttcttgaaaaagtttgaattctgttcagtgctttagaatgatgaaaaccgaggttggaaaaggttgtgaaaccttttaactctccacagtggagtccattatttcctctggcttcctcaaattcatattcacaggtaagtaacttatacttgtctctgcaaatccattccctcttccctttaactcttactttgtggagtggagtgtttctggtttattaaacattggtctcttg

SEQ ID NO: 24836 - DNA, 2300 bp, Homo sapien
acaagaacagagttcatgtgggacatttacttaacaaatgcttggtatcacacagagtgccactgatagctggaaaattaacctgtgttaggccagatctacttcactacaggccattttctacagccaatcgacttcaacagggtagttataatgatatgtcctttatttttggaagtttcattaacattaccattcccaggatgtgatgtgtaagggaagaaaaacttctttcctcattcgttgccaggttcatggctaaggccccatgacaaaaatcaaattaacaagagaaaagcatacaagtttatttaataaatgttttacgtgacacaggagacttcataaataaagatctggagatccaggtaaacctgtgtgtttttatgctaggaagagtggatagttgtgcagaagtatgattagctagagcggctatgagctaatggtaataaacagggagatttagcaaggcttgtttgttcagattcttctgtttttgtgtcttcagagataggctcatttctttcctccaggtacagggagggcaccactggaatgagtgtcttatgacctacttcaggggaaggtcagctacattttatgacctgcttcaagaaagaaggggcaagggtgaacgtgacatactgcttctgccatttccttaaatgctaagattccatattttggggtaatgtgtcccaaaccccatcaattttgcactccaattagtttataggcagtttgccttcaaactaataatttacatttaaaaataaacaactaccataaagtcaagtttacgttcttgtagtcgagtaggacagtaacatgatattcagaaaagcacaaagggggatggtctttcacaaatttcagtaaacataacagtgtcaataaagcttgcaaactaaatgaatccagtgtatctagagaataaagatatttaggtgtaaaaccatcaactgttccagatattgcaagcttgttgagggccaagttagtgtcctatattatttatatttccaaaaacacctggcaaagtattttgcacaagacatacctgggacctgattggttttgttgattactatccaaaatacttgtgttgacatttgcgaggtagtattgccttgcaaatacaggctcaactccataaccacaaggagagcatttgaagcattttaaaaaatagcaatgaggtatctacttttttaacaccgtatggcaaaggaacagtgaacatttgaatgggtattcagcagtgtaaaacgctgacagcaaaactataccttccattgagttggcagctcattcttaagaagatattcatcccggcacaggtatcggacctgaagttaatctcagtgtatccccctcttcctctacaatgcagtttttaactctaactcaggagaatgtttaagtcaggagaattttaaaaaatatcaaaatcagtcttttaaatttcttttaaaaatatgtgcatatttataaaatattctgtataaataataaagtgtggtcatgttttttttttttttggagacggagtctctctttgtcacccaggctggaatgcagtggcgctatctcggctcactgcaagctccgcctccagggttcacgccattctcctgcctcagcctcccaggtagctgggactacaggcgcccgccaccacgcctggctaattttatattttcagtagagacggggtttcatcgtgttagccaggatggtctccatctcctgacctcgtgatccccccgcctcggcctcccaaagtgctgcgattacaggcatgagccaccgcgcctggcccggtcatgttatattttaagtttttataattgaatacttaaaacatacataaaagtagacagaatagtatcatgaatgcccatgtacatatcgccagccccaccaacaacccataggtcatcctgccctgtccacacctttacccattccttacagtcctgtattattttgaaataaatcccagatattatatatttcattcattaatacttaggttaattaggtaattgacctaaaatataaaaactcttttataaataaccatattatcatcatatctgaaaaattaataattccttaattatcaaatatccattatttaaatttataattgtgtcataaatattgtcataaatagatttgctgttttaaagcttgttccttcattttctctgttttgttttagataaacattgtcataaatagatttgttgttttaaagcttgttccttcattttctctgattgttttgtttt

SEQ ID NO: 24837 - DNA, 2300 bp, Homo sapien
atagatttgttgttttaaagcttgttccttcattttctctgattgttttgttttagattcagaggttacttatgcttgtttgttacatggatgttacatgtgtaatgggggatattggacttctagtgtactcatcacccatatactgaacactgtactcaaaaggtaatttttcaaccctcatccccctccaacctccccccttttggagtctgcagcgtctattatgtccacctgtgtccatgtgtacccatggcttagctgccacttataggtgagaacgtgccgtattccctctccattttgtgtgtgtaatttatttctattgaataaatcaatttgtttgtatttcagattcccctgctggtttgatgattagagaatagttgcacttgtttcctttattctctgttttccctgtgaattggtcattggatataaaggccccattcaattcaggattttttgttttggggttttttggtgggggaaaggcaggatattttcttgctttcattgtgtcagatcctatcattttcagtgcagtttttaaaagctaacttttctattttctcttacctcatccttgcctttgttttgcccacaccttctatctgcaagtaacccatattaaaaacagagtgcataccctttcatatttttctccatattcacataggtatctttacatatgtacacagagtttgctttacaaaaatgaggtcatggaaagccttccaagtcaaatagtagagctcgagtttgttctatttagtggctgcaaaataatattccactgtgcatatgtaccacaatttattcagttatctcactactagtgggcacttgctttgctcccagttctttttgccccatcctgttcatatacacttatatacatttatataggatagaatcctaggagcaggatttttgtctcaaatagtagctttttattttaacagattttttttctggacagctttcaaaaaaggctgtagcaattcacatatccatcagcaaaggataagatcgccctttcccccacaatcttaaatagtctcaaggagccagcaagaatcaggggttctccaaggagaggggaaagtctatgagattccttactcagcaataaatgagctaacagtgaattattcctcaatagaaaggcccctttctattcatctttggatctttttagccaaataggcctcacacagaaccaaagcccagaacaacccaaaacagggtctgaagtccagaacaacccaaaacaaagtccagaacaagccaaacaggatctgaagacagttgtctctaactcactcctccccacttcatgaatccccgtgagttctttcccactggatagtacttgcatattacacaatcagctgcatctagcatctgctcttaatttcatttgatattttatcatctcagttaagattctgggaaaaagaagttgccttctttttgaaagggattgaaagaaactaggaaacttggcaggaagatcattcttaagccaggaaaaaaatttttaatgctcacatgtgaacatgtgatggtcataccagaaggagcacccacctccctccctctgtgacagacacattttcttagccttcacctttccttctttcaagttgctgaaaatccacagtgtttctgttcatttgttactttcattctcacctatcttctctcttgctccatctaccagaacaataattccccatataatacttctcacttcacttttcaacgcaggacctcttgttgggtaagctaaaaggatatgtgctctgtaaataagaaaaatctttattcaaagaatctatcaaatgttcccatgactccatctctatttgtatatctaaagattgcatagtagagaaaaacaaaagattagccctgcttcatcttacagctgggagagtcatgaaaggccaaatgggtaacaaagctcctggttttgaccaagcctagccaaagaagctactcaaatgtcaaaggcattgtttgtataaaaagggaaccaaagtacaggttccctttacagtagaaataagagaactccctgttgacaaagggaggaggaagaaaatataaagtacacttttaaaacatgaagtcttcatagcagcttatagtcgttcagagaaacatgttccactgagaatgacttgagagagaggattacatcattatgccagaaggaagaagccactgtgcatgctctatcaccagcctcaccctcctggtcagccttacaagagtgacactggatatactcc

SEQ ID NO: 24838 - DNA, 2300 bp, Homo sapien
acagtgcactcctttgttttaaaaaggaactaggaaaaaactcaaatggcaatttggttccagattttttttttaatgtgatctttgatctgaagtcaatgtaggatgagttctgaacaaagtagcactttcaaaggttgtatattaaagaggtgaaatgaaagacaacttggcacttgagatatgaatttgaatgtgtatatggttacagtctggataagacactgctaacatgacttcattaactgatcgcctatgtgggaccattggacaaggagagggggtgttctggctgtggtgccatatactgaaactgaacccatgagttgggcccacaggaattgagggacaagccagatagatggcaagaattctaatttccaatatgcaaatcagtctaaacatttgactttttttaagtctatttggaaagtttttgaaacacggctgcactaggcgagttcattaagtagcaaaattttaactattgttataactttttctttgcccttttcagttaacactgcatgaccacccaggtgcatgaggctctcttctcctcttagtgacaataacaggctcacaggaagggttcagtattaattatttataccttacttcatgtggctctaagtcaatgtattgtctatgaggttttatatttaagccatacttatgaaatgctaaagaggaaaaagcatatttagcacatttggggcaccctaaatgtgaacctgagtaaatttcagtttgtttgtttgtttgtttttgtttgttttgagacggagtctcacgctgttacccaggctggagggcaatggcgcgatcttggctcacacgcaacttggcctcccagattcaagagattctgtcttagcttaccaagttgctgggattacaggtgcccaccaccatgcctggctaattttttgtatttttagtagagatggggtttcacgatgttggccaggctagtctcaaacttctgacctcaagtgatccgcccgctttggcctcccaaagtgggtttgttgttcttttaaagaaaaaagaccactacttattttaaagggtgatagcagtgtcctgactctacctagacagatatgttcattcatgtgctcattccagttgaaccataataactgcaattttcaaaggaggaatacagagtctgggaaatcagaagagtatagcaacaaactggtatacgaggaaactgaaaatgaaaaatcagcaaagtggtatttgtacctgcctgagtggctacagtggtgaaggtgaagggtggcaggctagattagcaccatctcctcccctcctcgcctgcggcctcagtactttccactgtggtcccaggatacgccaggtcaactgtgatcaactctgacacagacaaactctgggaggggaggaggcatcctttcctattctcagcggtctcagttccagagaccactttagtaagctctccttgtcataccttaaaacataaattaagacccataagtaattccaaaacctcattttattatgttgtttttatctccttgctcgcccatcttaaaaaaaatggtaacaccaatctcagagactgatttctcctacttattctcttaggagggaaggagtgttaaataagccaaggcatgctaacaggaaggaaaaaatggagattatgaagaataatcacaatttgaaaactattaaaaccacgcaccaggcagtttacaaaatatttatttctttgttatattatttctgctgctgaatttggtcaagagattgtactaatcataaaatgaatgttattgatcattttaaagtctcttctaaaagtagctaaatttatactgctgattccttttgaaacatgcgacctacagcttcttggcttttatgagctattcaagagatatttagtcatcacgttgtgtcacaatgggagtgactcacagagcaaggagagaacctgaggattcctcacacatgtagtactcagagctctacggaaacccaggcacctcgacctcaagaggatcagcctggccagggtggcacaactcttccttccccgtgcacagcaggaaagctgccatcagctgagcaagtccaccaacagtttctgtgtcccacttcatctttaataaggtaactgatgacagttttgtcatttattcttttatttatcaagtcaatctaaactttctttgattttcctcactcttgcagaatgaatcggtggtctttcaagctgtggtcaatgttgctacttcttttaatgtaacacattagaaccc

SEQ ID NO: 24839 - DNA, 2300 bp, Homo sapien
ccagctaattttttgtatttttagtagagatggggtttcactatgttggccagactggtctcaaactccagaccttgtgatctgcccccctctgcctcccaaagtgctgggattacaggagtgagccaccaggcccggctgaactgacaattcttttatcattttttttttctttagctatagatcttctgggggaagaaagataaaagcagagcccgaaattttcttgagaagtgaagaagacattacattgattttttttaatctgaaatagtctgtttctcaaacagcagtaaaaatagtgtgtgtgtgtctgtgtgtgtggtgtttaaaattctgtgtgtatgtttatatttcttgatctagaaagaaaactttacaaatacagaagaaaatggggaaaatgcactaaaatattgaatcaagtgttataatcattactatcttctttttttctatgttttttcttgaggataaattacttttacaagcagaaaaaaataaatgatttttgaaaaggattcgaaggaaaaattaggaaataattgtaagaaaataaagtccaggctgggcgtggtggctcacgcctgtaatccccgcactttgggaggccgaggcaggtggatcacctgaggccaggagttcaagacaagcctggccaacatggagaaaccccacctctactaaaaatacaaaaattagccgggtgcctgtaatggtggcaggtgcttgtaatcccagctactcaggaagctgaggcatgaaaatctcttgaacccaggaggtggaggttgcaatgagccgagattgcaccactgcactccagcctgggcgacaacagcgaaattccatctgaaagaaagaaagaaagaaagaaagagagagagagagggagggagggagggagggagggggagagagagagagagagagagagagagagagagagagagagagagagagagagagagagagagagaaagaaagaaagaaagaaagaaagaaagaaagaaagaaagaaagaaagaaagaaagaaagaaagaaaataaagtccaaagtctataaactcgcttggcctctcagttcctttttgaactcagtgtccaggaacagccatgattccaaaagcacccacaagttctgaacttcaactcagggcctattgattgtcctctgtgaggcattttaaagcccctctggagtctcagggtgggtcaagattaagggcaaagatattgcgtggacacaggaggaagctttttgggtcatggaggaagaaaataaggtctttcccacatgtggttctctctttagcccctctcccttccacaggctcagagagccaacacagacctgctcctctgtggggagggagctgatgatctcattctcttgggctgccccatcactgagtgtggagggctgggcccatggtactcagacctgaggcagctggccatacagccttggcacccaggcataaacctcaggttcttgttcacttcctctttctggatggcttgcttttctctggcaccagtaccccatggtaagagtaatatatgctgaggggaaacgcagatgcaggcttctgaagaaaaaggaaagaaagccctctacctgcctgattttaggccctaggctacctctagccctgacaaaattaattttccaagtagttctgctgcacatatggtcaaagcttccgttttacagcatacatttgcttggctttatcctttgtccatgtgatttttttctcacaggagactggtgttcacagaagacagaatttggggatgtgggagtctggtttgggacatggtgcattggccagcatttccctctcagtcacttcccatttatcttgccctttcttggtgaactcacttgttgcctcccactttaatactcatctgcattggggtgtaatgatctcagagttgggttgaagattgacattaacccatttaaaataagaaaatggaagccaagttgggaatatcttagtggcaacaaaaaatgctcttcttctcctgacagtttgaagataattgggagtctgacagaacaattaaaattgaattattgtttctaatagattttaagcccattctgcagtggaatttcatgaactagcaagaggtaagattttactgtgagggtctgtcttcctgatagacgagttcactcctgagattaataccatcactccacatagctccagctggccgtggcaactcaatggcttgtgtcaattttgccatggctcccctctccctctcttccatttaatttc

SEQ ID NO: 24840 - DNA, 2300 bp, Homo sapien
tgtaatccccgcactttgggaggccgaggcaggtggatcacctgaggccaggagttcaagacaagcctggccaacatggagaaaccccacctctactaaaaatacaaaaattagccgggtgcctgtaatggtggcaggtgcttgtaatcccagctactcaggaagctgaggcatgaaaatctcttgaacccaggaggtggaggttgcaatgagccgagattgcaccactgcactccagcctgggcgacaacagcgaaattccatctgaaagaaagaaagaaagaaagaaagagagagagagagggagggagggagggagggagggggagagagagagagagagagagagagagagagagagagagagagagagagagagagagagagagagaaagaaagaaagaaagaaagaaagaaagaaagaaagaaagaaagaaagaaagaaagaaagaaagaaaataaagtccaaagtctataaactcgcttggcctctcagttcctttttgaactcagtgtccaggaacagccatgattccaaaagcacccacaagttctgaacttcaactcagggcctattgattgtcctctgtgaggcattttaaagcccctctggagtctcagggtgggtcaagattaagggcaaagatattgcgtggacacaggaggaagctttttgggtcatggaggaagaaaataaggtctttcccacatgtggttctctctttagcccctctcccttccacaggctcagagagccaacacagacctgctcctctgtggggagggagctgatgatctcattctcttgggctgccccatcactgagtgtggagggctgggcccatggtactcagacctgaggcagctggccatacagccttggcacccaggcataaacctcaggttcttgttcacttcctctttctggatggcttgcttttctctggcaccagtaccccatggtaagagtaatatatgctgaggggaaacgcagatgcaggcttctgaagaaaaaggaaagaaagccctctacctgcctgattttaggccctaggctacctctagccctgacaaaattaattttccaagtagttctgctgcacatatggtcaaagcttccgttttacagcatacatttgcttggctttatcctttgtccatgtgatttttttctcacaggagactggtgttcacagaagacagaatttggggatgtgggagtctggtttgggacatggtgcattggccagcatttccctctcagtcacttcccatttatcttgccctttcttggtgaactcacttgttgcctcccactttaatactcatctgcattggggtgtaatgatctcagagttgggttgaagattgacattaacccatttaaaataagaaaatggaagccaagttgggaatatcttagtggcaacaaaaaatgctcttcttctcctgacagtttgaagataattgggagtctgacagaacaattaaaattgaattattgtttctaatagattttaagcccattctgcagtggaatttcatgaactagcaagaggtaagattttactgtgagggtctgtcttcctgatagacgagttcactcctgagattaataccatcactccacatagctccagctggccgtggcaactcaatggcttgtgtcaattttgccatggctcccctctccctctcttccatttaatttctctgaatactccttggttagtttttgcattactttagaggaacgatttatcatttagatggccatcttcccaacaaacaaccaaataagagttattgtttctttaactttctatttatccacactaatgcattaaaatatctcaaattcatcagtcctgggttataatgccttggtagttctaatttgaattttctttttcactttgaacactcaggacaccatcttcttgtattatacaagaaaggagtgtacctatcacacacagggggaaaaatgctcttttgggtgctaggcctcctaatcctctgtggttttctgtggactcgtaaaggaaaactaaagattgaagacatcactgataagtacatttttatcactggatgtgactcgggctttggaaacttggcagccagaacttttgataaaaagggatttcatgtaatcgctgcctgtctgactgaatcaggatcaacagctttaaaggcagaaacctcagagagacttcgtactgtgcttctggatgtgaccgacccagagaatgtcaagaggactgcccagtgggtgaagaaccaagttggggagaaag

SEQ ID NO: 24841 - DNA, 2300 bp, Homo sapien
gcgcctgcgcgcccacgggcgcactggagggagcccagcccctcccgcactcgcgctcctccctcccgccagccggcggccgctctttgtaagtcggaggtgcggggacgctcattgactatgcagcgcggccccagcgggcgtcggaccggcttgaccccggcgcggtctcgtaccatcgcctcggccgcccggaaccggcataaatcacccgcgaagactggagtgcagcatcaagccccctcgccgcctccctcctcccgctccggtccggtcgccccctccctccccagaccccggctctcctgtccccagtcctgtctcctccgcgccgcacagcgcccaacactatgcagggaggcaaatagagaaccagtgactttggccagagcacagacctctggatttcccaatccaggaatctctcccactctttcccacaacgctgcccgctccacctttttttctttaagcctaagttttctctttttgtgtctatttatctctttttgtctttccaaagtaacacctatcctttccctcccctagcccccacacctaaagctgcgcctaccactgcagcccacggaagctacgcgatccggactgttggggtcagcagagccccggacgacctgtgccccggggaaaggggctggcagtaattggcaggttctcgcccctggggaagggaggcagcgggaacctgtccagcgaccacgtgcgttcagggctgtctcctccatgcgtcacggccccttcgctggagggaaagggctcctgacttcttggaccaggatccggagcctgggactagctgccgcgctggttcaggggctggagctggagatgatgggatggcctcaggcccgcaaacagccccttctcacacagggttcccaccaccgggaaataacttgcatcaaccctccttttttacccctccctgtgggctctgatgtcacgtacaggctgaggacgtgcgctgagggcgggtgtaaggccacttgtgcttttggcttccgggccccttgccagcctgtccaaagcggccccaaagaagggaggctaggggttccctgaacctctcgtgtttctccttcttataaaagggtaccggaaccatggagaagacgttcgctctttttcaattttgcttcaaaatgagcagacttgtaagaagcacgatctggccatgacacctgtagatgtggtgctgaataattgctaaataaggatccaacctccccaacaaagatccacctccctctctaatttgtaaaaacacaaagcaccccatctcagcagcctgtatcctatcaggggaaaccaagatatccgaaggagcctagagagatcaggccaggaatgaaggtcacagatctccatccagcaggctctttactccttcccttccctacccccgcctctttccctttctttctctttccttcatttttacttgtctggttgtgctttccttttccatttcttattttttctttctcttctctattcttgactttcctcctcgtccatttctttccattgctcatttagtaaaactgcgtccgtgcagatttccccgtgagccgcctcgccggcttctgtgcggggcaaaccctgcggagaggcgagggcagcgcgtgtgcacgtgtgagtgtgcctgtgagagtgtgcgcacaggagtgtgctcttgtatgcacgcgtaaaggggactgtgtatgtcggcgttgaagtgtgactgtggaatgtgcgcgcgtgtgtgactggcgtgtatgagtgaatctgtgtcagttggtgtgacacttaggagtgcatgcgcctgtatgagtgcgtgtgtgagtgtgcacacgcctgtgtgagtgtccctgtgtgagcacgcgtgtgttcgagtgcccactcctccccgcgctgcaaagtgcagggggcgggccgggcggcagggggcctgcccgctggattcccgcatgcttgttccggggcggtcgggtctaaagggctttatgcactgtctggagggtggggactggcgcgggtagaaaacgggatgcctcgggcgtgggggcaggcttttggccactaggagctggcggaggtgcagacctaaaggagcgttcgctagcagaggcgctgccggtgcggtgtgctacgcgcgcccacctcccggggaaggaacggcgaggccggggaccgtcgcggagatggatcgcgggccggcagcagtggcgtgcacgctgctcctggctctcgtcgcctgcctagcgccggccagtggccaaggtaagagcccagccaga

SEQ ID NO: 24842 - DNA, 2300 bp, Homo sapien
acttcagcctgggtgaatgagaccctgtaagacaacaacaacaacaacaacaacaacaacaaaatcatatagcctctggaaaactccactatatgtgaatgggagttaaaaaggcaaatgatgtcttcacattattatgaatatagtttgaccttgtgggccccctgtagggatccagatcagtctttgtgaaccactaatttaaataattgtcatgcattgagaaaagggactttgattcattcaagaagtatttactgggtcctactctgtgctgggtattgttcaaagcagtcaactagatagatcaggtgtctgtcctcgggttgttcacagcaggtggggcagaaggatcagggactgctggagttgacatgtgagctgagatgtgatttgatttgatttgatttgacttttttttggagccagagtttcgctcttgttgcccaggctggagtgcaatggtgtgatctcggctcactgcaacctccgcctcccgggttcaagtgattctcctgcctcaggctcccgagtagctgggattacaggcgtccaccaccgtgcccagctaatttggggtttttagtagagatggggtttcaccatgttggccaggctggtctcgaactcctgacctcaggtgatccgcccacctcggcctcccaaagtgctgggattacaggcctgagccacagcgcccagcccaagcagagatttaagtgacaaagggcaggcctatgcagaggtctggggaaacagtgttccaggcaaaggaagggggccctccaaagtctctgagccctgtctggcaagagagcagccagaagtgagggtggttggaggttgcagacataggcagggccacattgagctaggcccaggtaaggaatttgaagctttaactctaaatttcttttttcctcattctaaaaccatcccaataaaatttataaaagtaatcagggaagaaagtgtgggggaggggacaaaaataaaccaagcttgcagccaattcggcattaatcatgaggtcagcttcctctctgacctgcttgctcagagttgtttggtgcctattgtcctagaatcatgcagaccctgtcacaagattatagttcccttctattgctctatagagaacaacttgaacattatgaaatactcagttttccctttgagatagtctttcagatcctgcataccaatgaaactactgcctcagctggcctgaaggatcccactgatgccagctggtctgaggaacccgtgagaaactgattcagcaaagaatgcagcttccctatcctgatgatttcatctcccttactccgaccaatcaaggaccccaattttccagcccctcgccctctgtgatcctcttaaaaacctcagcccagaactcttgggaagatagattcgaggatctcttcccatctctttgctaggtgccctgcaatcattaaactctttccctgctgcaaactctgctgtcttcgtgtaatgggtttgttactgcacagcaggcatacgaacctgttgatcctatatctctatcacctaggctggagggcagaggcacgatcatagctccccgcagcctccacctcttgggttcaagagatcctcccgcctcagcctcccgagtagttgagcctgcaggcgtgcaccaccacccctggctaattttgggttggttttgtttgtttgtttgtgtttgtagagatgaagtttcgctatgttgcccaggctagtctcgaattcctggcctcaagtgatcctccagcctcggcctcccaaactgcagggattacaggcagaagccaccatgcccggctaataacctgaatctcttgacggtgaagagaaataaggagaggggtaaaatggctaaaggatgtctgtttggaggcaaggaaggtcgcccagaggtcaggcacgctccccttggcggacacagctgggcttctcagagactcctaaatcctgcctcgcatctcaaatcggcttaacgacgcgaaagagctgggcgacgcgcgcgcactctcgcggaagcttgagtctcggcgcccgccgtagacgtcgtgacagaggcggcccgttgccttggagccagagagacgcagctaggcctgcacggctgtggagagatcctgccacgggccttgttcaccatgtcggtgctggatgcgctttgggaggatcgggatgtccgtttcgacctgtccgcgcagtgagtttccaagattcccgagggatcttcaaccctgtagagggcgccgccgtgcgcgttagggacccgc

SEQ ID NO: 24843 - DNA, 2300 bp, Homo sapien
acagaaggcacatgtgactttaaaaaactaaactaggcttaggagctacaaaaggcacggcttaccaaaactaaaagattgctagccttttgtttaaaagttcagtctgggcactgtggcttatgcctgtaaccccagcactttgggagaccaagaaaggaggattgcttgaagccaggagttcaagatcagcctaggcagcatagtgagacccctatctctacaaaaaagaaaaaattaactgggcatggtgacacatgcctgtagtcctagctaatcaggaggctgaggcaggaggaggatcccttagcccaggagtttgaggctgtggtgtgctatgatcacaccattgtagtctggtctgggtggctgaatgagacctaattaatttaattgtctctaatttttaaaaatgtttactccctggaagtgagaaatatttgagtccgggaattttgtacatatttcagagatgtctttcttgtattgcctcttaaaagtttgccacctattttcagtatgagtcttgtttcttttacttgatctctgtggcagtttaatgaaggaaggagggagaattctgttctttagactatgaaaagtaaatactgtgtaaagtttaaaaactgagttaaagagtcactattcagttaataaaaacttgcatgtttttctttttcattttgtatctagcgttcaataaagattagagattcaaaatttggtttagctcttgtcatagaaagctctcagcaggtaagatcttgtatatttttattaatctttgatttttaaaactatgtgacagtctagatttttggttttatttatatagtaatcagtttacatctgagaagaatattagctttaatatgaagttatatatgaagtgtttgaagtcatacagaaattgtccccagaggaagaatcctgcttatatttttttgttggacagacatgatcatttgtgatcatcacttattattaatgacagaatcaagtcattgtgccgagggcttttcatgcattatctcaatctttacacaatcctacgatacagctactatttttcccccattttatagtcaagggaactgaggctttgagaagttaggaaccttgaccatgatctcacaactagtaagtgatggggctaagttttgatctcaagtctgactgatttaccaagactgtctttgagaaacacaaacatatatttgtgtacacacacacagtttgaggtcttatattctcacacacagattatatgctaattataacctgttatgctccattatgccaggtttttgcagaaatacatttaaataaaacatgctggtctcatgatagtaggtttcactggctaagaaaaattttaaatacatttttaaaagtgatttataaaattacttatcatctacattctaaatttaaacatgaatgtctgcttactcctttctcctggcctacagctgccatttattgagtatttactctgttccaagaactataccaaatgtcatatatatgtttatcttattttatatgacaactggataaccattttatggttagaaaattgaggcttagaaaggttaaggaggccgggcgcagtggctcatgcttgtaatcccagcactttgggaggtcgaggcgggcagagcaggaagtcaggagatcgagaccacggtgaaaccctgtctctactaaaaatacaaaaaattagccgggcgtggtggcgggcacctgtagtcccagctactccggagaggctgaggcaggagaatggcgcgaacccgggaggcggagcttgcagtgagccgagatcgcgccgctgcactccagcctggccgacagagcgagactctgtctcaaaaaaaaaaaaaaaaaagaaaggaaggttaaggaaagtttctaagtatcctacagctagtgaattagtggtagaaccagaatttgaacattaaaagcgtgtgctcttaacccagaacatatactctcacctattacagtatgctacttagttttttaacactcctttcaaaacactgtatcatggcccagtttctttcctaattcttcaaggagatagcctcagatggcccatttcctttcttcttttcgtgtagtctgttccttttcaaggcctagttcaagaaaaacttagttcccttggccttcacagtctacagtgtattttttaaatcttgaaaggttacctttgatatttcagatgaacttatatttgaatacacttcaaaataagcctgcgttgggggaatggtgttcaggtgagggcg

SEQ ID NO: 24844 - DNA, 2300 bp, Homo sapien
atttctacattttaagggttggaattataataaaccacctttaagacgaggggaaagaatgtatgaaaaatttgtactggtcacagataaaatgctgccataactattgtttaaatattgtttttttcaagcaaaagagactataaaattgctgactagtaaggaataatctcaaatgtcatatgatgtttgcatctgactcattaatcttttcaaatgttagatgttacatgtagagagaaatgagtcatttattgtttaaacaaggaagcagctgttagttttttctggtgtgttaaaacctttagtggcatctataaatggaaaaagagtcaatgagctcttctttcagctgttgttttagcagctgacagtaccattgacttcactgtgatgtaaaataaaagaaaaggcctttactcatggatagagaccttgaagtttaaaaatacataattccttgatctggggcattcattcattcaacaaatacttataaagcactcacgaaacccctacgctatagcatttgaaaagaacagacactcccacaatccctgtcttcatggaatttgtttttgggggtatgtgtaaaaataccaacttttgaaattacagtatttctacagccctacttgagttcagataatgtgacaatatgactgtgtaataaagtatttaatgggcccagtgcggtggctcacacgtgtaatcccagcaatttgggaggccgaggcaggcggatcgcgaggtcagcagttcgagaccagcctggccaacatgatgaaaccctgtctctactaaaaatacaaaaattagccaggcatggtggcgggtgcctgtaatcccagctactcgggaggctgaggcaagagaattgcttgaacccgggaggcagaagttgcagtgagccgagactgcgccattgtactccagcctgggtgacagagcgagactctgtctcaaaaataaataaataaatgaaagtatttaatgaagtatattataccatctatatataaacaaaggaccgattttctttcaaatcattacttctacctccataattaatatggtattctattataatcaacagcctacgttatgtccccagttatatactctttaaaaaaagggggggctgttctctatgaccattgtaggagttcatcttgattttgctgtgtttagtgataacattgttctcatggggttatatctgttctatttttcacgttttatttaatgaatgataatttttgatatttaaaattacagattatcttttgtgatcttatttgaatgtgtgtggactttttcgttccctagattgacttttaattattttttctggctctgtgattccttttaaccttttgcttttattttaccttattatcgtttgccacattagatcatttgtatgacaaggcaggatatgaataaataattttataatttaattcaatattaattacagtttttccatgtaagaataatttggaatgttttagaaaattagcaattcctctgcatttcttttttcaattatcatggcaacattaaaggttttgtaaaactagtacagaagtaaacatctttaagtttactacttctaaaagaaatatctatatcccactgttctgagtagaaagtaaaaatttgtatgttaacaattattggaaatgagatcttgcttatgagtattcaaatgaacacatctcatattcttgacctttgcatcattaattcagagagccaagtagcttgacactagaacatatttagaggagtgactcatttttatgattcatttttctgttaattcaataaacattttcttgtagtagcctttattagtatatcttctaatgtgttatgtatttttaagctttcaacttcacttaaatgtcttgtttcttagctgtttccctagtgattaaaagttccagttgttactttcaatctataacagctgcaagaacaactcttctttccaagccagctctcctaaattcccgttgttagagttggtatctatatttagctagtgggattaaattgcaaaggcttcaagctgggcaaagcacactgatctgcctttttacagctagacctgtgtgctgcaaggagctaaggccttcagtgtccccttccttacccaggtttctcacagaatggattcccagcgggaacttgcagaggaactgcggctttaccaatccacccttcttcaggatggtctaaaagatctcctggatgagaaaaaattcatcgattgcaccctaaaagcaggtgac

SEQ ID NO: 24845 - DNA, 2300 bp, Homo sapien
atagtcccagctactcctgaggctgaagcaggagaatggcgtgaactcgggaggcggagcttacagtgagccgagatcgcgccactgcactccagcctgggtgacagagcgagactccctctcaaaaaaaaaaaaaaaaaaaaaaaaaaaaaaagcctggtgtggtggctcacgcctgtaatcccagcactttcggaggccgaggcgggctgattacctgaggtcaggagttcgagaccagcctcaacatggagaaaccctgtctctactaaaaatacaaaattagctgggcatggtggtgcatgcctgtaatcccagctactcgggaggctgaggcaggagaattgtttgaacctgggaggcggaggttgcagtgaaccgagatcgcgccattgcactccagcctggggcaacaagagcgaaactgcgtctcaaaaaaaaaaaaaaaaaagaaaaatgtggtatatatacacaatggggtaatattcagccgtaaaaaaaatgatatcctgtcatttgcaacatgggtggaactggagattattatgttaagtgaaataagccaggcacagaaagataaacgtcgcatgctttcactcatttgtgggagctaaaaatcaaaacaattgaactaatggacgtagagagcagaacgatggttaccagaggctgggaagggtaacgggcgattgtgggggaggtggggatggttaatgggtaaaaaaaaataaaatgaataagacctactatttgacagcacaacagggtgactatagtcaataataacttaattatacattttaaagtaacttagaacgtaattggattgtttgtaactcaaaggataaatgcctgagggaatggatactccatttttcatgatgtgtttattttgcgttgcatgcttgtatcaaaatatctcatgtaccccataaatatatgtacctactatgtacccacaaaaaaaattttttttttaattttaataaaaatgctgaggttggaggatcacttgagcctagatgttcaagttcagcctgggcaacacagtgagacactgtgtcttaaaaacataataaaattgataaatttaaattttcgatattacctagtaccttgtctgtgttcaaattttgttgattgtcttataaaggtctttttataggcagtttatttaaatcagtttctgagtaaggttcacaattactgtgtctcttaaatttttttgtttctttttaaataaactttacagaaaaataatgtataaaaattatactagtcataagcatacagcatgatgaattttaatatactgatcattgctatgtaacagcaccaagataaggaaacaacatcattagttcttttcatgttctcttctagtcctctcacccaaaaaggatcttgacctctaacaccataaattgtttctatagaaatggaatcctatagtatgtacccttatagtttagtttgctcagtatgttttaaggatttatccattatgttgtatgattccataattttattctattgtatgagtatgtgcagtttatccattgtactcttgatggacattcgggttttttgcagggttttgctattacatatgtgttgctgtgaattttcttatgcttgttttttagtgaattcaaagtcataaaatctataacagttcctttttcctctcttttgtcttgccattttcttgttgaagaaattggattatttctcctattaaaaaaattcatagcactgttgtagtagcagccattatatttgttaatatgcaaccttgagtcaaaattgttctgtcatctaaaaaaattaagtaaatcattcaaataatttttagtgattttccccctttcaaaacctttctacagtatctgactttttaactgttgccatgttacttttataataataacattttagaaaaaaaattttatgtaatttactattttgattgcttttaattttataactatatattatgtgttttaagtgaaagtaaatactaatgttctcctttgtatatttcctttaataggtttgatattaaactgctctcagaattttcctcttgcctagcagatcagcatttgtattttagtccattaatgggaaaaatagctgatattgttcataggaacttggaaaccacacaggacttaaggtaaatttatttagggaatcttgtgttgtggtggaaagatcctgggctttggatgtggatgcagtcagatttgctactcttagtttatgtgacttaaggttacttaagctcttggaagttc

SEQ ID NO: 24846 - DNA, 2300 bp, Homo sapien
caaggtctcatgggaaaggtcatgtctctcgaagaaaggttataaaccctgagatatgagggttgggcgagacatccgagcctgtttcgttccgtgttgggaccaggaataaccctgacttctgagctttcataaccccaggatcctccagaaaatttgcggcgcgctgagggaaaaccttgctggcaagtcgggactgtgtggcagcggctatttttcttttcccacccagcacgttttcgggctggggacatagggttcagttgagatacggaggcttccttcgggatattgggttctctgaagtgcggatggactagggcagggctgagaccccattcattcactcatttgtttagctctcctttatgcccggcgcagaagataccccttagggtcccaaggcccttcctgtagttaagttccttccttaaggtcattcagctggggcaaagctggggactcgacacctttctatgctaaccattgagctgcctccactttgagcagctcagtggatgaatatagtatcttgaggatacctttgatttgtgcagggttttcttgtgcaggtttgtgacccaggtcagcttaggtcaggatgctgtactgcttgccacaaaatagcctgtactgtcgcgtcgttttttcttgtgaacagactgtttggcatagccgtagagaggggtctgagacatgaatttagtgatacagcgttgatttgtttgtgtaatgaagctgttcaagtggaaagaactgagttgtagtccctgcttcactagtactagaaggattttttaaacctttttgaacctattttgccttatctgtaaaatggaaataatatcaacctggaaggttagctgagagaatttaatgagataatgtgtttcaaacgttctttgtaaatggtaacatgttgcagaaatattagattatatgactttagtccctgcttttctaaccattacttctcaattataaatgtaaacatttatagcatatttttaaaacaaattattcttttttcataattatctttagttcttttattgtttcagcatgacttgaaacattacttaatttcttagtatttcttgattggtgctttaattgtgtcgttcattggttaaaacctatccaaggccagtaatgattaaattatatgacttcttttatttatttattttctaaagaaaggaattatttgagctctttaagggcacaagaaaaaggggcaagaaattatcctgaaagcaaataaacctgagaccatacttctgaaaaattaaaaaaaaaaagtatatatatatgtatgtataaatatatatggctctgaattaatgcctacactttttagaaactttgaaggtgattatttattttaaacaattttcctctttttcgaaaagacagctctgagtttgtgggctttttttttccttttatggtaaatttgaaaactttatgtaaatgtcagatttaaaacacttttaaaatggggtgcagaaagaagcccctttttctggacatttattttttgatcaaattctgctatctggtttagactaagaaaaagtctttagttaatgcagaaaaaatgtattactttaatttgaattttggaatcattttgatattaatgatgtaagcataaccatgttaaaccaattcttttatagaagctgtacattggaatgcgtttacagtcattgtaatggaagcaaaatacatgaaggaaaaactgttatttgtatccctgcttattgcacctgacgactagttgcagatggttttgtttacctaagaaaacttgtgatataaatgaaaaaaacacctgttttcctagagtcattggttacaaatatgcttcgtctaagagctatttgtccattctcctggagagtgtttcaatttcgacccatcagttgtgaaccactaattattcagatgaataagtgtacagatgaggagcaaatgtttggttttattgaaagaaacaaagccatactttcagaaaagcaagtgggatgtgcatttgatatgctttggaagcttcaaaagcagaagaccagcctgttaaaaaatgctgagtatgtcagagaccatcctcaatttcttactcttcataatttagctacaaataaattcaaattaatgaatgacgataccctggtgaatgtgttatacgtcacacaacagtaagtaatttacttttatattttatggaatgattatatagtttacattttaattttctaaaaatctctttattttcattttatttatttatttttgag

SEQ ID NO: 24847 - DNA, 2300 bp, Homo sapien
gtatttttttggtggagatggggttttgctgtgttggcggggctggtctccagctcctaaccgcgagtgatccgccagccttggcctcccgaggtgccgggattgcagacggagtctcgttcactcagtgctcaatggtgcccaggctgaagtgcagtggcgtgatctcggctcgctacaacctccacctcccagccgcctgccttggcctcccaaagtgccgagattgcagcctctgcccggccgccaccccgtttgggaagtgaggagcgtctctgcctggccgccatcccatctaggaagtgaggagcgtctctgcccagccgcccatcgtctgagatgtggggagcgcctctgccccaccgccccgtctgggatgtgaggagcacctctgcccggccgcgaccccgtctgggaagtgaggaccgtctctgcccggccgccccgtctgagaagtgaggagaccctccgcccggcagccgccccgtctgagaagtgaggagcccctccgcccagcagccgccccgtcagggaagtgaggagcgtctccacccggcagccaccctctccgggagggaggtgggggtcagcccccgccaggccagccgccccgcccgggagggaggtgggggggtcagccccccgcccggccagccgccccgtccgggagggaggtgggggcggtcagctccccgcccagccagccgccccgcccgggagggaggtgggggcggtcagccccccgcccggccagccgacctgcccgggagggaggtgggggggtcagccccccgcccggccagccgccccgtccgggagggaggtgggggggtcagccccccgccccgccagccgccctgtccgggaggtgaggggcgcctctgcccggccacccctactgggaagtgaggagcccctctgcccggccaccaccccgtctgggaggtgtacccaacagctcattgagaacgggccatgatgacaatggcggttttatggaatagaaaagggggaaaggtggggaaaagattgagaaatcggaaagttgctgtgtctgtgtagaaagaagtagacatgggagacttttcattttgttctgtactaagaaaaattcttatcctgttgatctatgaccttacccccaaccctgtgctctctgaaacatgtgctgtgtccactcagggttaaatggattaagggcggtgcaagatgtgctttgttaaacagatggttgaaggcagcatgctccttaagagtcatcaccactccctaatctcaagtactcagggacacaaacactgcagaaggccgcagggtcctctgcctaggaaaaccagagacctttgttcacttgtttatctgctgaccttccctccactattgtcctacgaccctgccaaatccccctctgcgagaaacacccaagaatgatcaataaaaaaaataaataaataaaataaaaaaaagaaagttgcacagcatattccaacaaatatcagtttggtacctttagagccttactttgttgtagtgattatcagctgaaaattatgtctgttgtaactttggtaagcattccactttggttatttattagtggtattttttttttaagtgtcaagtgtcaaatcttgggactattaaaataccatggtaagtaaaaaaaaaatatggtctgagaactggtacctatccacgacataagtgcagaaactgagagtatgagtttgcatactttcaaagttactcgacagagttatttcgtatatgctaaaaaataataagaaaaatctgtacgtgtcttttccatgtttacatttttaaatttcattttcctaagtatatttttgtgtatattataaaagtagtagacttccaaggactaggagaacaaccttagatagtagagaatcacctaaacgacctatatcttcttcaacagcttaagctgtgtactgcgctagagcctccctcaatgaggaactacaatgcccagaattcccccaaaatgcgtgagcgacgtccatttcacccacctcgccgcgacccaccctgggatatgtagtgcgtgacttccgcagtgcacgctgcgcctgccgggcattttttcctggtttgggggcaaggtctcatgggaaaggtcatgtctctcgaagaaaggttataaaccctgagatatgagggttgggcgagacatccgagcctgtttcgttccgtgttgggaccaggaataaccctgacttctgagctttcataaccccaggatcctccagaaaatttgcggcgcgctgagggaaaac

SEQ ID NO: 24848 - DNA, 2300 bp, Homo sapien
acacacacacgtacatatatgtgtgtgtatatatatgtatatatacacatatatagtatatgtatacatacacacactaggataataaatatatatataaatatatataaggaaactataggataacaaatgttgtttattatatacactatacatacagtatccttccatttatttatttttatttaagttgtggggtacatatgcaggtttgttacagaggtaaacttgtgtaatgggggtttgttgtacagaatatttcatcacctaggtattaagtctaggacccattagttatttttcctgatcctctccctcctcccactgtctacactctgataggccccagtgtgtattgtgcccctctatgtcttcatgtgttctcatcatttagctcccacttataagtgagaacatgtggtacttggttttctgtttctgcattagtttgctaaggataatggtctccagctccatccatgttcctgcgaagggcatgagatcattctttttcatggctgcatagtattccatggagtatatgtaccacattttctttatcaagtctaccattgatggacatttaggttgactccatgtcttcgctattgtgaatagtgtggcaatgaacatacatatgtgtatgtctttataacagaacaacttatattcctttgggtatatacccagtaatgtgattgctgggtcaaatggtatttctgcctctaggtctttgaggaatcgccacgctgtcttccacaatagttgaattcatttaaactcccaccagcactgtaaaatgttcctttttctccacaacctcaccagcacctgttattttttgactttttaataatagccattctgactggtatgagatagtatctcactgcggttttgatttgcatttttctgatgattggtggtgttgagctttttcattatgattgttggctgcaagtatgtcttctttcgaaaagcgttggccgggcgtggtggctcacacctgtaatcccggcactttgggaggccaaggaggacggatcacctgaggttgggagtttgagaccagcctgacctacatggagaaaccctgtctctactaaaaatacaaaaaattagccaggccagtctgtggcccaggggttggggacccctgttttaaggtattgcagaattgtcccctccacacacagcgaagtgtaaatccgtttaatctctgaactatctaaagatgaatatgctgctgctctcctgcaataaagggcaatgacttaaaagaggtgggggtggagaggcagaaatgtcctctgttttactgctgtgtaaaactggtcacgccccttagaagcaccaccacatgcctaactgttgttgataattaatttacctgatgcaagtgagtgaaaaatttaaatgatcataatttacgttgcctttaaacgacagaacaatttaagtcctctagttagctagttcctttaaaacacaccccacatccctaccagaatcactgcccatccccccccacccccccgcccaaacagcaatggttatttatttctaacataatccggggacccttgccccttaaaataattaaataatatatgccatattttctctagaaggcactagatttggcatcaaaagacttgctttggcattcaagaacagtgtgtttgaggaggaggcgtttatcttccctgagcctcaatttctttatctgtaaaacaacaaagaacatcaaagctctttgtaatttcttcctctttcctcaaataacactttgctcattactgcgtttttagaacttatatcctagcgttaagtggaagcttaactggaagctccatgaaggtaggccttcctttctgataacctagcgtaagatcaataaatgtttattaaatgaggcactttacttcacaaaggatatggcattttaacggttacaagcgttcccagtcaacgcatccacaaagcattaggccacctataaactaggaatttaaaaggcaccaaaatcctagaagtcctaggagggcgtggtgacgcaagcaggtgaacgctggccgatgctgacaacccactcctgacgcgcttccggtgcgacgctgtctctccatgccaggactgagttgtgggggagggaggcggttagcgggctttagcgccttttctggcggcggtagatttgaagcgcttcaaaggaccggacccagagaagaggaaaactctaccggtgcaggtaagtggtatgaggctcaagttgttctggcggcgtcatttcagcagtc

SEQ ID NO: 24849 - DNA, 2300 bp, Homo sapien
tcctctccctcctcccactgtctacactctgataggccccagtgtgtattgtgcccctctatgtcttcatgtgttctcatcatttagctcccacttataagtgagaacatgtggtacttggttttctgtttctgcattagtttgctaaggataatggtctccagctccatccatgttcctgcgaagggcatgagatcattctttttcatggctgcatagtattccatggagtatatgtaccacattttctttatcaagtctaccattgatggacatttaggttgactccatgtcttcgctattgtgaatagtgtggcaatgaacatacatatgtgtatgtctttataacagaacaacttatattcctttgggtatatacccagtaatgtgattgctgggtcaaatggtatttctgcctctaggtctttgaggaatcgccacgctgtcttccacaatagttgaattcatttaaactcccaccagcactgtaaaatgttcctttttctccacaacctcaccagcacctgttattttttgactttttaataatagccattctgactggtatgagatagtatctcactgcggttttgatttgcatttttctgatgattggtggtgttgagctttttcattatgattgttggctgcaagtatgtcttctttcgaaaagcgttggccgggcgtggtggctcacacctgtaatcccggcactttgggaggccaaggaggacggatcacctgaggttgggagtttgagaccagcctgacctacatggagaaaccctgtctctactaaaaatacaaaaaattagccaggccagtctgtggcccaggggttggggacccctgttttaaggtattgcagaattgtcccctccacacacagcgaagtgtaaatccgtttaatctctgaactatctaaagatgaatatgctgctgctctcctgcaataaagggcaatgacttaaaagaggtgggggtggagaggcagaaatgtcctctgttttactgctgtgtaaaactggtcacgccccttagaagcaccaccacatgcctaactgttgttgataattaatttacctgatgcaagtgagtgaaaaatttaaatgatcataatttacgttgcctttaaacgacagaacaatttaagtcctctagttagctagttcctttaaaacacaccccacatccctaccagaatcactgcccatccccccccacccccccgcccaaacagcaatggttatttatttctaacataatccggggacccttgccccttaaaataattaaataatatatgccatattttctctagaaggcactagatttggcatcaaaagacttgctttggcattcaagaacagtgtgtttgaggaggaggcgtttatcttccctgagcctcaatttctttatctgtaaaacaacaaagaacatcaaagctctttgtaatttcttcctctttcctcaaataacactttgctcattactgcgtttttagaacttatatcctagcgttaagtggaagcttaactggaagctccatgaaggtaggccttcctttctgataacctagcgtaagatcaataaatgtttattaaatgaggcactttacttcacaaaggatatggcattttaacggttacaagcgttcccagtcaacgcatccacaaagcattaggccacctataaactaggaatttaaaaggcaccaaaatcctagaagtcctaggagggcgtggtgacgcaagcaggtgaacgctggccgatgctgacaacccactcctgacgcgcttccggtgcgacgctgtctctccatgccaggactgagttgtgggggagggaggcggttagcgggctttagcgccttttctggcggcggtagatttgaagcgcttcaaaggaccggacccagagaagaggaaaactctaccggtgcaggtaagtggtatgaggctcaagttgttctggcggcgtcatttcagcagtccctgcgtacgaaagcgggaagggcctgggaagaggggcggagccggcgcggctgaccgggttgggtttaccgtctttccctcgaggtatcggggctgcttgggcccagaggaagtccctgaggaccgcagcagtgcctttgccgctgttgcagaaggagaaggcttgcagtcgagccccggggcctggggacggtccttcctctgccagcccccgccctccccactcaggcgcacacctccctcactgacgcattttgccgcacaagctgtaacatggcggcagcgactgcggcctgaactctaggg

SEQ ID NO: 24850 - DNA, 2300 bp, Homo sapien
agcaacaaagggatgaaccatgtgaagatggtttgagagcattccaggtggagagaacagcaaatgtaaaggacctgatgaaagagtaggctgttgggtggcagggggaacaagcaggataccaatgtagctgaaataaagttgaggaaaatattagaagatgttaggaaatgaaagttgaggaaaatgcctagaggtgaacaggagctaaaatatttagagccgtataattgaaattacagtagccacaagccacatgtgctttttgagcacttgaaatgtggctagtctacattgagatatgcttcaaggataaaatatacactggatttccaaagacttgtacaaaaaaaaaaaactcagtaacatttttgtttagtatattttgaagtggtaatagtttggttgtacaagttgaacatcactaatctgaaaatctgaggtccaaaatgtaaactttctgagcatcacaattgaaaatttcacacataagtacttaatacaaactttgtttcatgcacaaaattattttttaagttgtataaaattacacatacaattcaggctgtatgcataaggtatgtttgaaatataaatgaattttgtgtttaaactgtgtcccatccccaggatatctcgtgtatgataatattccaaaattcaaaaaaaaaatctgaaacacttctggtcccaagcatttcctataaaggatattcaatctgtacatactgagttaaatagaatatattaaaattagcctggtttttgtttgattgtttgagtctcgctctgtcccccaggctggagtgcagtggtgcagtcttggctcactgcaacctctacctcccgggctcaagcaattctcctgcctcagcctcctgagtagctgggattacaggcacccgccaccacagccggctaatttttgcatttttaatagagatagggtttcactatgttggtcaggctggtctcgaactcctgaccctgatccgcccgcctcagccccccaaagtgctgggattacaggcgtgagccaccgcacccggcccaaaattagcctgtttttgtttgtcaaaatgtggctactgaaaaattttatacctgggtggctcatgtttttattgagcagtgctggtctagagccttaaaatccatgctaaaacttttcagatgaatagtaagacagttttaggcaggggaaggatatgataaggtttgtgttttaaaagaatcattccactctggctattttgtgcagaagaggcagtacagaattaagagtaaaataagagaaaccagttaggaggctattggaatagcctagataagaaatgataatggtaaaggtaatgagaacttttgggatagtttttgaagctagagccaaattaccttcctaatggtttggataatgaggtatgagggaaagtggaaccgaagatgacccccaggttttcagcctcagcagctggcttggacaatgataatgtttactgagtattcaagggaatggaggtagaagaataaagagttttgtcttagatatattaattatttttaataaagtaaatttttattgaaatataacatagcgtacatagcatatgaaactgtcatttttagagtccatcattttggatactatttacacttagtgcctttgtttcttctacgggtaagtatcatcttccaccaagtattacgattcagcattttaagtccttaaaataaaatgccttatcaaaataatgtctgttaaataatagctttctgttatggaaataaagctgttacacagagtatctctttggtattttttgtgtctataccagcatatcagtaaaggctgttgctcagaatcagcaagtaccctcatatgtaaaattgaatgtgcttttactcaaaatgtaaatctaccacatatactatttaacaatagttaaatagtatattaactatatactatttaacaatagttaaatagtatattaactatatactattctttttcttcttacatgatttttgcttcttaaaaatctcacattttaatcagaactctcatttttgttttctaggagcacagggatcagttgtccttgtttttttttggtcttttcttcatttgaaggtaatctgcttattgagttcactaatcatacagagtaaatacaattttctgtttgagctattaatctgtattccggttgataaatagaaagttgattacataataatggttaaggcttaactttcaagtcttttctaattgcttcacaaaatgcaatctaatctct

SEQ ID NO: 24851 - DNA, 2300 bp, Homo sapien
cttttttttagagatgaggtcttgctatgttgcccagggtggaggacaatgaccattcacaggcgtgatcacagtgccctgtagcctcaacctcatagcctcaagggatccttctatcttagcctcttgagtagttgggactaaaggtgcgcaccaccatgcccaacttctaatgtttttgttcactgttatgtctgtccccagcaccgggaatagtgtcaggagcatagtaagcaatcaataaaactgtttaaaatactattttttggaattctaccagaaatgtcaccttttctctgaaggctttctttttttctcatttgtccatatcattttctagctttctcatggcatttattatcttttgtcttctataactataaagacatttgcataaatgtcttttctccactttaaattgtaatttccttggagtatgcactgtatcctttctcatcatttctcacatgctgctttgccaattcactaagtgaatttgtcacaacaaaattattttttatgcaatttcataaataaaaatgccctaatttaacaagatgtattcttatgatgtaccaggcacatgcttaggctcttaactagagagaggacccattcaatttctgacctgaggaatctcatagtgaatttgagaggccaaagtaggaggattgcttgaggccaggagtttgagaccagcctggccagcatagcaaaatcctgtctcttaaaaaaaaaaaaaaaaaaggaaccttatagtgtaaagggagaaatttaaacagatcaagttaaaaaagtgctgtgaataaattccagacagagtattgtgaggggatggatatttaggattttgataacttttattagattatttccttgattttatttaaataaaggccttttatagcctcagcctccaatgatagagtaagcagggtagtctgataaaatattgaaatattttctgtggccaggtgcagtggctcacacctgtaatcccagcattttgggaggctgaggcgggcggatcacttgaggtcaagagttcaagaccagcctgggtacatggtgaaactccctctctactaaaaataaaaaaactagctgggctgaggcaggagaatcgcttgaacccaggaggtggaggttgcagtgagccaagattgtgccactgcactccagcctgggtgacagtgagactcagtctcaaaaaaaattttttttctttttttttaatagagtctcactctgtcactcaggctggagtacagtggtacatagctcactgccaccttgaacccctgggctcaagcagtcctcctgcctcagcctcctgagtagctgggactacaggtccgtgccactgcgcttggctaaattttttttttttttttttcagacagagtcttgctctgtcgcccaggctggagtgcagtggtgtgatctcggctgactgcaacctacgcctcctaggttcaagcgattctcatgcctcagcctcctgagtagctgggattacaggcgcctgccaccacgcccggctaatttttgtatttttagtggagacagggtttcaccatgttggtcaggctagtctcgaactcctgacctcgtgatgtgctcgcctcagcctcccaaagtgctgggattacaggtatgagccaccacgcccagcttaaaaaatttgtggagatggggtcttgccatcttgcccaggctggtctcttaactcctgggctcaagcgatcctaccacctcagcctcccaaagtgttgggattacaggcatgagctaccacacctggcctaaaatatttttcagtgtagataattttaagatcttatttcttaaacacacacacacacacacacacacacacacacacacagattatacatattactgtctttggattttagaatatatgttactttatagttaaaaaataatgtccacttaaaataatatatgtaaggagcaatggggctcctgttagttttgtaagagactgcaaaatatctcagattccctaattaaattatgttggctccattggacatgtgttcatgaagatttgacgagtatggttattttgttataggcttatggagaaacgaagagaaagaatacataacttcctgagtgaactgttgaaagagaaacttgacaatgaagatatgattattgctagagatattgcagaagctgaggctgaatgggaaaaaagagaaagagaaaaagatgaaaaaaacaaagcagaattaaaaacaattgcagaatatcgagccattgtggtaaac

SEQ ID NO: 24852 - DNA, 2300 bp, Homo sapien
tcagcctgcctggtagctgggactacaggcatgtgctgccatacctgtctaatttttgtggtcttttttgtagagatggttctggtatgttgcccaggctgttctccttttaaggaattttccaagaagtcccacttaacagttttccctgaatctcattggtcataattttgttacacctggctgaaaagaaagctgcacatgtagtctttcagctgagcatatttctaccctgaataaaatctgggtcctgctgctaacgaagcttaggcaactaattgtttctgccgttttctttttgttctactgagtttcaactttgtattctaagtcttctattaatttttttattttagctatgaaaattttaattcctaagacttttacttgaaatgttgttattgttttcattaaaatctgattattggttaaggggtggaataatttttatgtctccaagtaggcttggagtaggacagacctagtttttaatgctaactctgccatttactggctatatgaccttgagcttaagctttcaatattgaaaaatgagaattaactctgtgttaatcaaatctgtattttttgtattataaaaagtctttgtgaatattagaataaacttggagaaaacagcaaaataaaacatgtaaggaattatccaaaacacttttaacagtttgctgtttgctttagtttttcatattgatcatattgaccaatatatttcctatccagattacaggcttttaaaattaacccataaaataggagattagttaagagtgctgggcacatagtagaccctgagttataaatatattggaagattaagtgatgcccctaacaacttttaccttgaattggtttctacttacataataacagaatatgccaggcacggtggctcgtgcctgtagccccagctactctggtggctgaggtgggagtttcccttgagccccagagttcaaggctttcatgagctgtgatcatgccactgcaccctgggcaacagacaccctgtctaaataacagaatatactaatatatctatatattcaggctattgtgctcaatggcatctgtttttatgatggctaactcaggctgagatcatagaacatatgctaatatgaacagattttactttttgttttaaatactagtgacctacttttacaatttttgttagaatacatatctgttttttcttatatgtatgcaaaagcaaagtttggacaagaaactagcaatagtgatttgagtctggagggaggattaggaagagacatagtggatggagtggaaggacgctcgctacactgtgtatgtaaaaaaacatttttggtttttgaaccatatgactattcaaacattaaatgaactttatattatatatatatatttggtgtattttttcttatacaattattttaaattgtatactttaaagacatgagatacttgaagagaaatacagaaaagcattaagaagatataaaagttacctattatctcataccccagggataactactgttaacatttgacacatttcttccagtcatttatacattataaagttgtacttacatgtatttgtgaaattggaatatactatgtaatgttacatattctgctttcccccacctacttattgattatattatttgaatcacatctcatgtaattgagagtatgatttatttaactatattctcaatgattattctctatgattgaatatttagaggttgtttccatttttttgctattataaataactttgagataaattacatgacacataaacctttatgcacttctctgatcatctctttgggataaaatttccaggagagaaataactgggtcagaagctgtgaccatttgacaggttcttgttagctactgatatgttgaaagatatttttctttgtgataagttaatatatacaatttttcccccaaggaacatatgcaggataaacatattatcaaagctgtagaacagcagcagcaagaggaagaagatgaaaagatgagaaaattcatcaaagcaaaaaagcgtcttatacaaatggggaaagaaaaagaggctgaaacacacaggtaggctttaataatgtgtataataaagtactatctgaaattattatgattttatgattattatgacagtagtctttaggaacagagatcttattttatatatgactagagcattcagtgacttgatttcagtttgggacgtgggtgtgaggacatcatcttgtagatggtcagaaatgctg

SEQ ID NO: 24853 - DNA, 2300 bp, Homo sapien
catgatggaaggcattacatggcaaaagggcaaagagagggcaacaggcgcacgcacacacacacacacacacacacacacacacacacaccacacagagacagagagagagagagagaaagaagagggccaactttcccacttttataatgaacccattccccagataatggcattaatccctttactctgccctcatggcctatcacctctcattagtccctaccttccaacatttttacattggggattaagttcccacacatgcctctgatagctgtgatatttaaaattgccactgaacatttgacaaacatacttggtgagtttgaagtcagactaaataacaataagcctcatgagtgagattttccaaggaactatcaaacatgtcgaataataacagttgtctggctttggagtgggtcaaattctgttttgtcccctctaccagttgctaagtcactatttttcactgtgattactgtggttatctaggctgacacggggctgggagaaaagtataggactatggcaagttaaaatgccaaaaaccttgctgttgttacaaaaatccagctgtttttctttagtaaacactctacaaattgttgcaagcctttggttaatttccagagttctgaaaaagtcgatattgatgatttttgccactgttcttgttgattttatggaggagaggatttcaggcatagatcctatttcaccattctggctgatgtcatcccactaaatctttataaattatttattttactaatagctgcacacatctctgaacctctctccaacttagccttcccctaaaaatggagattaaaatttagcagtgaggctcaggtggaagcttttgagctagttgccacaaaacattatttaacaactattaggtaaatctaaaccaggtagtgcagaaatgcatatgcaggaaagtgaatgtgtgggactaattgtgcttttccaaaactggccatgttggtactgtttctttccttttacatggcaaaagtccgctgctaacctcataaaacctccactgcataaatatccactagtgaagaatgactggctgtcactctgcatctggtgcagggggcactattgctacagaagctcgggcaatgacatgaagatacttcaaattgccaaagttctagttgtcaccatgacaacattaattgctaatttacagacgtaagaaactgttgtagctagaattgatagagttctttagaagtctatttctattccaaaatcaaattgttataacaggtcacctgaattacagtactttatgtcacacgatttttttttaactctctaaaagcatttgacttagagagagaccttatatttactttagagaggaggaaatggagatatttccttcagagacttttagtaaagaccaatcagcaggtttgcagaagagccaagcctctaaagaggtgacttatatttccaagagatattccaattcaatcagtgaataacaaactttaagcgtgcgggaaatttaacaaaacccagactctcagagctgcaactgcgcagttttaggtcagctggggctgggggtgggggtctctgatttcctatcttttctccacccctatttctgtaaacattctcccacccacttccactccccgtttccctccttcacccattcacctgagggcaagacggcctaacttcacacagagcccaaagatgcttattgaggatgctttcgacctggtggagtccatttcaaaaggcaactgaagccctcattcggcatcctcgcctctcactccatgccgggggtccagaaacaatccctgtccctggataggtcagtttagctcacctgtactttccttcgcccgtccacagcgccgtccaaaccgtaccagcatctctgacgaggtgtccatgatgctcctagatctggaaaagtgactgtggcgccaagcgccgcggacgccagccggtggagttgttactcgtaccacgcggttgcttggcaacgccgccggaagtgacgccagccgtagccgaggaacaagggaggtgctgcagttggcggtcgggctagagaagagaggcgcctgcgcttgcgagctgggcttgtgagtggggctgccgagagggcaggcgtggggcgaggccaaaggactgaacccgcaggagcgtcacgggcgccggggcggctgccgacggcgggactgggtcagtgagaagcccgtgggcccccgccctgcctgctactcccatccccacctgcgcgctccccatgg

SEQ ID NO: 24854 - DNA, 2300 bp, Homo sapien
ccattctggctgatgtcatcccactaaatctttataaattatttattttactaatagctgcacacatctctgaacctctctccaacttagccttcccctaaaaatggagattaaaatttagcagtgaggctcaggtggaagcttttgagctagttgccacaaaacattatttaacaactattaggtaaatctaaaccaggtagtgcagaaatgcatatgcaggaaagtgaatgtgtgggactaattgtgcttttccaaaactggccatgttggtactgtttctttccttttacatggcaaaagtccgctgctaacctcataaaacctccactgcataaatatccactagtgaagaatgactggctgtcactctgcatctggtgcagggggcactattgctacagaagctcgggcaatgacatgaagatacttcaaattgccaaagttctagttgtcaccatgacaacattaattgctaatttacagacgtaagaaactgttgtagctagaattgatagagttctttagaagtctatttctattccaaaatcaaattgttataacaggtcacctgaattacagtactttatgtcacacgatttttttttaactctctaaaagcatttgacttagagagagaccttatatttactttagagaggaggaaatggagatatttccttcagagacttttagtaaagaccaatcagcaggtttgcagaagagccaagcctctaaagaggtgacttatatttccaagagatattccaattcaatcagtgaataacaaactttaagcgtgcgggaaatttaacaaaacccagactctcagagctgcaactgcgcagttttaggtcagctggggctgggggtgggggtctctgatttcctatcttttctccacccctatttctgtaaacattctcccacccacttccactccccgtttccctccttcacccattcacctgagggcaagacggcctaacttcacacagagcccaaagatgcttattgaggatgctttcgacctggtggagtccatttcaaaaggcaactgaagccctcattcggcatcctcgcctctcactccatgccgggggtccagaaacaatccctgtccctggataggtcagtttagctcacctgtactttccttcgcccgtccacagcgccgtccaaaccgtaccagcatctctgacgaggtgtccatgatgctcctagatctggaaaagtgactgtggcgccaagcgccgcggacgccagccggtggagttgttactcgtaccacgcggttgcttggcaacgccgccggaagtgacgccagccgtagccgaggaacaagggaggtgctgcagttggcggtcgggctagagaagagaggcgcctgcgcttgcgagctgggcttgtgagtggggctgccgagagggcaggcgtggggcgaggccaaaggactgaacccgcaggagcgtcacgggcgccggggcggctgccgacggcgggactgggtcagtgagaagcccgtgggcccccgccctgcctgctactcccatccccacctgcgcgctccccatgggggacgacccccgattgggtccgatgcctaccctcggggtggagccggcaggtgtgtgagcgcgcgaggcctaggcgtggtgtgtgcgtccgcagatctcctcgcgggtggagtgtgaggagcaaagccctcccttaactataaaaacccgcggattcgctgacataaacgctgtttttttaatcctttggtttctgaggcatggtcaggactagatggggccaagttttttaaaaataggaatgttaaaacgtaatgatatgcttagaatatttacgttaggacctttgagatattttaaatttcttggtaaatacatgaccacagaaatctgttaggagtagctgcgcgtttggtttcaaaagatgcttttctaacacattgatgtacagataacttcattactaacaagttggctctgacgtgtacacataatgcaccaaattggagtctctcaaaatgaaagaacaaaaagatttttaataacgaatgttctaacacatagtcgtgctatttttctttaggttttctatcagatgttccacgtaataatgctggtaagtatggaataattaagaaaatatttgaagacagaaattagtttgtgcacatacagcgctggtaggtttttggaactataccttaaaaagtgtcaagaactgggggccaggcgcggtggctcacgcctgtaatcccagcactttgggaggccgaggcgggcgga

SEQ ID NO: 24855 - DNA, 2300 bp, Homo sapien
ttaaataagcaagtcacaaaatagtgtgtacagtataatcctgtttttgttttagaaaatgtttacatgtgcagtgggatggttatggttggttcaaccgtagttcacactttttctacatcaattttgtaataaaatttttttcttctcagaataatttaaactctgtttcagatcagagtgcatatgctaccttattaaattcacaacaaagaaataaaagagtggtgggtataggacaaataactctagattgacttggttgtgacaatccacaggttggagctggaatctcgagtctgaagtcaaattatatctgaccaccatgtcaaattggcaagtaactgacatcaaatcatgagattcaatacttttgtaaccaattttgttaaaattccagaaaattgttgttgggagacaattttccctgcgtctctggtggttctgcatgtcttactgactgccctttcctctagactattgtctcaaggatgtttgtacactggacagccttgagaaacatgcttatttgtccaaatgataaagatctgggttccctaagctcagggctcctttcctgtaattcgacacacactacatctaggtgacttcttgcccactttgcattatcctgtgggaactggggctttagggaactcaggcgaaattgctgatttactggctactgctgggagtaattcattcctgaaatgaatagtcttgtgtcttccatgaaactgccaggctaagttagcctgcaaacagggtaaaaatctctgttccttcccagttcttgaaactttttttttttttgagacggagtctcgctctgtcgcccaggctggagtgcagtggcacgatggtcggctcactgcaagctccgcctcccaggttcacgccattctcctgcctcagcctccagagtacctggaactacaggcgcccgccaccacgcctggctaatttttttgtatttttgctagagacagggtttcaccgtgttagccaggatggtctcgatctcctgacctcgtgatccgcccgcctcggcctcccaaagtgctgggattacaggcgtgagccaccgcgcctggcccccagttcttgacactttttaaggtatagttccaaaaacctaccagcgctgtatgtgcacaaactaatttctgtcttcaaatattttcttaattattccatacttaccagcattattacgtggaacatctgatagaaaacctaaagaaaaatagcacgactatgtgttagaacattcgttattaaaaatctttttgttctttcattttgagagactccaatttggtgcattatgtgtacacgtcagagccaacttgttagtaatgaagttatctgtacatcaatgtgttagaaaagcatcttttgaaaccaaacgcgcagctactcctaacagatttctgtggtcatgtatttaccaagaaatttaaaatatctcaaaggtcctaacgtaaatattctaagcatatcattacgttttaacattcctatttttaaaaaacttggccccatctagtcctgaccatgcctcagaaaccaaaggattaaaaaaacagcgtttatgtcagcgaatccgcgggtttttatagttaagggagggctttgctcctcacactccacccgcgaggagatctgcggacgcacacaccacgcctaggcctcgcgcgctcacacacctgccggctccaccccgagggtaggcatcggacccaatcgggggtcgtcccccatggggagcgcgcaggtggggatgggagtagcaggcagggcgggggcccacgggcttctcactgacccagtcccgccgtcggcagccgccccggcgcccgtgacgctcctgcgggttcagtcctttggcctcgccccacgcctgccctctcggcagccccactcacaagcccagctcgcaagcgcaggcgcctctcttctctagcccgaccgccaactgcagcacctcccttgttcctcggctacggctggcgtcacttccggcggcgttgccaagcaaccgcgtggtacgagtaacaactccaccggctggcgtccgcggcgcttggcgccacagtcacttttccagatctaggagcatcatggacacctcgtcagagatgctggtacggtttggacggcgctgtggacgggcgaaggaaagtacaggtgagctaaactgacctatccagggacagggattgtttctggacccccggcatggagtgagaggcgaggatgccgaatgagggcttcagttgccttttgaaatggactcc

SEQ ID NO: 24856 - DNA, 2300 bp, Homo sapien
atgcagaattaagtgtaaatattctttcattatagtagctaacatttatatatcaagtcctaagtgcttcattattaatttgtctttccaataaccttaggttaggttgagaaagtatccatgttgtctgtgttttacagatctgaagacgaaggatcagagaagtttagtaatttgtgagaggctatatgttggataagtggcagagatgagccttaagcccgaaactaaatctcatatgctttccttttctaactatactgtttaccagatgttgggatgttaaactttcatccttcttccttttgggtccaacacattctcttatttgtccataagaatcacctgctgcccttgattagaatgcagatccctaggtctccaccccgcagacgtctgtgcgtggggtgtggtagttgtgggggctgcataaccagcatcttacataattcaattaagatgatctgacttgtggaattaaactaaaacccacccacaggagaaccaacagatgctatttattcagagtttgctgtagaagggagtcccactcaccatcactttgtcagaggctcaaaggtggggcagacgagtgggaaagctttatagaagtgaagaaaagcccccggtatgctctgattggaagttgttggcatgggaaagctgcaggtgggctactagaagcgggggtattttatgtgatgggtttgcggaacatatttggctttctctggttggtgcagaggtggaactaggggtaaaaatagggaagttgcactttggaagtcccaggcaggaagatcgcttgagtccaggagtttgagaccagcctgggcaacatagtgagaccctgtcatgaaaaaatatttaaaatttttcaaaaattgcacatctgtagtcgtaggtacttgggaggttgaggcagaggatctcttgagaccaggagatcgaggctgcagtgagctaagatcgtgcgactacattccaggctgggcaacatagcaagaccctgtctcaaaaaagaaaaaaaatagggaaattgccagtcgttgactacttcctgactgttctggttcagctgctaccaaggttgtggtctggcttcctgggcttcttatgtggttcagagttctgttgtcacatactatctggccattcatgtatattgcgtttctgagaccatactctgggaaacacatggtcctctggtggtggtgaaggtccctgtgagctagggaccatctgtcaacactcttatcactactagtgtctatccctatcaggcactagaagcacttaataaaatcttgcgaatgaatgaatgaatgatatacaaaaatatttgatactggctttagttggaacaagaaaatgaactttgtgtaccacatagacatctgtgactagagtggccgtcaccagaaaggctgctccttccagctgctatgctctaaatacaataacctgaatcttagcacgactggacttcgcctggacttcgccttggccccggctgcccaaagtttctctcaaagcttcagcttaacccctgatgtgctcaccagcaccaaggcgccctcctgagtgctttgctgggggtgggatggcgtttgtgggaaaggccggctacttctggcatttcaacggcgcctccaatccctgacctttagttgtgccccattctctccactctttcccccttctctgtcctcacgattgagtctgggctggcgaagcctactgagggaggggagtgtacacacatgcacacgcgcgcgcgcgcacacacacacacacacacacacactcatatatggtgttattaataattcaggactcagagtttatctaagagaagacgctcgaccgggtgtgagagagcgcgcgggacagagagcgagccaaggaaggggaaggcggcggcgcgcgctgtctcctggggaagcagtcccacctgctgtggggggcgccgctggggaggggccgagccgtgctcacgcctgcacgccccgccccgctcgccgcacggcccggcgacgggggagttcccgcgagtggcctcgcgcccagaccgtgcggggggctgttcgggtggaggcgggggagccgccgggacaccaaaataggagctgcttgtggggtggagcggcactagctggcggcttccgagcgcctcttccaaagatggtcagaggggccggaggcgtccccgctcccgctcgctactagcccgcgggccagcgccgcgtcccgagccccggcgggaggtaggtgcggtgtggacccgcagcccgaggccg

SEQ ID NO: 24857 - DNA, 2300 bp, Homo sapien
ccctatcaggcactagaagcacttaataaaatcttgcgaatgaatgaatgaatgatatacaaaaatatttgatactggctttagttggaacaagaaaatgaactttgtgtaccacatagacatctgtgactagagtggccgtcaccagaaaggctgctccttccagctgctatgctctaaatacaataacctgaatcttagcacgactggacttcgcctggacttcgccttggccccggctgcccaaagtttctctcaaagcttcagcttaacccctgatgtgctcaccagcaccaaggcgccctcctgagtgctttgctgggggtgggatggcgtttgtgggaaaggccggctacttctggcatttcaacggcgcctccaatccctgacctttagttgtgccccattctctccactctttcccccttctctgtcctcacgattgagtctgggctggcgaagcctactgagggaggggagtgtacacacatgcacacgcgcgcgcgcgcacacacacacacacacacacacactcatatatggtgttattaataattcaggactcagagtttatctaagagaagacgctcgaccgggtgtgagagagcgcgcgggacagagagcgagccaaggaaggggaaggcggcggcgcgcgctgtctcctggggaagcagtcccacctgctgtggggggcgccgctggggaggggccgagccgtgctcacgcctgcacgccccgccccgctcgccgcacggcccggcgacgggggagttcccgcgagtggcctcgcgcccagaccgtgcggggggctgttcgggtggaggcgggggagccgccgggacaccaaaataggagctgcttgtggggtggagcggcactagctggcggcttccgagcgcctcttccaaagatggtcagaggggccggaggcgtccccgctcccgctcgctactagcccgcgggccagcgccgcgtcccgagccccggcgggaggtaggtgcggtgtggacccgcagcccgaggccggcctgctgggagcgagcggggccgggcgcggggagcggggccgggcgcgggcagcggggccgggcgcgggcagcgaggccgcgcgggagaggagcgcagacaatggccgcgcgggcgccgggccgggccgaacgcgttgcgctggggctgcctgcggcgtccttcccacacctgcgcggagcgccgggcagagggacgcgggcaccgggcccgcgggcggcacgcggcgccctcgagtccagccccgctcctggccccggggcggggcggtctccgggcgggaacgtgggccggggcccaggcgcggggcgcgcggaaacccctgcggcgggcgcgggggagggggcgagggctgcaagggctgcgccgagctgccttcctttctctccttccttaagcgaaagggctcgggatttcccttttccgagacctcttcttgtccatttatatttccatcatccctttcttggcatttcgatgtgatttgaaagggagacgagcttggggaaaaggttgaattggggccgagccgagacagctgaggtccggcctcgagtggggtgaccctcggacacttgccttgcctagtgtgggatctcatctccgaacgccaggccagggtagattgcggtgaatggaatagcaaatcagtactctcaaaaggactactgaaaaatccaggagcctcatttcaagctccgagctaccctgaatttaaattgaccaccatataaatgatcaaacagtccatccacattttgcatttattatttagatgctgaacttagtccagttttggagtatatccgatgatagtcaagttatttagcgttgattatttgagagaatgtgcaacattgaaaacacatttgttatttcatatttattgcagccatggctctaaaaggacaagaagattatatttatcttttcaaggattcaacacatccagtggattttctggatgcattcagaacattttacttggatggattatttactgatattactcttcagtgtccttcaggcataattttccattgtcaccgagccgttttagctgcttgcagcaattattttaaggcaatgttcacagctgacatgaaagaaaaatttaaaaataaaataaaactctctggcatccaccatgatattctggaaggccttgtaaattatgcatacacttcccaaattgaaataactaaaagaaatgttcaaagcctgcttgaggcagcggatctgctacagttcctttcagtaaagaaggcttgtga

SEQ ID NO: 24858 - DNA, 2300 bp, Homo sapien
gcaaggccctgaacaaaggaggacatcaaatggcaaatgtgcatctgaaaaggtgcttaacattgtaaatcaaggaaatgcaaattaaaggcgcaatgagataccaccacaccaccatgtggccaaaatttaagagaatgacagaccggctgccccgcctctggcaggggtccctggtgcgggcggggaatgtccccgacggagcttgatgagaggcgcacgctgctggcagggcaccgctgtgtgagctgggactggctcgcagccctccgagatggcccagcagtcggacaaggccgtgaagtgctgcgccctggaggagattcaaagcacaatcatagcaaaagcacctgggtgtacgatttgaccaaattcctggcagagcatcctggtgggaaagaagtcttaagggaataagctggagagatgctactgaaaactttgaggatgtcgggcactctacagatgccagagaattctccaaatcataaatcattggggtttcatctggatgacagataaagttaactaagccttcagaattttttttttttttttgagacggagtctcactctgttgcccaggcgggagtgcaatggcacgatctcagctcaccgcgacctccgcctcccaggttcaagcgattcccctgcctcagcctctcgagtagctgggattacaggtgcgcaccaccatgcctggctaatttttgtattttttagtagagactgggtttcaccatgttggtcaggctggtctcgaactcctgacctcgtgatccgcccaccttggcctcccaaagtgctaggattacaagcgtgagctactgcgcccagcctttttttttttttttttttccttcaagagatggtttagctctatgttgtccaggctggtttccaactcctgagctcaagggatccccctgagtggttgggactactggcatgcaccactggaaacccttattactactgttgactttaattccagttagtggactagttgagtgatcccagccatctcagcactggccaaagccttcctgtgttacctctacatgtaggcaggagactaaatagcttttcagaagccaatgaaagaaaagactgcttcggattagggagaaagaagccagtgttaattaactatttcaactgtcagcagccttcatctgaaagaataatttttaatgtgtctctctttcctcctacactagaaacaggagtaattgttcgattctttctaaaacttttctttcttttcttttctttttttttttttttagacggagtctcgctctcgcccaggctggagtgcagtggcgcgatctcgggtcactgcaagctccgcctcccaggttcacgccattctcctgcctcagcctcccgagtagctgggactacaggcgcccactaccatgcctggctagtttttttgtatttttagtagagactgggtttcaccgtgttagccaggatgatctgaatctcctgacctcgtgatccgcccgcctcggcctcccaaagtgctgggattacaggcgtgagccaccgcgcccggcctttctaaaacttttcaagtgtgcatttttattcaccaactttattttgtgtcttcactacgtagtttacttattgtaagcatgtacttattgtaagcatgtacttattttgtctcttcgctacgtagtttacttattgtaagcatgagcttttaatattaatattatatgtggcttagagtggaataatggacactggagattacaaaaggtgggagggtgagagcaggggtgaggactgaaaaattacctattgggtacaatgttcactatttaggtgatggatgcactaaaagcccaggcttcaccgctacgtaatatgtacatgttgcactggtactccctaaatatataaaaataaaaattaaaataaaaaaataatatctggctttaaaacatgacagtgcattgtccagaatgtttagcaactacattgctggtgtgagtgaaaaatgatatgaccactttggaaagctgtttagcaatatatattagagctaaacacacgcctgccctgtgacccataatttcattcttaggcatacacctaacagaaatgagtgcagaagacatggagaagaacgttcagaatagctttattcataacagcaaaaaactagaaacaacaaaatggtcagaaacagaagaatgggccagacgtcgtggctcactcctgtaatcccagcactttgggaggccaaggtggatggatcccttgaggtcagaagtttgaaa

SEQ ID NO: 24859 - DNA, 2300 bp, Homo sapien
ggaggctgaggcgggtggatcacctgaggccaggagttcgagaccaacctggccaacatggcgaagcgctgactctactaaaaataaaaaaattagccaggcatggtggcgggcgcctgtaatcccagctactcaggaggctgaggcaggagaatcacttgaacctgggaggcagaggttgcagtgagccgaggtggtgccactgcgctccagcctgggcgacagagggagactgtctaaaaaaaaagaagaagaaagaaaaagataaaaaagaaaagacaagaaagggagagcaaaggaccagggacctgatgagaacatgaaataaatgttttttttgccggtgtgacttctgataataggctgtactgcagttctgcccagatgttgtgggacatgaagaagcagttatatttgtttaggtggctctgtctctaggcagattctgactcttctttctattcccagtgttaagcctccataccaggacattaacaggcatgtaataaacagttagctgaatggatgaatgagagtaccctgacactgatattatttgttctgttaaatacatatattctcactgacttgatcaaaacaagaattaaggtttcaattgtgtctggcataaaatagagagtagataaatattctttgagtggataaaagataatctaattaatttgaatttaaactacctgagcacaaccctgttaaatatgttttttctcattggccttaagaaaagaaaaaagagcccagagcagtttgaactatgtgaggtatgcggaatttatcaggcacagagagatatgagtttgggacttcagtcatgtccctacacccctgtattagttagttctcatactgcaataaagacatacccaagactcggtaattcataaagaaaagaggtttaattgactcatagttccgcatgtctggggagacctcaggaaatttacaatcatggtggaaggggaagaggcatgtcttacacagtggcaggtgagagggagcgagcaagagcagggaaaactgccctataaaaccaccaggagaacagcatgggggaaaccatccccatgatccagtcacctcccaccctgtgtgtggttcctcccctccacacttggggattatggggattacaattcgagatgagatttgtgtggggacacagaaccaaactatatcagtcgccatgcttggggggcaattgtttcaagtcactttgtcccttactacctgcttcatccattttcatgttcttcgaatttgtgatacaaagaagaatgtatagccaatcaatagcttgttattgtaatgtaagttatcggtaaacaatttaggaactgcctcttcttttttctttaaaagctacttgtaagtgctgctaatcagagcatatattcagggcaatttgaatccatgctctcatgtggcagtcctcaaacttggctcaaataaactgtctacttatattaattttgcctcagtttttccctttaggttgacaatattgcatcaagttgaatactcacagcaattgtatgaactaggtagtatttattaccggccctatttatacctgaggaacagagaagttgaacaacttgtccaagatcacagtttcacagcaggaggaccattatttgaagcaggcagtctgattccagacacccagtttttacacgctgtactgtattgttttcaaaactctaagatttcatggatctttgattttttttttaaatttcacttgtcctttttttttttttgagaactactacaacacgatgtgtgtgtgtattcacacacatttttggaaaatatctgaaaaaaaacccaaagcacttcacatgaatggagggccaaaggaagggctggggtacagacgccgtccagaaatacttaaaaataaatgtttatactaacacaaactagcagccattcccctacaacctggagtactttttaacccaatctgtttgggattgagggcgggactccagggtccctgggaggccccggcagccgcgcatgctcagagcacagggaccgctccacctcgtccgtggccctgcccacccaggccgcaagagctgccgggacggtccccatcttcttggagcgctttaggctggccggcggcgctgggaggtggagtcgttgctgttgctgtttgtgagcctgtggcgcggcttctgtgggccggaaccttaaaggtgagtaactctcggtggctaatgagaagctacaaaagggtccgctttgctggtgcgcgactgcgcgtttcc

SEQ ID NO: 24860 - DNA, 2300 bp, Homo sapien
gtctctaggcagattctgactcttctttctattcccagtgttaagcctccataccaggacattaacaggcatgtaataaacagttagctgaatggatgaatgagagtaccctgacactgatattatttgttctgttaaatacatatattctcactgacttgatcaaaacaagaattaaggtttcaattgtgtctggcataaaatagagagtagataaatattctttgagtggataaaagataatctaattaatttgaatttaaactacctgagcacaaccctgttaaatatgttttttctcattggccttaagaaaagaaaaaagagcccagagcagtttgaactatgtgaggtatgcggaatttatcaggcacagagagatatgagtttgggacttcagtcatgtccctacacccctgtattagttagttctcatactgcaataaagacatacccaagactcggtaattcataaagaaaagaggtttaattgactcatagttccgcatgtctggggagacctcaggaaatttacaatcatggtggaaggggaagaggcatgtcttacacagtggcaggtgagagggagcgagcaagagcagggaaaactgccctataaaaccaccaggagaacagcatgggggaaaccatccccatgatccagtcacctcccaccctgtgtgtggttcctcccctccacacttggggattatggggattacaattcgagatgagatttgtgtggggacacagaaccaaactatatcagtcgccatgcttggggggcaattgtttcaagtcactttgtcccttactacctgcttcatccattttcatgttcttcgaatttgtgatacaaagaagaatgtatagccaatcaatagcttgttattgtaatgtaagttatcggtaaacaatttaggaactgcctcttcttttttctttaaaagctacttgtaagtgctgctaatcagagcatatattcagggcaatttgaatccatgctctcatgtggcagtcctcaaacttggctcaaataaactgtctacttatattaattttgcctcagtttttccctttaggttgacaatattgcatcaagttgaatactcacagcaattgtatgaactaggtagtatttattaccggccctatttatacctgaggaacagagaagttgaacaacttgtccaagatcacagtttcacagcaggaggaccattatttgaagcaggcagtctgattccagacacccagtttttacacgctgtactgtattgttttcaaaactctaagatttcatggatctttgattttttttttaaatttcacttgtcctttttttttttttgagaactactacaacacgatgtgtgtgtgtattcacacacatttttggaaaatatctgaaaaaaaacccaaagcacttcacatgaatggagggccaaaggaagggctggggtacagacgccgtccagaaatacttaaaaataaatgtttatactaacacaaactagcagccattcccctacaacctggagtactttttaacccaatctgtttgggattgagggcgggactccagggtccctgggaggccccggcagccgcgcatgctcagagcacagggaccgctccacctcgtccgtggccctgcccacccaggccgcaagagctgccgggacggtccccatcttcttggagcgctttaggctggccggcggcgctgggaggtggagtcgttgctgttgctgtttgtgagcctgtggcgcggcttctgtgggccggaaccttaaaggtgagtaactctcggtggctaatgagaagctacaaaagggtccgctttgctggtgcgcgactgcgcgtttccgttctttactgcttctcgcggcgtccgtccgcccctcgccttcctcacgttcaggccgagcgccgcgtgggccgcagccggaggcggcggagccgagggggcgcgggcggcggcgaggctgcccccgcgaggaatgcgggatcctggggttccccgcacgtggctggtgcccaggcagttccgcggttgcttagagacgggactgtggctgccctcatccccattgcgtcttttttttttttttttttttttacctccaccgccttctagtctcaccgaaggcttgtggccatctctgtaaagtttctggggaggtgggcacggggtaaacgccggagggttctgtggagcctatgggactgactggaggccaaagaactttgggccgcagatgtacaccagcgtcactcttttggtctgttagggcctt

SEQ ID NO: 24861 - DNA, 2300 bp, Homo sapien
aatcccagcactttgggaggccgaggcaggcggattacttgaggtgaggagtttgagatcagcctggctgacatggtgaaaccctgtctctactaaaaatacaaaaattagccgggcatggtggcgcacgcctgtaatcccagctactccggaggctgaggcaggagaatcacttgaacccaggaggcgggggttgtagtgagccgagatcgcgccactgcactccagcctgggtgacaaagcgagactccgtctctaaaaacaacaacaacaacaacaacaacaaagaagaacaggagtgtttccaatccataaccttgtgtttgaaatgaatgaaacataattaaaacaggttattcctggtcttctacatgagttaagtatgtcacgatcatcatataacagtgataagttaaatttgctcaataattttacgaatcactaaattataaactaaataaaactttatgtattaactttacatgctaaaactttgtatgttttaactcatttgattctcataacagataactttgaattctgctattcctagaagtagcagcctcagacacttctctacttcgtcatcgtccattcactctttttcttcttcctataataatgcaaagaggtgtccatccacaggcttaaacgcaatcctgcaatccttttacttaaccactggatcctgccttctcaggatcccaactccatccaatatcctcttgcatttttaacccctctctttctattagctcaattcttgtcagaatttgtctcctcctgtcttaaaaataattgaaaaaataataaagcttcccccattactaagcatccaaccattcttttcgtaggccacctttctctttctctttcttttcttctttcttttttttttttttttttttgagacagggtctcactgtcgaccagactggagtgcagtggcgcaatttcagatcactggaagctttgcctcccgggctcaagcgattttcccaccccagccacccgagcagctgggaccacaggctcgcgtcatcagacccagctaatttttgtatttttagtagagacagggtctccttatgttgcccaggctggtctcaaactcccgtctcaagcaatccgcccatctcggcctcccaaaatgttgggatcacaggggtgagccaccgcttccggggccacgtttaattgttcacatttactctttcttcttcctaaatttccattcgctccacaatctgctacaacttaatttctgctcctactttatgaagcccgacctctttccagtatttgacaccactacctattcttttattttcatttccactgtctttttttttttgagacggagtctcgctctgtctcccaggctggagtgcagtagcttgatctcggctcactacaagctccgccttccgggttcacgccattctcctgcctcagcctcccgagtaactgggactacaggcgcccgccaccaagcccggctaatttttttgtaattttagtagggacagggtttcaccgtgttagccaggatggtctcaatctcctgacctcgtgatccacccacctcggcctcccaaagtgctgggattacaggcgtgagccgccgcgccctgcctctccactatctcttctttgggtttctttgacatcaccactcctgtgagaattgcaagtgacacaaatgacctaaaaattgggaaacaaagttacaataaaataaggcatgagaatggagaaggaggtaaaggtgaatggagatcgctactttttgagccgagacttgggaaacaagaagagtcactctgggccatacaacaaagtgactgtgactttctctcccgcatccctttcactctgtctttccccatcctttgagggcccgcaggtactcatggcaaactagagggtaatgagcacgcgacaggcggcgaggactggcggtgggtcagcaagtagcgcaggctttgcaggcggaggggatggggcaatgaggcccccaggtggccagcggaaccccggctcaagataaacgctgcagctcggcgccgggccgctgggcggcgaacgcgtgcgcgcgtgcggcctggcgcttccggcaccggccgaggtgcgggtcgcctccagaggtgcgtggtcgtggcgcgagggatcctgaggctgctccagcagtgcgccgccgccgtctcctggggcggcttgggttagccgggaggtgggtcagaggctcgccccgtgccctgcgtccgggcgtctccttagggcgcgtcttcgggtccggc

SEQ ID NO: 24862 - DNA, 2300 bp, Homo sapien
attgagaaataaagcattttgttttcttttaaaggtttgtgcttctagacttgacccagattattttatttcatccgtctttgaaaggtaggcataattttattaagacaggtattaggaagtgtccagttaattttgttttaatttataaaaatatgtttcaaatatttcttcttgtagatttaaggtagtggatttgttgacaatggcatcacaacatcaaaatacagtacttgatgcagagcatgagaggtcgatgttagaaggcgctcttacatttcttgtgattcttttgagtcttcgtttacatttaggtaaaactcactgatactaatacttatgcattaactgttttcctccctttctccccctccctgtggtagtaactggcttagggaaaaaaggaaaggatgtagataaatgtaaacaatgtttcaaactcttgatatgttgtactgtaggtataccttttagaatatcctttgcttaagggaactgcaaacagcagttaaactgcagttatgtttggagcatagcttctttactctttaatttgaagcatcttatatttggtaaaacagcttagtaaaaagtgtggtaagtttttttctttataatttatgtatactcagatttgttaattccgtttttaataattttaggaatgtctgatgatgagattctcagggccgagatggtagcccagctgtgtatgaatgacaggacacacagttcattgctggacctcatatccttttaaaattttactttctgttagttgcaggatctaaaataagtattttttatgattaatagtttatcaattttttgattaattttttttcaaagttgaaaaataatatagaaaaagaagaacaccagttgtgtgctcaagtatgtattcaagcctggtgactgtttttttttttttttaacctcctgttattacctcttggggaactcttcttagactttagggtagatttcaggactgaatgatggctttggccaccccagcatttaacctcctagtggacagcattactgaacgttttataaaaggcagctaggtccattttgtctgtgtagccaggatgcaattcatggttaacagttaaaggtataccttacgattattattaccaggattttaaacattttgagggtttttctgtagaatttggtcttaaaggatttttgaatttatagatttttgtgtacaaacagggaacctgtggttctttgtataggactgaacatacaatgagaatctgattatctttttaagttaatgttaataaaattttacacaaagattatcaagtaattttgtgataaaaattctggccgaatttagtatttgtatatcttatgactatgtttggaagaattggctaaactttttattttgtgaaataagtcctattagaatgcctgtttgacaaccttgatttttgtaagcagcctcaatttgatactgtctgatgatttccttcagtcattatgaactatgtgtcagtgctattatagagtaaaaacgatctctgtgtctttcaattttaaagatttatgtgctttaatgtgaggagagaatctttttggtttgcctctttgcttatatttgcttagtatttttttctttggggatgaaattttgtgtttttggaaaaacaatctttgctcataaaaatcttggctaatttttcacaagttctttctgttttttaaggaaaagttatttacaaaatggtaaaaatgaagacacatttttaaaagtttttctatcgttttctgaaatttgataaatttatttcggggaaaatatacctgggaactactgcagcatacaatttattagtaggctcctagattaaacatattttcaaaaatcacaattaaaaacagttattattgatctgttgtattatatagccctcttgtggccagctttgtatattacaaccaattactatttgtctacttcagcaaaatgagaaactagagtaccttggaaaggctataaatctggctttttgttactaatatttttttcttgacatatatatcatattccagaaaatcctaatcccaaaagtggcattattccaggcagttacagctttgaatcagttttatcagctgtagctgattttaaggctcctgtttttgaacctggaggttctatgcaacaaggcatgtatactcccaaaggtatgtttatatacataaatggactctttcaaatatcagttcttgaatggtgaattcttctgtgtattaaaagaaaatgtttacctttt

SEQ ID NO: 24863 - DNA, 2300 bp, Homo sapien
accaacaaaagctggcttactcctgttaaagtgggtgtgggtagtgaacctagcttcttctctgtcctgctatctacttgctcctaaagtggcccctgttatacatctgtggtaattcagctccatggaacactgtttgaagcccactggactaattaatcactgaagttttcttccattgctaaggttgtgcaattctgataaaagctttggcatgttaattatgcaaaataatagactttaaagagaaggacgatcaaggccgggcgcagtggctcacgcctgtaatcccagcactttgggaggccaaggtgggtggatcacgaggtcaggagattgagaccatcctggctaacatggtgaaaccctgtctctactaaaaatacaaaaaattagccgggcttggtggcgggcacctgtagtcccagcaactcaggaggctgaggcaggagaatggcgtgaacctgggaggcggagcttgcagtgagccgagatcgcgccactgtactccagcctgggtgacagagcgagaatctgtcttaaaaaaaaaaaaaaaaaaaaaaaggacgataaatgattctagaaatactaataaagatctttgtgaaggactgtcttcagaattttaagtcatacttctgatactttaagatgaatagcttgttacatgaaactagggacagtggttaacaatggttaacagtgtcttgtgctagaaggttgtaattatagtggatggttagggagaagcttaagcttcttaccatgttttcaaatgttaagaattttgctagagagaatgagagaaaaaaatctattaaggagatactcttaaggcggtggtttctaaaattattatctcagtttatcctttagatttttgccacatctaaatagcctctctactgaaatatacttagtatttcactattttttaaaatgagttaacttaaaaaaaaccttgcctcttcctaagcgtgattattagtgaggtgtcatgaattttatttgcaagttacaattttctaatatacattatacacattaaaaataattacataattattaaaatgaaaagctttatatacttaatacttaaaatcatcttgtgaaccatcagttgtacacattccacacacaagatagtggttcctaattatgcagaaggtaagaagacaaattatcagttttagcaaaggagcagaaaatcttttataaacaaaaaagacttataaagtgggtctcttcaaaatcaatagctcattaatttttttttttttttcttggagactgagtctcactctgttgcccaggctggtgtgcagtggcgtgatcttggctcactgcaaccttcgcctcctgggttcaagtgtttctcctgcctcagccacccgagtagctgggattacaggtgtgcgccaccacgcctggttaatttttgtatttttagtagagacggggtttcaccatgatggccaggcttgtctcaaactactgacctcaagtgatctgcccacctcagctgcccaaagtgctgggattacaggcatgagccaccgtgtccagcctcattaatctttaaatctagttttcatgtttttacttttaagtactttttttgtttaatactttttttgggaaatgaggtctgtctttgttgcctgggctggtctcaaactcctgggttcaggtgagcctcctgcctaagcctcccaagtagttgggactagaggtgtaaggcatcatgccctgcttaactttaaatactctcagagatcctaacctgctgtgtttctttctaattggcaccttacaaacaacaacaacaacaatgaagtaaacttttctggtgaggcattgttgtattacaaaacttttgttctttagtgcttgctgaactcaagagaacattcctgatgatgaaattgtgatttttgacttagaaaagtaatcatggcatcaagcttcttaaggcaaatactataatcagattaaattgttctgtgttttaaatgtaaaatatacttaacaaatgtaataagtcaataaatattgattttatttctgagaagtcaatgtttctactttcttttgaataatagctgaagtctgggatcaagagtttgaccccgtcatggtcattcttcgaacagtttaccgtagagatgtgcagtctgcaatggacagatatactgcattgtaagtccatcaaattgattagcatcataacagtattttatatttatatggaaaaatttcagtgataacacagatatgatatgctctcattaaagtatact

SEQ ID NO: 24864 - DNA, 2300 bp, Homo sapien
tctgataacttgggttctttacaagtaagtgtaaatgtaagaaagaaaataagaaaaagctttatgttatgtatgttatgttgggatatactgttcctataatatccaaaagaaaaaaaaatgtggttgtagataactttaaattgtcttttatttcctctgatatatctatgtaacttctaccttaccagtctttttcccttaatctgccagagttcacgacggcctaaagttcttcaaagagaggtagatgtgtatgatattttcattaactagcaacatggctttaactggaaatggggaaaaaccgctttgaagtatttgtgtgtgtatgggtgtttaattaatatggttaaatttaaaagaaggtttcttggatttatgtgtgttttttttttttgacaaagtgatttaagcttaatattaaagaaaatttatattattgagcttaaaaataatactgagtataatagtgtatttttcttattagtgttcgaagtattttggaccaattataggtagcatatttgagtctctttacattcatcattgccactgtattactaacatcttaaaaatgacttggatattttctaaattaaaataaatttaattgctagcagcatgctcatttgcaaataactttttttttgcttctatggcaattaactttgataaaataagcctataaagtcttaaattctgtatattatggctttggactcattttgaaaatcagcgctctcattgcatgtaagttaacttttaaaaagcagtaatgaaaaatcttgaaatgacattgtaagtaagtaaacttaagcagttttagtctccacaacctagattttcgtgagtagagaacattgaatcagacatttcttctagtagagtctatttgtaggagctttcttggtctttgacaacgtgttttcactgtaagcaaaaactggaaactctgtaagaggcttttgcctctaatgctggtagagagtactttaaaaaacagcttggatgttaaaaaatagtgtatactgtcatttaactcacaaaagctcaactgatattacagcatcctttctatgctcgcttttaaaaaataaattcattaaactgactcatatcttaattaaaagatgttttctgagagccctggtgcagtttgattgctttagcaaaaaagctttttaggagatgaattattgaggaaaatacttagtttaaaaaaaaaactgttcaaaaaacaaatcatagtccttgacccacaaaccaaaaacaaatcaaaaacaaatcacaaatcacagttttaatttcatattaaaatttaataaaacaaattaaatttcatattaaaatatgaaagtttgatttttcatccttatatttcaatttagtaactttaagcatttatgttagaattttcaaactttaaagttccttaaaagtgaaattaattactagttcagatttattagcttagaaaatttttttaaaaactaatttataattttcttaactggaaactttagcagtcttccagaagttagtaaggagtatcctattcttcatgaatgttgaccagaacagcttttcctcttttaaagtaatgaataatttagtttatgattctctttaatatggctgtagatactacttaagctttgtctgttttcagaaggttgaaaaggagatgttactgctgatgatctcctccttattactgtttctagattgagtgggattaaatatatttgagagagaggtcaagggagaaatttatttaaagagcaaatctattgaataaatctttgtatgaaactgagcattccctttagaaaatatagtactaatatgtttttaaaatgatgctaaataacttctcttgatttttctttgtttctctttgttaatggtagaattctggtacagctcaagttttcagtttagtagcagaacgtagaaagaaatttcaggaaatcatcaatcgcagtagcagtgaagcaaatcaggtggttcgtcccaaaacttcaagtaaatggtctgctcctggttcagctccacagttaactacagccattttggaaattaaagaaagcatattgtctttgctaattaaacttcaccacaaactctcaggaaaacaaaactcctactatcctccttggcttgatgacatagaaattttaatccaaccagaaattcctaaatacagtcatggagatggtataactgccgtggaaagaattttactaaaagctgcatcgcaaagtagaatgaacaaacgcatcattgaagagatatgt

SEQ ID NO: 24865 - DNA, 2300 bp, Homo sapien
caggcctcctgttgtttttctgatttgtaacagtagaagcctgctcaccagctgtatttgatttatgcagcttcacatctttaaattggctgggaagtcattttgtactatgtaatacacagtactttcaactttagatactcgtgaagagtcttcatttaatatcggaactttgtttactgtcatttaaagatcattggtcatcttacattataaaaataaaatttaaagattgattcagttttttaagcatgtaagtacatgcttgtttgatggctctcaaatctttcatcatatgttgccagtcctgttagatcttgtgccttcatattgctctggcccacccatctatttactacagattgtagagaatgaattaaagtttgggcccaaatgctatttgacagaggccaattgatgaaaattctaagaaagagattttaggagaataagtcttcagcctatttatagatttagagggaggaattagcaatgaaagcgaagttgaagatgtaaaagagaaaggaaagatgaaagaaagaaacttttaaaacaaatttggagccaggcacggtggctcatgcctgtaatcccagcactttgggaggccgagacgggtggatcactccctgaggtcgggagttcgagaccagcctgaccaacatggagaaaccctgtctctactaaaaatacaaaattagctggatgtggtggcacatgcctgtaatcccagctacttggaaggctgaggcaggagaatcacttgaacccgggaggcggaggttgtggtgagccgagattgcgccatcgcactccagcctgggcaacaagagtgaaacttaatctcaaaaaaaaaaacctcaaaaaacaaaacaaaaaaaaaacaaatttggaaaggatatatagtttgcttatatagtctgggtcccttctttattgtatattatattaagaccttgtaaatattaaggcatgtttttgggttattcttgtgactagatttgtactttataaagctgtatggaggttacatcatggagagaacaaatttgagttaaggagacgagttaagaaactgtttaagaaccacttctcccactccgtgggatatagacttgaatattatgtactggaaatgaagaggaaagaccaaaatcatgaattatttaggagacagaatccatatgatttgggaactgatattgtggtatgaaggtaagagtgtgatatagaatgactcttggctttctgacttggtgactaaatagattgtggagttattgaaccaagaggagggagatgattcatggagaagataacaatttacgtttttggcacattgattttatattgtctgtgggacattaaactggagatttctgagtggcatgagtacttgtatctaatggtcaggcaagagatctaagtttgcagggtagtcaaaattactgcttaaatcactaggaaaaatagttttaatgagaagagacttgcactgagaatagaaccttgaggattagaggaatagacattgaaggggtaagcaaagaaaaaaagatccttagaaggaaggctgagaaaaacagttaaagaggcaggaacgaaaccgagagagtagcattaaaccagaggaaagtaggcgtttcaagaagtaagttgttaatgtcagaaatcatagagagattcagtaccatactttatctcagcaacagtatagttcatactgaactatagtgtaatattgagagcatatattttatggagcggacaaaggctagttcataatatttattctctttcattatgagtatagaagtttgggagctacaacttcatggtattccaattttaaagatagtgcctgaagactatctagtcaggcattaattgatatcacaagaatagaaactccacattaatataaaaataggaaatcatgcagaggtttatgtggacatactaatatttaaatatgtttgtacttctttaaaattaattgtatttgtcttctttttattttgaagagttcatgtctcttggcagtatcaattggctgggaaggaggtgtttatgtacaaacctgtggtcacacattacatatagattgtcataaatcttacatggaatcattacgggtaagttgattgcaaaaattttttaaaggtgcatgtatctttccaggtattaaatctttttatagtatatacatcccaattccagctcatctttttaggtgattttgatcatcgtataaactatccagtctcactttaacacagacctgttcaacttcaaggatt

SEQ ID NO: 24866 - DNA, 2300 bp, Homo sapien
ggaggccaaggcaggtggattccttgagcccagagttcgagaccagcctgggcaacaaagtgagaccccccccccgacaccgccaccgtctctacaaaaaataaaattagccaaatgtggtggtgtgcacctgtggtcccaactacatggggagtctgaggcaggaggactgcttgagcccaggaggtcaaggctgcagtgagttatgactgtaccactgtactccagcctgggcaacagaacaagactgtctccccaaaaaataaaaaaaataaagctttggtctgaagaggctatcaaagactgttggggttacatcaataggatacaagccaacctgaagtatttaaacagttattattttactatgggactgaaggacactaaatatattaaaatccaagaattcataatactgggaaaaaagcaatcatctttggagaatgctaaaaaaaaaagtcatttttctgaaaactggtacaaaatcaagcatttaacctgcctttcctatatcaactttaccaatgtgtaaacaaataggaaaaataggaaaaaattttagttttatgaattccacttaagaaatgaaataattaaggaataaatctagagaataatcaatagcttctactgtcacataaagaggaacaactggaaattatatctcctgataaaaaagtatttaacattatccatgaagtatttttgtaaaaagaaataagaaactgattccatctaaatctatctgccagtctgtaggacacacacagggacagaagatcatgttattatatgatattgttgggggtacaagtagcaaaatagagactatggtaagttctaaagggaaaaagactcagattcttcaacaaataaaatgcaaggaggtaggaggagggaggcaacccacagatttaaaagaactataacaaccaaatccaatgtatggatcttttttggatcctaagccaaataaaccaaataatatttaaaaataatttacaggctgggcacagtggctcacacttgtagtctcagcagtttaggaggccgaggcaggtggatcacaaggtcaggatattcagaccagtctggccaacatggtgaaaccctgtctctactaaaaatacaaaaattagccaggtgtggtagcaggcgcctgtaatcctagctacttgggaagctgaggcaggggaatcgcttgaacccaggaggcagaggttgcagtgagctgagatcgtgccactgcattccagcctaggcgagagagaaactgtctccaaaaaaaaaaaaaaaaaaaaaaatttacaagaagcaactatggaatttgaacactgatgggatatttactgatatttaggcataactgttcatttttaattgtgttcacgattttttaaaattattttaagaatccttatcttttagagatacatactgaagactatagagataaaatgatatgtggtctggaattcgcttcaaaataaccacaggtgggagggaggagggaataagtgagggtataaatgaaacaagactggccatgagttgatatgggggttcatgaaactctgctctttactgttatgtatgcttgtaaataaatagttttttaagcccttggtttataacaaagcaaaactgagatattttctttcttcaagtcaatggaaaataataagcaggattcaagctctcttttctgggccctgcttatgggatcttggaagcagggatattctataatcactggtcccaaatgctctatagaatcttgggagtctgtattctatacagcatggttaagaacagatttgtgaagctcctcaagaacagcaacatgatccaaacctgggtaactgaccctccctgatacagtctgattgtctccccacccaaatctcatcttgaattttaactcccataattttaactccctcgtgttgtgggagggacccagtgggagataactgaatcatgggggtggttcccgcatcctgttctcatggtagtgaataagtctcatgagatctaatggtttcatgcagggaaacccctttcacttggctatcattctcttctcttgtctgctaccatgtaagacgtgccttttgccttctgccatgattgtgagacctcccagccatatggaactgtgagtccattaaacctctttcttttttaaattgcccagtctcagatgtgtctttattatcagcatgaaaatgaactaatacactccctataaaggatgatgattttatgtcttaaaccctggaggctcaaaaataagaaag

SEQ ID NO: 24867 - DNA, 2300 bp, Homo sapien
gcccagctaatttttgtatttttagtaaagacagggtttcaccatgttgcccaggctggtcttgaactcctgacctcaaatgatctgcctaccttggcctcccaaagttctgggattacaggcatgagccactgcacctggctctgttcaaataactcttaacacttctgtatctccctgggcaagttacatttagacagagggactttccattttcctgctttctcttttcatttcggcttaatcatactgggaagtacgttagcttgaggttgtccctctctgtccagcagataggcaggtactgctccctgtggagtctttcttttgtctggtgtttctcttttcatgcatcttgatggtctttttcatttgtattttctcagcatggtgctgtttaagataaagcttagccttcagaccaatcattttctttgacttctttgaatgttcataagcctctcaactttccttctttccctttttctcatggtaatccaaatgatatccatggcatttacagtgtaattcaatatatttgatctgtggcatggcacaggcgcagcccctggggtgcgaaaatgctctcaatttttgggtctcagagacccacgagtgaactccacacaggccgcaacaggaaaggcaagaccgaattttaggtgtaatcatgagaggtgttacagctgttaaatactttccacctcttgtttcccatacatatgcattccaattgtgaaaaaggtcacccatatatactggttgctgtttagagcatacacattctgtaggtgatttcttccagctggtgccatctaaaagtttgtaaatttcatgaatttcataatttttgtggcactgaaaaaatcagttttgtagttcatgatttaaaataccacagcttttttcagatgattgaatatatgttaagatcagtgaattccatggacatccacctgttgccttacatctctcttcatgagggaaattattggaggtaatgtgctatgggctactggataacatgcagcctaacctataataagtgtcaagttcagtgaggacaaattgttatcccttccctttaatggaagggttccactgtaatcaactcattacagaatgccatccttggagtccagggttgggtgctgagtattggcaaatgatgtattgtatactgttcttatcattgcttccatggacacttaatccatgaacttgttgatgaggaacaagctagcttagttactccactgatttaggtggattatggctgcatgtaggtaatgtgagatgatctccatttaaattgactattacttacagtttcttaagataatagactcactctacattttatcttttttaagtgtgaatggagtagcatctagaaaaatttagtgctgctgccagtatttttatacagctgcaaatagttaataaagcatacccttcagggaaatttaactaatttgacaatttttttattcttatagcaagacatttatgaaaagaattgtagcccagcacttatggatataaaagatcttaacagcttgaggtgcaatgaattgtacatactctaggaaagcaattctacattataaagtattaaagtagaaaaaatgagttataaccatgatctgtcctaaagaaaaagctaaagaattgtttgagaatgatcaaaacttggttttaaaaaatacgtaacttttaaaaacctttgcactatgcatgtttaaagtcaaatacaattagatgtattttccctgcatgcttagagatggtgtttttcttttaaagtaataacaagtttaaatgttttaaggtgcttaatctaaaaaattaaatcatactgtaattggaaactataatacattagataatggtaactgttgaactactattttagtcatgtataagatggaaatgagaggagtgttaataaagaaaataagccacattcttggaggcagatttttctttctgtaaaaatacatttaaaaaatatattgtgttagtgacttaaatacataaaactaatgaatatttttggataatgttttaggccttgcttatccaagagtcaaaatggaaattaccacacctactacagttgcctgagaattataacaccatttttcagtactaccacagaaaaacctgtagtgtctgcaccaaggttcctaaagatcctgctgtttgccttgtgtgtggtacttttgtatgcctgaaaggactttgctgcaagcaacaaagttactgtgaatgtgtactggtaagcaatagtagataat

SEQ ID NO: 24868 - DNA, 2300 bp, Homo sapien
ggtactttagcttcattaaagatagcagctcaagcaaatttaaaattaatagattctatctagttcgcctattgttatttttgaagtctgttacagaagagaaattatgcaaatggctgtcaggctattgctgctgcactcacactaggaatgcattataatttctttcttagaggaaacacttatttggagcagaccaggccctcggttcgttcgcaagaggttgtcccttccttcagatggtccattttgagctaataagtactatcagggttgaggtggagaggcggggctgtggggaaggaaattaggataaattactggggcccagtggctgaaagggcctcgggcaaatccctggtgaagacagtctagccagtcctcctctgctggggcatctggtattttttttcccttgggcctgggcaggctgtcggtcaccttccagactgtatagcctttaactccttgttgcaatggaatcctgctggccttctgatttgccttttcctgcaaaaatctgccaagacactctttctcaaagaaaatttcctatgttactctactgtttaaaagcctggtgtggcaccctctcacctttgaggaaaaattccagccccccaggctgcctgaaagctctgccttcaactgactcttgtatacaaattcaacttcatctcttgattatttttataattcttctactggaaccaggctgatctttttaacaacctgttaattttaataacctgttcatttatttattaatttattctgcaagcagatgggatgataagttcagtccaactgtaggaatccatgattctactagctataatatgagcaattattatgtgcaaatactgtaggaaatataggaagatagaacacattatccccattcttaagattcttatgacagtaaatggaaacacaaaggccattattgactagcgggagtaagatcgctgtcctttaaatcaccttcttcatatttgcattctctgtgtgctgtttcttggctctgggtttctctcctgcctcatctacactaatccttttcacttcttcattcaaaactgtacctagatttatctgctccaggaagcattcccactcaagtcttggtcctgggttgaactgactcctcctcagaattgatggatatagcttatccagtgttattgcacagtcttcaactatttcacatgggcctatgtgtcatgttagctggccagaaaagaagctttctggggaccctaccctcctgtttctcacttcccctctctcccttttttttttttttttttttttttgagatggagtcttactttgttgcccagcctggagtgcagtggcagaatctctactcactgcaacctccgtttcccaggttcaaacaattctcctgcctcagcatccctggtagctgggattacaggcgcacaccaccataccctgctaatttttgtatttttagtagagatggggtttccccatgttggccaggctggtctcgaactcctgacctcaggtgatccacgagccttggcctcccaaagtactgggattacaggcgtgatccaccatgcccagcaccacccccccaccccctgcctcctcttaacctactgttctgtatatagcccagggcatgctactgaatgaatagtcactgttgaatagtcactgtttcattgcttggtaattcagatcagaaactcatggtgtttcccctgggtttatctgcagttcagaaaagtgaccctgactacatgctttgattatgccctttgctcacaaaaagatgattagttttgattgtgcagcatttggaatgaaggaatttaatctggaatgaaggaactttaaaaggttgggggaatatcacattggaactgttaaatgacatgcaaacaggatctgtgagaatggttttgattctgctctgtgtcctggtaggagacactaaatagatcaggctcactaccaattagcatcatcttaatcttgcctaatagtgaagcaaagtcaccaaggatttggtggatttatcagctcctcccacaatagtcatctgaggctaacacctcttggaacctagatcgaaagtcctttggtaatgatgtgtcatacattctagtcatcaaagacaccattttctgggcctgaagtgttctgctggtttttggaggaatgagaatccaatctctcataagccggattcagaaaataggtcatcgatgtgagttgcagttattttccttccagctttcttctgtgcttgctttagattgttt

SEQ ID NO: 24869 - DNA, 2300 bp, Homo sapien
ttaatcttgcctaatagtgaagcaaagtcaccaaggatttggtggatttatcagctcctcccacaatagtcatctgaggctaacacctcttggaacctagatcgaaagtcctttggtaatgatgtgtcatacattctagtcatcaaagacaccattttctgggcctgaagtgttctgctggtttttggaggaatgagaatccaatctctcataagccggattcagaaaataggtcatcgatgtgagttgcagttattttccttccagctttcttctgtgcttgctttagattgtttttctgcaaagggcagatgcagctgccctggctggtgggcagtggagggggatgacagccactctggctttgggcctctgtctgacatcacccagattcctgggtcctctcagttagcatttgccttttgtctgggtggttaaatttctcttgaaggagtaggataaacaccctcttgagtattgctttttacacagacacacaccacacacacacacacacacacacacacatacacacagcatagttcatagtcacttgatttgccacctgcagtttataatagaatggacctgtgggattataaaccactttatttctgcacagaatttctcagcttgaggccaaattgaagggcattagtcatcagtaatttgcagatgtttttaatgtttttcacccaagagaggtttcaggcagctaaagctaagataaatttcctcatgctttggtggggaaatgaaaaatctgatcatttagttaatcatttgtaagagctgtgggtatgtattgttccttagtgactgcaatatcatgacagatttgttaatttggtaacatgacaatgtaaacaatagtagataaattccattatgccatgattcttttcttcctctcagtaattttgtatattcaaggtttaaaatccatagaacattagagatggaacttagagatcaacctagagatcattggattcctctaccaagctctgtcaaatgccagtcctgagtgtctcccctggagcatcaggataaatagctaatgcatggggggcttaataggtgcagccaacccaccatagcacatgtttatctgtgtaacaaacctgcacgtcctgcacatgtaacctggaacttaaaataaaataaaatttaaagaaaggaaaagagtacataatcagtggaaccataaaggtcagttctagtgggaaaattaggaaaggcctcctagaagagaagacatttgagctatacttgaacaggccctatctagcagcatccagataggtggtttgtgaagaagccagttcctactcttacgtctttaccatggttatggtttgaatgtcccctccaaagatcatgttgaaatttaattgccattgtgagaagaaatgggacctttaagaggtgactaggtcatgagggctctgcccttatgaatggattaatgctgttattgtgggagacggctcctagtaaaaggataggttcagtctcctttttctctctcttgagctctcactctcttgccctgtctcactatgtgagaccttccaccatgttatgatgcagcaagaaggccctcaccagatgtggccccttgatcttggacttcccagcctccagaaccatgagccaaataaacttctattgtttataaatgatgcagtctgtggtattctgttacagcagcagaaaatggactaacacaactattatgcacttgcttatgtattggtttggaattattctctaatttactcacgcttgtatggtatgtgtttccttattctgtgtatctctgggtgttatatttaatatttgtacagatttcctctgacatttcacagttcaggtttccgatttcttctttctaaaatctattctctagatttgaaagcattctatgatttgtgattcatatataccatactataacatctagaaaaaatattctgaatagcatactgagcaatggaaatcttcatcatgaattttctaatgagtataaaatgttgctgggcaagtttctatttaaatcatgctcgctaggcttgactaactgcagacattcacagggtgcatgctgcagagtgctttactttcaacaaggtaaggctgtacctccgttagggactaattcagggtattcaacaagggatcagactagaccaatttggggttgttaaggaactaaaactagctcacgagaaactcaaatcagctcatgaaaagaggggctgcttggaagaatgcagtaggaaatttcatgggttaca

SEQ ID NO: 24870 - DNA, 2300 bp, Homo sapien
agaggacagcttcaactccctgtgattttatctctgacccaaccaatcagcagcaagtgcccagtgcctcgccactcccacccgtttcttcaaactgcctttgaaaaacccctaaccttcaagctttcaaggagattgatttgagtaataactccatctcccacatggtgtggccagcctcatttcaaactttctttactgcaatgccatgaattgattttgtttgtgcagtaggcaggaagaacccatcaggcagttacagggaatgttgctgagatttttcaatattttgttccttcaccatttggcaaatcccatcacactctgggagaagagagtgaactgcttgagcagtgattcttgggatcttctctcattttcactgaatgctactcttcaaagattatggcgtgaagttatatcccttcttttgtttgattattgctggtatattttgatttgtttgctggatttcaagtttccattttagtgttgttcattcattcagttttagggaaaggagatacttgacttcactttgccatctcaccccagaagtcataaaaatttttgaaacaaattcggaacctccagagcagagctcagtttcttcttcctcctcatatttcttgtagaatctagtgtagcttgaatgggattggaatttattaactatttactgaatgcataaataacattttatggtaattttggctaatttatgacctgttattgaaagaagggtagatggtgtacaatcaccttgaaaaaagtatcatttctgattaatcttaagaggggatgggcaaagcagcaaggaatgtgcagtaagacatgggcgaatcagccacacgtcagactgagcatgtttagtgctcactgcaaccctgaagaattgagtccatctattgcttttgacctaatgtgggaaataagctcctagggcctctgaaaagatatgggtgaatgatcagaaatttatcaggagcacctttctcctttgggttttttttttttttttttcccttcttcactaaacacatcagttttaagggcaccatgtgaaatttcatttttgattcctttcattgctaacgtcaaggcccactttacactattcttcattttccctccaggcctttcactggctgcttaagggcagtccacccagctagttaatgcgtatttctctcttcttttatgtgactctgtttacacttgggcagacatagcttcctgccaatgggcagtttcttttcagggacaagatgagaaagatcacagagctttgtagtgatgagtggttttgttcatctcagtttctgcatgttgatattctttctgttttcctccttcaggaggaaggaacaagaattggactagaagaagaaagtcatttgtattcttctgactattgattttccttctaccattcagcagttcagtagttttgcgtaactacagctgtttgggctgggacatcagccatattgtgggactgactatatttcagtaagcaagaagtagattgggaaggtgaatttctgacaatatgagtgtgggtgctttaaatttacttcttttcactcaagttatctaacatagagcgaggataaaaaagaagaaatatgagtcaaatgcctggtagtacactgatgttggggattagctcccagtgtctatcagggagccctcatgaaggttaccataacctagggacaaagatgttagacttaacagttttcagccactttccctggcagcagccaccattcagcagcctatcaagacaactgtccaatcatgaccagaacatcctctttggctgttttactctctcctgtggtgtgtacataatttccatttttagaatcatgtttttaggatgtttcagagccatgttactcctccactctatcttttattaccatttcttaaggagggtccaagttctttttcaaaaaatttatttacaatagaggaagaaaataaaaagtaacatgaggttgctggttaagaaataaaaatctttttgtttcaaaagtccactgcccccagttctgtgatctgttgcacataacaaatttttcccccaaccaggaaacatctgtatggattatttcactataatcctatgatgcttggacttgaatcacttccagatcccacagacacctgggaaattatagagaccattggtaaaggcacctatggcaaagtctacaaggtaactaacaagagagatgggagcctggctgcagtgaaaattctggatccagtcagtgtaagtaacagttgta

SEQ ID NO: 24871 - DNA, 2300 bp, Homo sapien
gccaggctggtctcaaactcctgacctcaggtgatctgcctgccttggcctcccaaagtaatcccaaagattacaggcatgagccaccgcacccagccagggtttccttccttcttaaggctgaaatcaagacagtggtttttttttgtttttttgttttttgtttttaaagaaaccttgctcctggaggtagataagattataacattttaggttagagataggcctggaaggtagataagattataacattttaggctagagatagacatggaaatgcaatttgagggccagagaagttactcatagaaagccaccccgcaggttagtgtagatgcctcggtcagaagccagggtctgaggacattcagagcaagtactttttctgccacaccaggagatgaggggctgcactacaggtaatccaaaaagaaagattacagggtttaaaatagcattagagagaagggaaaatagccttggttgtgcaggacaacacaatgtgcacctggggatgtggggcagcgagccaggggaggggttagaatataaggaggggacgggggtagaggaaagactgatatggggaagggagaagttaaagggagagaaaatcaggagaggagggaaggacgggaacttagcgacggtggaagacccaggctttataaaggtgctagtgacctggctctgtggctcacgcctataatcctagcactttgggaggcccaggcagggggatcacttgaaatcaggagcttgagaacagcttgggcaatataataagactctgtctcaacaaaaatttaaaaagttagctgggtgtggtggcacatgcctgtagtcgcagctactacggaggctgagatgggaggatcccttgagcccaggagtcggagagcacagtgagctgtaatcatgccccctgcatttcagcctaggggacagagcaaccttatctccaaaaactaaaaagaatctttttaagtgctagtgaataaaaattactcttgccctatagcagctaaatcctatttacttcaggcccacctccttcaataagctaagtttagtgaaaaagcatggaattctctagtgtcccccactcctacccgtccactgatgcttgaaatacctcaaagtaggacagtggctttcaggcagtggagagaagtcttaaattacacatgccttgctgagttaacagattgattggcactctggccctttagagtataatcaaccaaccttcaacaagtgtaagtgattttatcagaaacttctgggaaggagagtgagcggaacaggtgggttgctggatggctaaaaagggagctactgtattcatgcaggagagaaccacgggggaagccaaatcaaagacaactgcactgtggcttgatctcagcctcatttgtctgcagtggtggtaggcctgggtggcagacctgctgtggccagacaatatgaatgtgaatccatagattagatttgcatgatttatgatgattttattttcttaacccagttagtttctttaacaaggaagctttgtctcagatgattcatgaatagcagtatcaggcaacacataatatgtatgttttatagacacccagaatgtactcacacacacccatggaaaccttaattggatgttcagttattttgagagacttcgttttctgagaactaattcttcagagacttgcagaagagagcagaagccacctttatgacggacacaattttctttcctctgttcagctcctggctgcctatgaacttatcagcctcatttccatatcaaagaggaggcaggaaaatactcccctgaccgacataaaaagacacattactgcagattgtctaagaacttgttttttttttttttggccaaaattagcaagttattcacagtaataggtgagtcagacaacaatagtgtttaagagaacaaagccactcatcaggaccctgaccccaagcagggtccccagctgccagaacatctctgcacactggcagccaagaggctataaaaaaagaaaaagaggcagccaggaagtctgccactcacccagatgcagcgaccagaacattcattccagggctgctctgcagctgcccaggcagctccgtgggtggccactctgctaacgtgggagcacacgtggcttccatctgatgagcagtctcagggaagctgggggcttcagacaccaaatgtctatttccctccttgatttgagactcttttggagctcttggagacttccagcagaaacctgagctgccgg

SEQ ID NO: 24872 - DNA, 2300 bp, Homo sapien
tcaaatcctggacgggagcgtgggaaggagcaggttggccaggcctcggatgaaaccactaagctctctccccttctccgctcccagagcagccgacctcatcttcagaagccagatcgggtcggccaagttgtgtggtcgccgctcgcgttttagaggggacaactcgttgggggagaagggggcgtgcgagtgcaggatgtgcgagggacccattgtatttgggtcgcaagcagcccacccgtcttgagtacgatattctcattccgcaggcgcgccctgggcgtgggagaaggtgggcccggaggcatcgcatccccgacccctgatggaagtgcggagggcatccttatacagtccagattccgagtccgttgtagttaggctaacctctgacgctgcatcgggagataggtcaccccgtccgtcccggtcgcagtgcggttcccgtgaggaagacgggcagagaggccgggcgcgaactgattaggggctcccccacggccggcggcctggagagtggagactgtgtccgacgggaggtgggtgggggagaggagtaggccgagctccggcggccactccgcagtgcgctctcgcgagccggggccgcgaggcctccaacgcggttccgcacccctaatgccccagggcggtgagcaccccgcggttccccgcccgcctcttcctccttccccgcccgcgcgcccgggagaggcgatccccgcgtccgcagtgccggggcaggacgcgccctgcgccctgggccaggaggaggcaggtggccctcctcggcaggaggtgagccgccagggagggatgggggtcacccaagcccctgcaagcgcgaccctgcccagagcaaagcacgccccgcgcctggtgaggaactttttctttccaaaggtggcaggaacaagtctgtactgacttttctcccgccttcgggatcctctctcgtatgatttgtggtttgtgggaccacaacaaccaggcttcctcgaccgcgccttttttccagtagctcctggtctgccaggcttgcgagagggcgcgctggcttggcggggctccgggcgagaaatcaccagcagcgctggggctttcggccccccacagcccagcccgggcctcctgggtggcctggggagaagggggcgggacagcacagcttcttcccctcgggtgggcatgacgggtcgccttgggtgtcctgccgagctcagctttgagggtatgcgcggcgcgggtgtttttcccaggtccactctgcaaaagttgtggcctgaggaaaacttccaggtcgccagcaggaacgtcacaggagagccccggtcgctcgtcaggcgggcggccctggagcgtgcgcgccacccaacgccgcgctgggcggccgcccggccccgccccaggtcacagccctgccctcggccccaccgcggcgggcgggggacacgcggcgggccgggcgctgtcggtcccacgccccaccggggatctcgcttgggtccgctgtgtgcgcgggcgggtgcgtgtgcggcgagggtgcagggtgtgcaagtaaatacaggggagagttacactctttgccgtctcaaagtccggcgcctggaagccgaaggcagatttttccagagataacaaagacactttgtcactttgggcgctgcgtcggtgcaaatctttaattgcaagtgtgtgtgtgtgtgtgtgtgtgtatgttggggggggcgggaagagtgtctcgagcaacccaagcgcgggtctccaggcggcaaggccccctttgatcaggaaaatccaattatttgtgtatatacatttcccacatagtgattacttcattaattgtcccgcctttatctcctcccttcccatcccccctaataatcagttcttttatccagaccaacaaacacaccataggagctttgtggattcaaaggatttgctttcgcttctgaaagagccgctattctttgatgattgggtagcggcaaacttcaaagccataaatcttccctctgactggctggcggcccagcaaagtccttatcaaattcttggaggtgatcctgaagcgctcagaccgcgcgcggggcgagcgagcggggcgcggcgaggggcaagggcggggagggccccggcgctcagagcaggcgccagggaggcaggctgggcggcccttcgtcctcgccttcgggtgtccatgcctcggcggcggcgtcccgctccgcagccaggggcctgcaagccgtagccatggccgcggtggccgtcctccggaacgactcgctgca

SEQ ID NO: 24873 - DNA, 2300 bp, Homo sapien
cggcctgcgccgcgtagggcacgtaggcgggcgcgcagctggcgggcagagccgccatgctcgagggcagcatcttgaccggcgagaactcgtaggggtacgaggggtcggcggggggtgtaaggggaagctcgtgcgcagccccgaaggacggctgcaggtgcgtcttctgcggcgtcagccccaagctgggatgcgggggcggcagtgcgcctggcgagtgcgccggcatgtcggcggtccacgggtggaagagcctggagggtgagcccagcgcggggtcgtagggcacctgcaggaagtccgggggcgccgccgcgcccggctggccgatgcggctacaggtggcggccagcaatgccaggggcgagtgcttgcccaggtccggggaggcgctgggggtgcggtcctgcataggcggcgagggagggcggagaagagacaaaaggttagctccaagcgcggactccgggccagcccgccgcccccacgcccgctattataccgccgcccctcctccgtcccggccgtccctcccccgccaccgcaccccacgcacgcacccaccggccgagggaaacttttggtgcctgcgctacctgaacgtggggcccgcgagcgcttcttgctaaactacttggtgcactgagacgccatccagccttagaggaagcaggcgcgaagtgggagggggaggcatccgacgggcccctcccggctccgtggtcagtaagagtcgggaaacacccacaaccccgccggccggccgctctccctcccatcttttaagctctcttgtcctcactgccttcgcgctcctccctggcccgccccaggctgaaatcagcaggagggcccagcagggtgagctccggtcctgttctcggccagccgggcacctccgaacaatcccggatccacgcgtccctccagcaaaggccacaccggattaggtgtgaagttggcgtgggcacccctaggcctggctccagctgcacccatcggcggggttccctttgaggttcaaggtgcacggagtaccaggagagatccggacacggccctttccacctttctcccgccccctccgggctcggccctgacctggagaaaggcctgcagcgagtcgttccggaggacggccaccgcggccatggctacggcttgcaggcccctggctgcggagcgggacgccgccgccgaggcatggacacccgaaggcgaggacgaagggccgcccagcctgcctccctggcgcctgctctgagcgccggggccctccccgcccttgcccctcgccgcgccccgctcgctcgccccgcgcgcggtctgagcgcttcaggatcacctccaagaatttgataaggactttgctgggccgccagccagtcagagggaagatttatggctttgaagtttgccgctacccaatcatcaaagaatagcggctctttcagaagcgaaagcaaatcctttgaatccacaaagctcctatggtgtgtttgttggtctggataaaagaactgattattaggggggatgggaagggaggagataaaggcgggacaattaatgaagtaatcactatgtgggaaatgtatatacacaaataattggattttcctgatcaaagggggccttgccgcctggagacccgcgcttgggttgctcgagacactcttcccgccccccccaacatacacacacacacacacacacacacttgcaattaaagatttgcaccgacgcagcgcccaaagtgacaaagtgtctttgttatctctggaaaaatctgccttcggcttccaggcgccggactttgagacggcaaagagtgtaactctcccctgtatttacttgcacaccctgcaccctcgccgcacacgcacccgcccgcgcacacagcggacccaagcgagatccccggtggggcgtgggaccgacagcgcccggcccgccgcgtgtcccccgcccgccgcggtggggccgagggcagggctgtgacctggggcggggccgggcggccgcccagcgcggcgttgggtggcgcgcacgctccagggccgcccgcctgacgagcgaccggggctctcctgtgacgttcctgctggcgacctggaagttttcctcaggccacaacttttgcagagtggacctgggaaaaacacccgcgccgcgcataccctcaaagctgagctcggcaggacacccaaggcgacccgtcatgcccacccgaggggaagaagctgtgctgtcccgcccccttctccccaggccacccaggaggcccgggctgggct

SEQ ID NO: 24874 - DNA, 2300 bp, Homo sapien
atgaaagaatcatttcaaattttgagtccaaagcctttgaaaattttcactctctaacaaggattcctctttctcaccactttccaaaaatccttttctgaatctatagttgatcccagggcatggttcagatgggagtttctgtaactttttagagaaaggtgagagtttctataacttttcacattgctttagacatcaaaatgtgtagtcttgatctaatgacttagatctaatgattttgattaagattacatatttaagtgtatattaatattactgcctagcaactttatcactattgcttgcaaactgccacacccttgaaaatgtaacccaaactcctcttcccaggtgaagaaccatgaagactcacattctaattagtcattaaatagttccaatatctcttattctaaggtatattgccactatgaatctaatattcatttactaccttgtcccaagttacagaataaaaatgccatttcttaggagtataaaagtaattttcatctgaattatgttgatatttgtgttttacttcgtataagaattcaagaacaaccctcaaagcttttaagaactgatccttcagtttgacttcaaacaaaaggcaaagtaaaagcagtttgtgaactgtgaaatcctatcaatttgtacacacttcaactatcatgaaaagattattcggctctattaaaatttggcattaatgatgctagcttaacatgttaataaaatttagaacattttctgttctttgctaatcttaaatcaagatttaactgctgataaaagtttcagttacaggtttaaaaactcaaatattagaaaatatcaaggagttagacacttgataaaacatttgtaaacttcaaaacttcaacttttagagaaaggcgaggcacctagacaaaaaataccctatttccacatttccaaaccatgagtattcctggctcttccctgagaaaatcttagactacttcaatgattaaaaacataataaaattcagatacaaaatggaactaaacgtcctggcctagccagaaattcctgggtggttactgtgaaataagacttgttaagatttccatcgcaagattaaaaagaaaacaagcaaaacaacgctggctatcgtgacgggactgaaatacaggagtggcgtctgggaaactatcttcttggttctttcccaggcaaagaccaacctgaacaagggtcccgtttctctgtacctctccacaaagtctcacctgtgaacagatcctggcgcctctaatacctctcttaacaccagcatagttgtgacctgtcccgagagtaccaacaaatagaaagccacagggaattcgtcaggtaaaaacaaacttggaagacaaacagtctcgggtgaatcctaaggccgcatgagaaactcaaattgtgattggaaaatcttgccctacctctttaccacaaaacggaattgcctgcctttgtccattcctgaacccaacacatttgcccagatccttccaaaccaaagaagcctccgacacaggcagactataggaaccatcaaattcccggggaaacccgaccgcttagtacagccacccagaagaagaaaagatcaaatgagaccggctcaacggggtcttcctgtagtgacccctgagttaaagtatttattttcacgctgcaactgctgatcactttacagagacatatcatgctgtagctctgcatggagctgaagacaaaagcaacatttttattaatgttataattattataattatctttaacaaagctattaaataacctgtacaaagcccaaaccggtcctagcgaaaacccgagcactgtttcaaatctcccaagttcctttctattcagttcagcagcatttcctatatacaaggccagaccagggtggtcccccgaaactgtaggtctccctgacggtgggaacggtttagagtttggaaccgccctggcgtacggcagagctcccaattacaatccaaatgccccagccccaaccctacctccccgctcctgggaactgggtccctatgtccgaaggcagcggaagttggaagcctggctccattttgggaggcaggcaacggagagggtccgtctgctgagtctcccctccgccagctgcccacaggtccccggatctctcgcagaggtgctgggaagggggtccacctccgggagggctcacaggtcccgcgcgtcctcccgcttaaccccggcctcagcgactttgagcttcttattctggtgagtcttgacgtgcttc

SEQ ID NO: 24875 - DNA, 2300 bp, Homo sapien
gtttttataagctaccttgtagtctaataggcaaagacagaatgaataaatagctagctagctacacactcaagccctgcaactctggtgagaaggagagacagagctgattaagcactatcctctatcctcagggagcttggtgggggaaacattacatgatgcaggaacaatatttcatggcatagcttcaaatgtgtatacaaatggtgtcaaggatcatccatcacttacattcattttttaaactgactaaatataaattttatatatttcctttacagtgtaatatagtgctaggattccagactctggagtcaggttgtctatgtttaaatcccagtaaactgtgtgaccttgagcaaattccttaacctctctgtgattcagttcctcaactgtaaagtgtggataaaaacaccacctaccttatagagttaaattgcaaaggttaaaataattagctaccaataaataataatagtagcactcatctcctgccagaactgcagttactataactcctcctcctatactattgttaatatttacagctcagggaggccagtcctgaaggtgaactgtcacaaatgaagccagttctaaacgccgaaactggatggggcaaagaagggagaaaacactgaggatgtggctcaaccggtgagcgtaggtagaaagctctggaattctggagtgggtgcaatgaaatacctagagatgctggaatttcagctctggaaaactcttaacacgtaaagagaaatgttattgttattattgttctccagagattacaaaaaccaaaactatttcaattcacaaaaaacaaaataaaaattaaaaaataagttggatttggggatcattgtatttggtttttagaaaaatgaaacatattaaaagacatttccggtgtccttttcagatttttaaaaagcgacttccaggggttctcctagggtaaaaataagattcagccaagacacctatgccaaacaataaattgatcattataccatgtgttactttaaatgccacaggggctcagtgtagagtagtttgagtagtcaaaagaacaatatcaacattttggaagtttcaagtcaatttcatcatctcataagatgagaataaggcccgggaatataaatgatttgtccaaattccatcgaaatttgtatggctagcaagttatatctagctagtagtgatgtcttaactaattttccaaaaataagtaaaagaattccgggcaagggcaaggactgagggaagggggtcgggaagccctgggatgggctgggccatcttcgttatttgcggggaaggagttggtgcgtgtgcaccggccggtcaaagaatggtagtgtagacaagcctgtcagaatcgcccagttatctccacacccgtgtagacacgaacggcgcttcctcacctcttccgaccactgcgggaggagggtgccgcaagccaggcgcaccccagtggcgcgcatcctcccttcccggcggcccctggcagccacggggcccggggcccagagccagaaccaggtgcggtagagcggtccgcagactcgggcgcccggtctgggggtggtctgctgtgggggctgggtcagactgcacaccgggctagggagagggagaccggtcgttgcctcggagtgtcttaccagctggcggccctcttcagcagaccatccgaagggcacacaccgagagccagcccggctagctgctcgcgcggagctgggggctccgagtcgggaacgcagcgtcgccgtggagactgcacggcgcgtggaggaagctcgggcagcagccgagggtgggggctgggggaattgggcgacggcgggggaggtggcgggggcgggggcgggggcaggggcagcccggggaaccacggagaggcagggtggaggcgggcccaggccgtagggcggtggagggcgcgggacggagcgggcgcggcgaggagggcccggggcggggctgggaggcgggtccgggggggcggggcggggcgggcggccgagctgagggacagccccgcggttgtgggtgtcccgcggcgccggaaactgggcgcacacaccctcggattgacgtgcgcacgcgcaccggttaccttcaggagcgccgaagaaggaaagaaggttggaatgtcggtgtccatacctgattctaagcgagggagagggaagggggcggggtggcctcagagttttaaacttggggagtaaaaagaagtcttgagttgggagagatgggtgtccctggtagtggatgaa

SEQ ID NO: 24876 - DNA, 2300 bp, Homo sapien
ttatttactaacatgaagcttcaagtttaaagattaaaagggagagttaacccatttttaattaagctacttaatgaaaaaggctattttatattatgtccaagggctaatattagtgttggactctgcataagcatagcatttagcaatggcaaaaatcgatttataaacttaaaaactcaaggctaattttcttagttttattccatcatatcactgtgatgtaccagagacatttatataactgattacttaaatgctctgtgttaaagaactctgaaaagagtctaagaattgttatacgataacaaatgccagtcagcaatagaattttaatcattgtaaaataatttgtaatgcttttccacaaagaagatactacattttagctatttagtttattgttgacatattatattgtatgtttacattaaatgtagtgtctgtgtttaaagcattaaacagaattatgacctaagaaaatattttttcactgtctaacatataggaaggaagtcccttctaagaatattgcaaataaagtctctttacagactactgaaaatagagtatcttcaaggagtatcgaaagtaaagatatcttaacaaatctacagtctgacctattgtcatcttcctgcttaaaagaaagcacaggtaataacatttgtttcattgaattaactaactatggcttctaattgaaccctccttttctgcgacctttgggaactgacaactctgtagatctggggcgggtcatgagaatcagtagttctccaaagtcatgttgtaggtgattcttatattcagccaggtatgagatccatggatatgcattacataagatggtaattacagagtcttaagtcctggaatgaattaaaatacctatgaaagcattaacacgttccattcatttaataaccagagtgaaagccagagtgccaggcactggtttagaggctatggatacaaaagttggcaaaatagggaaagcccttgtccttataaagtttacattctagtagaagtcagacagctgactattaaaaataaaaaacaggccagctatagtggctcatgcctgtaactctcagcactttgggagaccaaggcaagaggatcagcccaggtcgagccctagagtttgagaccagactgggcaatatagcaagaccccatctttgaaaaaaattaaaattaaaaaagaaaaattgccaagcacgctagtatatacttgtagtcctagctactaggaaggctgaagcaggaggattgcttgaacccaggagttaaaggctacagtgaactatgatcatgtccctgcactgggtgggtgacagagcaagaccctgtctcaaaaagaagtttaaaaatttttgaaaattaaaaataaaaataaataaaaataaaataaaaaataaaaaaataggctgatgcaaagatagttatccaagttgattgttcatagctacagaattaactcctggttttactctttctacccttctcactactgcacttgactagtctaaaagaaaaaacaattaaaaacacaaacactgtaaacttagcacttttaggtgggtggatcacttgaggccaggagttcaagaccagcctagccaacatggtgaaaccccatctctactaaaaatataaaaattagctgggtgtggtggcgtgcgcctgtagtccagctactcaggaggctaaggcacaagactcgcttgaacctggggagcagaggatgcagtgagccgagatcacatcactgaactccagcctgggcgacagagtgagaccctgtctccaaaaaaataaataaataaaaataaaaacacaaacacataagtaaggtaattgcagtttgtggtaggtgctataatgtaaataaacagctcctggagagaggactgctttagatctagggatcaggaaacttctctcatgctgctaactgtttgtgaagtaaatgagacagttcctgtgacatcacaaaatgtccctaattcctcattatgacctcccttggtgacatcagtgcattgagtcagtctacaggctaggtgcacactggacagtcagggtggttgtgagctgatggagactgtaaatgaaccagaaacaggtagacagatggcctgaataacacaaccgtcatactcttggaagaacttgatattccttttcagggtagcattttgggtttagagtcaggagtttgttttagagtcattagttttacctttttttgttgttgttgttctgtgttttcttaacattgtcttctatga

SEQ ID NO: 24877 - DNA, 2300 bp, Homo sapien
agagttcgagttggaggagatcattgaaaattaaatcaaatttatgaagtttctaagtgcgctcctctccctgcctcaccggaatgtccactcccggcgtgcaggataatataaaccgcagggacaatgcaagctccaaaaaataagtgcttggcacatagtaggggattaataaatattcgtttaatcaattactgctaatattcaattaaacattctaaacaaggacggacaaaagtcttcattcctcccctactcaccataaaggagaaagagagggatgtcctcgaagctggacggactcagcttcagcttgcgttacctagccttgcaggagattccttctccaacgagattatttcattggctaaaacgttaggggtgttttgaactctggggtcaaaggaggaagtggttggaaatgtctcaatctcgtgccacaggtgaagtaaacgaatcttcctttccagggaatcacgggttttgggaaaaggttgaggcgagcgggcgtctatgctggacaatgaagaacgaggggcaccgggagatgtgttgcctcctccttcctgtctcctgccccgtgcgtcttgaatgatttagcactggcacctggctccctgattggtgcgagcgtctcgtttagggaaggctctaggagggccggtggatggaattccgagcttcacctggttgtatgccgcccacttcaagcagcgcagagcagctgccggttgagtggtttggggggacgtttcctacgtggagcagacacccccagcctgtccagccccaagcctcagtgcccggggctgcagtcaccgcgcgccccgccgtttaggatgttttttgtgtccttaaaaagtgccggggatttcatcgtcaggtggagacaaggcgacaaaacagtagtttctttagtaccaaaggcaacgcgattatttcaaaccccacagcgagatccctcttgctgatcaggccatgtctgcccagggcggacccttcgatctcccttatggaactctcggtaatttataatatttttgtgtgtgtttccattgtgttgtggtgaaaggcgataaggcattcaaagaaaacggacgggcctccgctgaaccagtgaggccccagacgtgcgcataaataacccctgcgtgctgcaccacctggggagagggggaggaccacggtaaataccagtaaaggaatcactgcctacacggtgtcacccagacacgcacagacatcaacatttttgccctaaagaaaaaaactgggggagaagaaaggggagaacttaaactagtgacagggcggtgagggaaggcatgaagaggcaagccggcgcgtaaccgtctggccagcagctccaggtgtgggctccgctcgggcgctggcggagagacccgggagcgcagggcctctccgtctctgggctcttggcgccctctggtgggaatttctctttcaacgcatttttacggcgaggggcttctcccaacgcagcggttcttttaactacgcctaaatattgcaaagggagaatccttaaagcgcgtgaaatcgaagggggagcgggccagggcaaggggggctggtccgccccttccgggcacctctgtgctcgggtgccccatgcgcgtgcagcggcgctcgtgcgtgtcatcaaccttcaaacgtgattaatcaggaggccttcttttcccatcaccaagggggccaaagcgaggagcgagcgcatagcaaaagggacgcggggtccttttctctgccggtggcactgggtagctgtggccaggtgtggtactttgatggggcccagggctggatgaggaaactgtaattcctccatggtctaagaggtctcccctcatttctgcctcctttgcggttacaacaatcccagctccgtagagagccaacgaggacacgacccaaagcgcgctttcgctcaaggaagcgtcgcagggtcacagatctgggggaaccccggggaaaagcactgaggcaaaaccgccgctcgtctcctacaatatatgggagggggaggggaaatgggagaggggaaaggaggggagggaagaagaaacgctcagaaaggcagaattcttcgtaggaattatcttttccctcctctcacccgacagcctgcctatttccaaaggaaaaaaaaaaagcgtgttgagtacgttctggattactcataagaccttttttttttccttccgggcgcaaaaccgtgagctggatttataatcgccctataaagctccagaggcggtcaggcacctgcagaggagccc

SEQ ID NO: 24878 - DNA, 2300 bp, Homo sapien
ctgcctacacggtgtcacccagacacgcacagacatcaacatttttgccctaaagaaaaaaactgggggagaagaaaggggagaacttaaactagtgacagggcggtgagggaaggcatgaagaggcaagccggcgcgtaaccgtctggccagcagctccaggtgtgggctccgctcgggcgctggcggagagacccgggagcgcagggcctctccgtctctgggctcttggcgccctctggtgggaatttctctttcaacgcatttttacggcgaggggcttctcccaacgcagcggttcttttaactacgcctaaatattgcaaagggagaatccttaaagcgcgtgaaatcgaagggggagcgggccagggcaaggggggctggtccgccccttccgggcacctctgtgctcgggtgccccatgcgcgtgcagcggcgctcgtgcgtgtcatcaaccttcaaacgtgattaatcaggaggccttcttttcccatcaccaagggggccaaagcgaggagcgagcgcatagcaaaagggacgcggggtccttttctctgccggtggcactgggtagctgtggccaggtgtggtactttgatggggcccagggctggatgaggaaactgtaattcctccatggtctaagaggtctcccctcatttctgcctcctttgcggttacaacaatcccagctccgtagagagccaacgaggacacgacccaaagcgcgctttcgctcaaggaagcgtcgcagggtcacagatctgggggaaccccggggaaaagcactgaggcaaaaccgccgctcgtctcctacaatatatgggagggggaggggaaatgggagaggggaaaggaggggagggaagaagaaacgctcagaaaggcagaattcttcgtaggaattatcttttccctcctctcacccgacagcctgcctatttccaaaggaaaaaaaaaaagcgtgttgagtacgttctggattactcataagaccttttttttttccttccgggcgcaaaaccgtgagctggatttataatcgccctataaagctccagaggcggtcaggcacctgcagaggagccccgccgctccgccgactagctgcccccgcgagcaacggcctcgtgatttccccgccgatccggtccccgcctccccactctgcccccgcctaccccggagccgtgcagccgcctctccgaatctctctcttctcctggcgctcgcgtgcgagagggaactagcgagaacgaggaagcagctggaggtgacgccgggcagattacgcctgtcagggccgagccgagcggatcgctgggcgctgtgcagaggaaaggcgggagtgcccggctcgctgtcgcagagccgaggtgggtaagctagcgaccacctggacttcccagcgcccaaccgtggcttttcagccaggtcctctcctcccgcggcttctcaaccaaccccatcccagcgccggccacccaacctcccgaaatgagtgcttcctgcccgccctagtccctgctctccacgggtgcgctgcgcagggacccccccccccccgcctccctcgtcactcttcttatccctgccctccggattcacgccccggggaagcacggaggctgaggctctagttgaagtggggcaagagcgattttcccttgagcttccatgctgcgagcgcctgtccctccaaagggcgcctgggcagcagcagccgaaggcgctactaggaacggtaacctgttacttttccaggggccgtagtcgacccgctgcccgagttgctgtgcgactgcgcgcgcggggctaggagtgaggtcggagggagggtgtggaggcgatggccggtgggcccttctctgtggggtcctcgatctacccagattagcccgcaatctctctgtcccggggccttcgggcgccatcgcgccagcgccgagagtcgagcaggggcgccgcgcaagatctttgtccgccgcctcctgcgcgctgcgcgcaagttcgtttccccggtgacgttccccatgcttacttaccccaccctctctggatctgtaccgcgagaaatctggggtcctcagggggctaggtagaggagaaacgctgaaaccggaccgaaacctcgccctaggcttagcgatggctaaaaaccggctgggataagagggaggcaagcaacattccgactcgctgctttctggctgtctggagtgcaaggtgactgtggttcttctctggccaagtccgagggagaacgtaaagatatgggcctttttccccctctcacc

SEQ ID NO: 24879 - DNA, 2300 bp, Homo sapien
ggagacaggaagcaaggatatgaggaacagtattctaggcagtgcgagtggcaagtgcaaaggccctgaggcaggactgttcttggcaagtgggaggaggatcaaagaggccattggggctggagcaaggtgagagaggtagaagcagactaaggagggagaggcaaacatggagcaggcagggagagcccgcccagggcttctcccacagccaggactctggcttttgttacctctactgtgcctccccaaacttttgtctcagttttgaaagaccagtgtcaacgtgggtgagaccggctctgtgaagtggacaaccccgtaactcggaggataatgtaaaaaatctgggcagggtgtagtggcctgtaatcccagcactttggtaggccaaggagagcagattacttgagctcaggagttcgggaccagcctggccaacatggtgaaacccccgtctctactaaaaatacaaatattagctggcatggtggtgcacacctgtaattctagctacgcaggaggctgaggctggagaatcactagaacctgggaggcagaggtttcagtgaaccgagatcacgccgctgcactcccgcctgagtgacagagcaagactctgtcttaaaaaaaaaagaaaaaaaaaagaactgtggatgagccagcccaatttaactttagatttctcagacaattttaattttctgtctttgagtctaggaaaacttaaaacatttcacactagactttttcttttctaacattttaaatcacataagtcttctaaaggaaattgaattcatattatgtcttattactttccttttgtagcagcaaagaatcatttacttcagacctttaggatatgcagaaaaccatttaagacattttatgagacctaaatataattttttaatgacttggtaaatgatagcaatgagaaatttgattaaattcactaccatttaaatatgacctgacactgatgctttttagtgagctaagcacttagttaactttccttggaatttttcacaggtctctttcacaaaggttttattatacactgaagggaaaagttcttcagaccttcctctcttctccttgaaacagagtgcactaaattattttgttaggtcctttaactaaaggacctaagcacgatgaagaggttgaaagttcacaacaagggtttagctctagggagagcagaggcaggatgattctgagccaattgctctatctaggggaaaagatccttcacaggtattaaaatgcagcacctagctataggccaggcctttgggaaggagtctgcaaaccaatgaggcaagttacccatgttttcatcatcatacattagacttagttgtttctgtaatgccctagctagtgtgctccttaaccatctaattgtgtctgacagaatgatgcagttgctaggagaccatgcttgttaagctatcattgcagcccaaactggcaaaatcactctaatttagcatttaaataattctgctaggtagtcagagtctagagtagtccagtcgagccttgcttttaggtgccactcttgatactgccccataagtgggtagggcagcatcaccagcctataaatgagaagagaaaggcagaaagaagccactgtgtctcctagagagaagcagtctagtggagtggttacaaaaaagggctgtgcacttagaggccctggacttgaatccaggctccaacacttcccaactctgtgactttgggtaatatatttaaccttttggcatgttagtttccccatctaaaacagaggtaataatagtacctaccttatagggttgtggtaaggattatgtgtgccaggcactcttataagcattttatattaagttattttgtcctttattcaattctgtgaggcacacactccccatttaaaagaaactgaggcacataagagttatataatgtgcccaagctaacaaatattagagctaggactcagacttaaacagtttggctccaaagcctgaattcttaaccataccatattgatataatacctgaaagctctcaagacaataagacatataataagttattcataaatgttagctattgttaatagcagttacttctaagatatagtccgtaatgtaatactccgagactgcctgcaaaacatttgtttgctacttgattagtcaattcaggagaataggcatggataatatttactaacttgagttggaatgggtgttttcctcaagagaacagttgcgtctttccaactcctgcacctt

SEQ ID NO: 24880 - DNA, 2300 bp, Homo sapien
accctgggaattaggaaaaaaaagaaaaaaaacccacagattttgatgagacacaaatagtagccacagaggtcacttactaactgattctgaaaaaaaggctttgaagctattcattacacacattcaattcaaatcaataaacactactaccatgttcccaatactcaaccaggaactggggatctcaagatgaaaaaacatgatcggctgggtgtggtggctcacacctataatcccagcactttgggagactgaggtgggagaatcatgtgagcccaggagttcgaaacaagcctggcagcataatgagacgtcgtctctgcaaaaaatcaaaaaaattagctgggtgtggtagtgcgtgcctgtagtcttagctactcgggaggctgaggtagggatgattttgagcccaggaggtggaggctgcagtgagctgtgatcacacccctgcactgcagcctgggagacagagtgagacccatttcacaagaaagaaaggaaaaaaaagaaggaaggaagggagggagcgagggaatgagggaaagagaaagagagaaagaaaagaaagaaagaaagaaagaaagagagagagagagagagaaagaaagagagaaagaaagaaagaagaaaagagagagaaaggaaggaaggaaggaaggaaggaaaaaaaaaatatgatccttgctctgaatgaatggaccacgaatggtggaagacaggcctgtgatgatgacgatgatgtcatagaaatgaaggaactgtttcatggcaaggagagagtcacactgaccttaaggataaataagtaacatttgagatgggacttaaaggattaggattttttcaaagttaggattttttaagtggaaaatgtaaggaagggcattccagaagtagagaatagcatgaataaaatcaagaaggtaagaaagtaaatggcttgtgtggagaataacaagcagccactcatgaggctgaaacatacactacagctctaaggaagggctggacttgcccatggaccaccaacgatccacagcctgggttctataggccgcggctgccatcagacatatgggagacaactggtccaaaaattttgaccactgaacatggcagcagcttccatcataaagagggttataattgccaagcagaatgagaacattataattagatctagttcttccatttattctcttgcattaaatgtattaatttgttgaattagctgctaggcattctggtaaatatcaagaacatagagccaactccactgcagaccctgtccttgaggagcctaataactggagatttcatttatggatttatggatttattaggcctcctaaaaatctgctattcacttaccgatagcaaagaaaattatttttaaattttaaataatattttcttattacaaaagcacttcatgagcatcatagaatatggaaccagccaaaacaaaaaataaaatatctctgtcaccacccagagatcaccactgtaacccttggttcatattctcctcccacatcttcatatgcatacatacatattaatctgtattttgaggacatgtttttcattttgtctacagacacatcccgtcttgtaaccagcttttaaaaaagacaataatttccacgtttccatgtgaataactactcttctaatactcagtacatattcaaatttctccaaatgaaccaaaaatgtcctttacgcttatttctccaagttggcccccaactcaagcccttgcaatgtgtctcttggttatattcttcgggttccttttaatctggcataggccctttcataggactctgactcgacaaagagaactggccagctgtcctgaaggaaggcccacttcctgtatttgcctggttccctgtggtgtcattttacttgctcctcaattccccttacttcctgtaaacatcaaactcaagatgccatagaggcaagttaaccaccttgggctagaatacttcatgggcgatagcacgtactttacattgcatcacataggaatccacataatacctggttgacgcaacatcagtccaactgaccacaaagcaactaggggtttcagagggagtacacgtaaggggcaaaagcagcaacggaatacgacaacggaataagcatgaatacgacctggctacctgaaggaggtaggacggggaaccgagcagcagcaggtggtggaatgccagggaaatccaaccgtgcttcccacgctggcatcgctctgattatgaccaatcctctaatcttattctcac

SEQ ID NO: 24881 - DNA, 2300 bp, Homo sapien
atgatgacgatgatgtcatagaaatgaaggaactgtttcatggcaaggagagagtcacactgaccttaaggataaataagtaacatttgagatgggacttaaaggattaggattttttcaaagttaggattttttaagtggaaaatgtaaggaagggcattccagaagtagagaatagcatgaataaaatcaagaaggtaagaaagtaaatggcttgtgtggagaataacaagcagccactcatgaggctgaaacatacactacagctctaaggaagggctggacttgcccatggaccaccaacgatccacagcctgggttctataggccgcggctgccatcagacatatgggagacaactggtccaaaaattttgaccactgaacatggcagcagcttccatcataaagagggttataattgccaagcagaatgagaacattataattagatctagttcttccatttattctcttgcattaaatgtattaatttgttgaattagctgctaggcattctggtaaatatcaagaacatagagccaactccactgcagaccctgtccttgaggagcctaataactggagatttcatttatggatttatggatttattaggcctcctaaaaatctgctattcacttaccgatagcaaagaaaattatttttaaattttaaataatattttcttattacaaaagcacttcatgagcatcatagaatatggaaccagccaaaacaaaaaataaaatatctctgtcaccacccagagatcaccactgtaacccttggttcatattctcctcccacatcttcatatgcatacatacatattaatctgtattttgaggacatgtttttcattttgtctacagacacatcccgtcttgtaaccagcttttaaaaaagacaataatttccacgtttccatgtgaataactactcttctaatactcagtacatattcaaatttctccaaatgaaccaaaaatgtcctttacgcttatttctccaagttggcccccaactcaagcccttgcaatgtgtctcttggttatattcttcgggttccttttaatctggcataggccctttcataggactctgactcgacaaagagaactggccagctgtcctgaaggaaggcccacttcctgtatttgcctggttccctgtggtgtcattttacttgctcctcaattccccttacttcctgtaaacatcaaactcaagatgccatagaggcaagttaaccaccttgggctagaatacttcatgggcgatagcacgtactttacattgcatcacataggaatccacataatacctggttgacgcaacatcagtccaactgaccacaaagcaactaggggtttcagagggagtacacgtaaggggcaaaagcagcaacggaatacgacaacggaataagcatgaatacgacctggctacctgaaggaggtaggacggggaaccgagcagcagcaggtggtggaatgccagggaaatccaaccgtgcttcccacgctggcatcgctctgattatgaccaatcctctaatcttattctcacaattagggaggaagaaaaaaaaacaaacccaaaccaaaaaagaagttggtaggtgactctgtgagactactgttttataaagggagcgtttccttttataaaatttagctgagcagatgctaggcagcccacaggaggccactattcccctcagctgtacagtttgggaaaatacctacacacccggagaacagagagcttggtgtgtgttgagttcgctcctgttcatcagcagccctttccccgcctctggccaccagggggacctgcaaccaagtatgtgttctttcaggcgagcgggaacgcgtctgcataaatctagtccaatccagggccccgtagcaaggcgccaaagctgggggaagcgcatttctgttctctcgcgagcacgacgcggtgcctcccagtcctcctccggccctccctctccgccctcccggcccgcgagcgctcgggccccttccagtggctcgcggcaggtggcgctgtctgcggcgtcgcagcggcccgggctgcagcagagacgatctcccggcgggctgtgcggcccggctctccggcggcagcgagtgccacgtcccaagtgctacgcggaggattagagcaggcggtgcgctgggggcgggagcagcgcggagcccggctcggccacaccgatcgcccgccgccatgggctcctcgcaaagcgtcgagatcccgggcgggggcaccgagggctaccacgttctg

SEQ ID NO: 24882 - DNA, 2300 bp, Homo sapien
gcataagccataattatagaaaagcctagaatttggaaacattccacatgttttcaaaagttctaatcccatgctgggaaaaggataacttagttgctgcaggcaggaaaagcttccgtttgctcacagtatctttacccacactacctgagattctccagctgaatgtttcgccacaagtattctaacttgttgcagtttgagaaaagtaagatagatgtgtcatccaagagtctggcctatatggggcaatacttgatcaaattatcattgtccattgcccaggtttgtaaatgcccagaaataggatctattcgaggcattcaaaatttattcattacaagaggcacttcctcatataaactacatttgcagagaagctgctatatttgaatgacaaattttcagtttgcaatagaaaaataccccctctctagttagaagaatactcaggtcagattagtaccacaagagtgcctgctgagcatggaatcaaactggaggaagagattctgtggacagtgaagaccaacagcaaagaacatcacatattctttcatttttaattatgttaactaaatttggctacattctttggaagacattttttcttttgatgtgtttaatactgtcagttggccattgcattagctaggcccatacagaacattttcgtcagtctgcctctgaccatgcatttggtctttttgtgcttctgtttttattccttcctcagaggctgaccacatttcatttattaaatcttatttctcttaatttcattcttaggctgtctttaagtttgcccagggtcttgctgttgcctcaagtgcattgtctattaccacttaattactttgaccaataagcaccttgttttcaaatgtagctacctctgaaaggccataattgatcactataaattatttaatctttatttctctaaatcccagtccagtgagaattgcagggttttgtttgtttgtttggagacagcgtcttgctctctgggctggagcacaatcatagttcactgcagcctttaactcctgggctcaagctgtcctcccgcctcagcttcctgagtacctgggactacaggtgtacacactgtacttggctaatttagaaactcttttttagagatggggccttgctttgtttcccaggctagtcttgaactcttcgcttcaagcaatcttcccaccttggcctcccaaagtcctgagattataggtgtgatcttccatgcctggccgaattgcagttttgattgtgagggaagaagggaagaaggaacaaataattgtgagatgaagcatcattgtgcatatcagactggtaaaggaggagctaggcctggcatggtggctcacgcctgtagtactaccgctttgggaggctgaggcgggtggatcacttgaactcaggagttcagtaccagcctgggcaacctgaagaaccgttgtctctacaaaaaatacaaaaattagccagatgtggtggcatgcacctatagtcccagctactcaggaggctcaggcgggaggattgcttgagcccaggaggcagaggtcgcagtgagccaagatcatgccactgtgctacagcctgggcaacagaataataaattgtcttaataaataaataaataaataaataaataaaattaaaaaggctgaagttggctactgcctgctcacccagcttttggtggcagtggagataatagatgatgtggcaggagaagggcacagaggtattcatgcatggcctactctgaaattgtcaagttgtttgggaaataaaagacatcatgatggaaacataagttggaacctgattatggagagccttaaataccacggtcaggacttccgatatattttgagcagttgaggctgtgataattgtatcagtaaggggttttgggttcaaatggtaaaaactagctgtcaccatcataagcagataacatacttaatgatatggattagctcatataatcaaggaaacagctgaagaaccagatgtagaaaggacaggactcagaaaacctagggatttagataggaagaagtatttggcaatgtcatcagcattcattctactaaacccatttttgttttttctctgactcccaaggtttgcagccatgggcaagagaaattggcctggctttgaccatgagccattcccttggtttgggcagggcagacactctgattgacaatcctaccagcactgcacacaacagcagagaagtaattccccaaagggaggaaagagaaaggaatgtt

SEQ ID NO: 24883 - DNA, 2300 bp, Homo sapien
ggccaacatggtgaaaccccatctctactaaaaatacaaagttagctggatgtagtggcacgtgcctgtaattccagctactcaggaggttgaggcaggagaatcatttgaacccgggaggcggaggctgcagtgagccgagatggcactccagcctgggcaaaacagagtaagactctgtctcaaaaacaaaaaacaaaaaacaaaaccaaagccagacaagagtacaaattgactgtatggcctgcatttatctaaaattctatgaaatggaaagctacccatatgacagaaagatctgtggttggagagaatggaagtagtgtggaggaggaaccacaaagaggaaactttggagggtgatagatacattcaccatcttccttgtagaagtggtttcagggaggtatacacatcaaaacttatcaaattgtacactttatttttatttttttgagacagagtctaggagtctcgctctgtcgcccaggctggagtgcaacgttgcgatctaggcttaccgcaacttctgcctcccgggttcaagcgattctcctgcctcagcctcccgagtagctgggacttcaggcgcgtgccgctacacccggctaatttttgtattttaagtagagatggggtttcaccatgttggccaggctggtctcaaactcctgacctcgtgatccgcccacctcggcctcccaaagtgctggggttacaggcgtgagccaccgcacctggccaataattgtacactttaaatatgtgcagtttattttgtcaattatacctcaataaagttgtttgtgagatgtccctcttaagtttgaaaagcagacaagactaaaaactcactgaagtatctaaagcacaaggcaactacaattacttctggagataactgacaatcaaggttcttttctagtatgatagtttatctgaacaaaacattactatgagaaatgcgaagtcataaaaataaaaaatagaaacgacatttttgtccccctggtaatcatgccatttcctcttgtctgtgcagtagcgctatatcataatctttttagtgctctattcaatttggttttctaaagagagaaataaccttgttgtacttttcctgaactagagtgctcttttatgtacaagaagcccaatccctggtgtgagtatacttgtgtgggtctgtagaaagctacactctatctataaattttagcaaatgctgttatttattttgggatttttgtagtcgggactcagcggagacactagaaacaaattataagtttctagaaaccataccttctgcaagatgaacgctgtatagttttcctaaatatgtgattcagtaatcacatttttcatttagattttccacttactgttttaaaacaaagaattgctataccatacagtctacaaaactggtaattttcaatttcctcattaaagattcttcactcttttttagaaaacacgagaaagttttatttcccaactctcccactacccatgtttattttcatagctcttttattcggtcattattcccattctgcagacggggaggcgcacatacgtttttctgcacagtacagaggggcaagaaagaaggaactctcaacttttcagttccattttgagaaacgatcacattgaactcccgagaagcggcagctgagcgagagcagcagcatttctccccgtgttgggtgtgggtcaggagagaggcgcgcttccgcgggagacagggggagtcaggtggcagcggcgctggagcccgagcggcgcggcgggggcgcgcctccctccggccggcgcggggacgctgcccccgcgcacgcgagtccggcaaccccgggctcccgcgccgcgcggcgatccgcgggtgcggcaggggcgccccggcgctctagtctcttccctcgcgcgctcgctccttccccatgcccccaccccccagcccctggcaggtccctcccccaagcctgctcccgcggccgccgctgccgccgccgccgccgccgccgctaccggaggcgcaggagcctcgcgatagtgtttgcacaggcggcgcgtgacgccgccgccgcctgtaactgatgcagaggttaccccaccgcctcagccgccacccacagcccgccgccgccgcctcccgggcgacgccgggggccgacgcactgcagaggtgccggcaggttccgcccgcggaagtgtcctcggccggcgcagcccgcgctccgcccgcgctccgaccccggcccggctggcaccccctcgacgcctccgccgcc

SEQ ID NO: 24884 - DNA, 2300 bp, Homo sapien
atagaaagcaaaagcaaatgggaacacgagaaaattttagaaatccagagtcatagtagaagattttagtgcctctatccaaaactgatagattaaagggtcaaaaaatcagtaaacttctagagaattcgaaccacacaattatcaatttcatatataaatagtaccctaccaccaataatataatatgcaatattatgttcactttttaagcgtgcatgaattttttaaaaaatgaattacatactgggccataaaagaagagaaataccaaaaattggtatattatctctgaaaaaatgtaatataattgaaaatgaattattaaaaagatgctaaataaaaccttaatgtttataaaaactaaaaagtacacttttaaataatttacttttcaaataaaataagttagaaataaaaacatgttgaactaaatgacagtaaaatgactacttattaaaatttggatacagctaggagagttaaagccttaaatgtaggtacatcagcatttaaaagtattaaaaatctgtaagatcaatattcatctaaggaagttagaaaaggagcaacagagtgcattcaaaaatggtagcaggaagaagaaagaaaaacaaaagtagaaattaataaaataaaaaataaacaataaagataaatcttatgttttgaaagactaataaaatagagaagtgtctggtgacaaaccaaaatatacaggaggcacaattaatcatattaggaatgaaagaagctcataattacagatgaagggaaatttaaaccacagaaattattatgttgagtaacattaaattgctgatattcaaccttttgactttgcaaaactgcaatttgatgttaatatgaacaatcatagtcctaacatttgaaaatataaagtgaataatttttcagataaatgacaaaaattcaccaaagaggaaattttaaaactttaatatacttataatcattaaagaaattgaattatagtaaaaaaaagtttccccaaacagcatcactcaatttacaacccagtgttagcaaaccttcaagaaataacagtttatacctaccttattgtcttccaaagaatagaaagatagagaaaagaaatcattggttcatttcaaagtatcaatcttagagaaattctcacacatgtgtataatgataggaagataacatccaaggatgttcataatcagaaagtttataatatccaaaatcataaatcactaaatgtctttcaataaagaaacatataagtaaattatgggatattcataccatagtcaaaataaataaatcagaggtatatgtatcagcacagaaaaatcttttttctttttttttttttccttttttttggagtcttgctcttgttgcccaggctggagggcaatggcaccatctcggctcaccgcaacctccacctcccgggttcaagtgattctcctgcctcagcctcccaagtagctgggattacaggtatgtaccaccatgcccagctaattttgtattttcactagagacagggtttctccctgttgtcaggctggtctcaaactcctgacctcaggtgatccgcccaccttggcctcctaaagtgctgggattacaggcgtgagccaccacacccagcctgaaaaatctttaactattaaagatcagttaaaaaacaagttgcaaaagaaaatgtacaaggtgatatcatttataaaaatattttcatcttataaaggtggtatttgtataaaaataactacaagttccttgtggatatagaggtagtaaaagtatgaaacatacatgacagtgacactgaggatagttactatatctggggatgaagggaagtagatgggaggggcttaaggagggaatttcaatatctgtcactgtttatttgtgagggttaaagtaaatacttgtagtgggtggaatggtggtcctccaaaagctatgtccaccaaaagcctgcgaatatgaccctatttggaaaaagggtctttgcagatataatcaagttaagggttttgagatgagatcatactgggttagggcgggctctcaatgcaatgatcagtgtcctagaagagaagagagggagaaggcacactgaggaatgccaaggactgccagcagcaccagaagctaggagagaggcacagaacagactcctagcttctcctaggctccctctgagcctccaggaagaaccaatcccggtgacatcttgattttggacttctggcatcagaactgtgagagaataaatttctgttatttttaag

SEQ ID NO: 24885 - DNA, 2300 bp, Homo sapien
gtataggaggaactgtgacaccagaggaatttggcttgggttacctcactttctaggttcccaagattcccaagttaaggaagctttggttattacatagttgaacattttcttatttcatgtaagttttgtaaatcttctgtgatttcttctcctctttggcacatttacattaaattttattctagttatgtaactgtatagtataattatgtttatatatggatataaattgctctgttcatcctactttggggaatttattcatagtttgctatgaggtcagtaactttccgaagagacaggctttctaaacttgaagcctatacttttatatattaatgcatttttttttacattagaagatagttaacctaagaaagttgaatgataagtagaatgaaagtagaaagcactgactgacaaaacaaagatcttcagtacatcagggatgagtgttgtctttcttaaggacttaatctgtaatataaaatgtcaaatcaaataccatattcggccaggcgcagtggctcacgcctgtaatctcaacactttgggaggccgaggcgggtggatcacctgaggtcaggagttcgagcccagcatggacaacatggtgaaacccatctctaattgtgcaaggaaattagctgggcatggtggcgtgcacctgtaatcccagctactcaggaggctgaggcaagagaatcgcttgaacccaggaggcagaggttgcagtgagccgaggtcatgccaccacactccagcctgggcaacaagaacgaaactccatctcaaaaaaaaaacaaaaaaaaaaaaaaccagaacaacaaataccatattcatggtggtacagacaaagactaagctattggcatagacaaggtccaattgaggaagcacactctgtcactggtgatgaggaatccagagttggtcattcccctaaagctcagtcaggagcagtcacctgcagggaaggctaccagcagaagccagcagcactgtgaccttatggaaagtggacagtgttcacaggcacattaggtaaatactgcttcagtgacccaaagaaaaatgcaaaatcacagaagattgtagcaagagtgacttatgactgaatctcagagaactgaactgtaggcttaactatcccctgcctgagctcagagaaagaacccaagaaagagccctagctgagctttggaaataggaaagctagaggccaggagcttttttctgcttacctgaaacaccatttcaggtgtttttgtagcacagaaatggctactaaaagtattagggtgcagaaaacaatggtccaaatgatggtgcttcagcatgctgagcacactgaactaaaggaaattaaaaggccatcaaagctgcctcagaaccaaggagtcggccaggcgtggtggctcatgcctgtaatcccagcactttgggaggcgagttgggcagatcacttgaggtcaggacttcgagaccagcctgaccaacatgtagaaatcccatctctactaaaaatgcaaaattagccaggtgtggtggcgcatgcctgtgatgccagctactcaggaggctgaggcaggagaattgcttgaacccaggaggtagaggttgcagtgagtcgagatcacgccattgcactccagcctgggcaacaagagtgaaactccatctcaaaaaaaaaacaaaaaacaagtactcttggtttctccaccccacatcaagcacaggaaggggttctctgtggaagtttccttatctgactgagtagacttcttccaaaagaaatgctgttggcctaaaaccgcctccctaggaaatctcattcaataaccagggaagattaactaccataagagattaaaagtcacctagcccagaccgacttttcatctgtttttctgagggcagttcgaagaggttacctgggagaccttatccacataataagacaacctttgtttacaatgaagttctgcctcttgccttcctaaaatttgttgccacctctcacagagcacaaaaaactttgtcccggccattatctgttctctggtcccattcagttttcaaagagaatcatttacaaactactctctgctctttgggtccactcagttctcctaaaaatcattcactgcctgtgttagtttgttctcacactgctaataaagacatacccggccagacatggtctgtcacacctacaatcccagcattttgcaaggcagaggcgggcggatcacccgaggtcaggaatttgaacctctacctcccgggttcaagca

SEQ ID NO: 24886 - DNA, 2300 bp, Homo sapien
ataagcattcaattaagttagtattatgtcaagtaattttgagaaaatgtaacttgacattttttgcaagtaaaaaaaattgtttatttgtttaggcttagtaaaccagttcccaaacacagtcagactcttcccattgtcatctgattgcagagagaaagcacaccttatttccagggaaagctacaacaagcccaaggtcaaagtgtattattttttgtcttgttgttgtctattttctcccaatttttttttgaaattcagaggctcatatctgaaatagaattttagttcctctttcctttcctaaaattggggaagtacagcccatgctgacattattttcaggctattcttagatatacaagttgttaggccaggtgcaatggctcgcacctgtaatcccagcactttggggggctgaggcaggcagatcggttgagctcaggagttcaagaccagcctggacaacatggcaaaaccctgtctctcccaagaatacaaaaattagccaggcatggtggcacacacctgtggtcccagctactcaggagactgaggtgggaggatcgcttgagcctcggaggcggaggttgcagtgagctgagattgtaccactgcgctccaaactgggtgacatggtgagaccttgtctccaaaaaaaaaaaaaaaaaaaaaaaaggtatgtaagctgacaagctcttgtatcaagggcttttgaaccagagcaacttcatcttgaatagggactgtgtaaaatgaagctgagacctactaggctgcaatcccaggaggttaagacattcttagtcacaggatgagataggaagtcagtacaagatacaggtcatacagaccttgctgataaaacaggttgcagtgaagaagccggccaaatgccaccaaaaccaagatggcaatgagagtgtcctctggctgtcctcactgctacactcccaccagtgccatgatagtttacaaatgccatggcaacatcaggaagttacccatatggtctacaaaggggaggcctgaataatccaccccttgtgtagcatataatcaagaaataaccttaaaaatgggcaaccagtagcccttggggctgctctgcctatggagtagccattctttatgttttactttttttttttttttttttttgagatggagtcttgctctggcacccaggctggagtgcagtggcgtgatctcagctcactgccagctccacctcccgggttcacgccattctcttgcttcagcctcctgagtagctgggactacaagcacccaccaccatgcccagctaattttttttttttttgtatttttagtagagacggggtttcaccatgttagccaggatggtctcaatctcctgaccttgtgatccgcccgcctcggcctcccaaagtgctgggattacaggtgtgagccaccgcgcccagcctattctttacttaaacttgttttcactttgctgtatggactcaattctttcttgcacaagatccaagaatcctctcttggcgtctggatccagaccctttctggtatcagtggtaagctctgtttaagacaactgtcatacccaagagaattcttaaattgtggcagttaaaaatgtatttatcccctcgagggccgggcgcagtcgctcaagcccgtaatcccagcactttgggaggccgaggaggcggatcatgaggtcaggagttcaagaccagcctgaccaacactgtgaaaccctgtctctactaaaaatacaaaaaaaattagccaggcgtggtggtgggcacctgtaatcccagctactcgggaggctgaggcaggagaatcacttgaacccgggaggcagaggttgcagtgagccgagatgacaccactgccctccagcctgggtgacagttgttagactgcgtatcaaaaaaaaaaaaaaaaatttatttactcccttgcttcaaaaaggacataagttggcttgcaaatcacattttgtagaaatgaagtttttaagattagtctcatactcattacataatatttattgactacttacatattgagtgctaaattcagtggaataatatgaacaataaagacccagccttgtttatgctcttcagggagcataaatagagtacagctggcaaaacaaaatgtgcatatcccaaacctgtaaatcatgatctaagacaatatacaaacactcaaatagggaacttaccagctagcagactttgattatgaaccacagaacctagaataaataaatactctcttgaaagaaccatcat

SEQ ID NO: 24887 - DNA, 2300 bp, Homo sapien
atttcccaggttgcctaacagtacagcttagttggagctcaatacatattgcctgattaatatctctcattcccccacttgctagttgtatttttcacctctgcttctcccttcagcttataattgcaagctcttggttcctcactccctaactctttcttcttagctctgtctttctttgcctcatacctatgttttagaaattactgtagctcaataacctcagataattaattcatcttttaaaggcaaccagtgattagccttccaaaggaattattagactttttttttctgcttaagaaattatgttttactacttttagagagtgtaggattaatgttttacattttcagaatattttaccataattagacctctgaaatggagaggtcatatcattctccaaggatcatttaattcatagacccctgccaagagagtgcttggtggtgtggtggtagtagtgatatttacacctgtttgctgggagaagagccaaggtagtcagctgattttacagaaaggttctggaaagtcactgggtggtcacaagacatcaccttgggctgctgatacagtgggaattccatcttagaggtcatgctgccaccgtggcaggacacatggcatatggcacatgctttcctttagctcgtagactgttctatatcttatgggtatgtggtaactactgcccaaaggtagactgcagaccttttataatgagctagacataccagtgtccagaaaagcattttgaactatatggaagttttttggtttttgttttgttttgttttgttttgttttgttttgttttagaggactatgttagtttttaagctcctggaaggcaaaaacaatctcctttaataataatagtgatgataataatagcaacaacaattataataatgactaacatttattgagtgcttactctgaatcaggcacctttctggaaactttagctataagaatccattcacttcaaacaaccatcttagatgccatgtttatctctttttttaaagatgagggaattgaattaaagaagagattaagcaactagcccaaggtcatgcaactatgtagtaaagctgagactcaaaccttaggcagtcttgttccaaagcccctgcccttaaccattagccacatagtgctgagtgtttactgagaacatttcaaatacatttcaaacacccagcaaattacaagtcacaattatatggatttaatcagaaaaaaacaggggaacatgctgaagtaaagtgctatttttatgtttgacagatgagaaaagaccaagcagtatgagttttaactttgattcagtactggttagcttttcataacaaaatcctattaatcatactttaacttatttggatagatcttaaattgaatgcaaatccctagtgccatagaatgagtgaattatatgttatcatagttattcatcaatgagttgcctttaagaatataatctgaggccaggtgcggtggctcactcctgtaatcccagcactttgggagtccaaggtgggtggatcacctgaggtcaggagttcaagaccagccttaccaacatggtgaaaccctgtctctactaaaaatacaaaattagccggccgtggtagcacatgcctgtaatcccagctacttgggaggctgaggcaggagaattgcttgaacccaggaggcggagactgcagtgagccgagattgcaccattgcactccagcctgggcaacaagagcgaaactctggggtctcaaaaaaaaaaaagaaaagaaaaaaaaagagtataacctgcacctgggtcagattttgctaaatgcatatttatttagctaaataaattccatatttatttagaggttcaccttgcttggaatgcttcttgagtcagattagaagtcttaatgatatgcttcaaggcccacctttttatcctgccatataccagtttgggctctcaggattagtgctacttctcatccctggcatgtgactcccacttctaaactcttcaaccatttccccttctcctcacttaacaatacatcctcctccttcagaaattttaagacttatacctcagggtgctgaccctcttgacacccctgtagaagttgtataaaaccaattatgtccccaactagactataaaacccatgagagccaggaccatccttactgtttaatgacatgctgacctctttctgtagttcagacatggtactaagcaacatgatgcaaggattatttgataccagcatacacagtataa

SEQ ID NO: 24888 - DNA, 2300 bp, Homo sapien
ggagtggcccagtgggccagttgtgcagggcacctcctgtggcaagcccagcccgagcaaggcctgggtaggtctccagctgcggaggtctccagtggcaaagcaacgtcaaaaaaaaaaaatcctgtgtcacaagtaaggcagaaattaagagactacttaataatgtgataaaaaatggtgaggccctaaattacttaggtgaaatgaagatgagatggataagagtctaaaggacttggttgtgggtgaggaacagcaaggcatccaggatgactctcccttggtgacgacttggtggtgaaataaaggccacaagaaagaagacaaacaagtgggggcaaagaggaaagagaaatgagagagttgatgaattcaattcagaaatgatttgaatttcatttaagccaaagaaaacccagttatcttttctgggttccagttttctcagtgacagctgcattcatgaattaccaaattaactattgtagcactctctaaaaatatacaaagcactctaccgtatgctgtaaataagtcatgaaaaatcagcaaaagctcgagccctgaaggaaattcagcagggttaaaaagagatatggccaatgtttactaaacacttaaactgtgacccaacacactcacccagtactgtaagtactcacttaatgtcatcaacagatttttggaaactgactgtaagcaaaatgacatataacaaaaccatttttaccataggccaattgatataaacaaaagttaagttcctataacatatttctggtcacaaaaacatcaccaaactcctaaatacaaaccaaaacacttctaatattaaacattgaaataaatgggagctatacatacatttaaggaagattaataaaaacaagtaagatagttatttacctaattattccagttcagggtcgagggtggctgaagcctatcccctcagctcagggtgcaaggtgggaaccaacccttggacacgacgacattccatcgcagggagcactcacactcacactcagacaggaaacacagacaaggccaattcatccagcctgcactgagatgtgggaggcagtaccctggggtacctggtgaaaacccatgcagacgtggggagaaggggcaagatccacacaaacagtagccccggtaggaaattattattttttctcatcaagttatacaaaatgacactgaacgaaaaaatgcgattcaaggacctgctgtactgtactttttgctctgccagtcaggtgcgatcgctggctttctttgagcacctatgaacaagaggtagcatgcccaagtccacgtgggagatacagcggccccacccttaagggacttagagcatggcggtgggacacatgtggtgcaagcttgctgaaagtttagtgtgctgggaactttgaacatacaggcagggctagttaacaaagtatatcttttacttagagacatcgacgaggaatatcttaggccgtccaataagaatgtaagcatttcatattttattccctataaagaaaaaagaatggaggcgagaggaaatgaaatgaagcaattatcgcaaaaccagtcagtgtccccgcaggccacccaaggacaagcctccgggaaagagtaactcaatcccagtttggagggtgaaactaagagtgaatgggaagccagcatcttcctaatacaaaagcacagtttaccgtccccctcagccaacatgcggctgaagggaaagccgcggggcgtacctttagcacgggacgctgctttggggggatcgccctcgacacagcgcccctcccggcacctggccagaacctcccagggcgaaggtcggggccgagaagcttgtgagtaccggggcagtgagggagggatccctaagtgcagggcgcacacacggggcggagacctggaggcggcagcaccgcgcccccagggctctgcccagctagccactcgcagcacagagaagcgcgcccgcaagacagcgcagcctccgcgggccggaggaggcggggccgcggcaggcagaggcagggccgggcaagccctcgctccccgccgcctgacgggaattgtagttcctgggagaagccgggctgcctcacgaggcactaggaactacatttcccggtgagagagcggctccggccggccgcgcggtaccggagcgtcgcactgtcagcggccagagagcctggggcagatcgaaaagggagtgcttcttcccttctctccgcgctctggcggtgcaagcggctctgctttccctcgccccg

SEQ ID NO: 24889 - DNA, 2300 bp, Homo sapien
agcaacgtcaaaaaaaaaaaatcctgtgtcacaagtaaggcagaaattaagagactacttaataatgtgataaaaaatggtgaggccctaaattacttaggtgaaatgaagatgagatggataagagtctaaaggacttggttgtgggtgaggaacagcaaggcatccaggatgactctcccttggtgacgacttggtggtgaaataaaggccacaagaaagaagacaaacaagtgggggcaaagaggaaagagaaatgagagagttgatgaattcaattcagaaatgatttgaatttcatttaagccaaagaaaacccagttatcttttctgggttccagttttctcagtgacagctgcattcatgaattaccaaattaactattgtagcactctctaaaaatatacaaagcactctaccgtatgctgtaaataagtcatgaaaaatcagcaaaagctcgagccctgaaggaaattcagcagggttaaaaagagatatggccaatgtttactaaacacttaaactgtgacccaacacactcacccagtactgtaagtactcacttaatgtcatcaacagatttttggaaactgactgtaagcaaaatgacatataacaaaaccatttttaccataggccaattgatataaacaaaagttaagttcctataacatatttctggtcacaaaaacatcaccaaactcctaaatacaaaccaaaacacttctaatattaaacattgaaataaatgggagctatacatacatttaaggaagattaataaaaacaagtaagatagttatttacctaattattccagttcagggtcgagggtggctgaagcctatcccctcagctcagggtgcaaggtgggaaccaacccttggacacgacgacattccatcgcagggagcactcacactcacactcagacaggaaacacagacaaggccaattcatccagcctgcactgagatgtgggaggcagtaccctggggtacctggtgaaaacccatgcagacgtggggagaaggggcaagatccacacaaacagtagccccggtaggaaattattattttttctcatcaagttatacaaaatgacactgaacgaaaaaatgcgattcaaggacctgctgtactgtactttttgctctgccagtcaggtgcgatcgctggctttctttgagcacctatgaacaagaggtagcatgcccaagtccacgtgggagatacagcggccccacccttaagggacttagagcatggcggtgggacacatgtggtgcaagcttgctgaaagtttagtgtgctgggaactttgaacatacaggcagggctagttaacaaagtatatcttttacttagagacatcgacgaggaatatcttaggccgtccaataagaatgtaagcatttcatattttattccctataaagaaaaaagaatggaggcgagaggaaatgaaatgaagcaattatcgcaaaaccagtcagtgtccccgcaggccacccaaggacaagcctccgggaaagagtaactcaatcccagtttggagggtgaaactaagagtgaatgggaagccagcatcttcctaatacaaaagcacagtttaccgtccccctcagccaacatgcggctgaagggaaagccgcggggcgtacctttagcacgggacgctgctttggggggatcgccctcgacacagcgcccctcccggcacctggccagaacctcccagggcgaaggtcggggccgagaagcttgtgagtaccggggcagtgagggagggatccctaagtgcagggcgcacacacggggcggagacctggaggcggcagcaccgcgcccccagggctctgcccagctagccactcgcagcacagagaagcgcgcccgcaagacagcgcagcctccgcgggccggaggaggcggggccgcggcaggcagaggcagggccgggcaagccctcgctccccgccgcctgacgggaattgtagttcctgggagaagccgggctgcctcacgaggcactaggaactacatttcccggtgagagagcggctccggccggccgcgcggtaccggagcgtcgcactgtcagcggccagagagcctggggcagatcgaaaagggagtgcttcttcccttctctccgcgctctggcggtgcaagcggctctgctttccctcgccccgccgtcgggtgctccctgcccgcctccccgtgtcagctttccctgggccccgccgggaaagtctgggcctcgaaattcgaaggcagcggcggctgcccagca

SEQ ID NO: 24890 - DNA, 2300 bp, Homo sapien
cgtaaaatgtggtaattgatacaatgcaatattattcaactttataaaggaattctgatgcatgtgacaacatggatgaaccttgaaaacacgcaaagtgaaaaagccagttacaaaagaccatatattatatgattccatttatatgaaaagtacagaataggtgaatctacagacagaaaacagactagtggttgcttagggctgagggtaatggtggtactgaggtgactgcttaaaggtacatggttctgttttgaagtgatgaaaatgctctaaaattaactgtggtagtgattacatgtatctgtgaatgcattaaatattattgaactgtacactttaaatgggtaaatatatggtatgtgaattatatcctaataaagcctataaaaaaagctcatttttttaaaaatgcaaactgatgtatgtttagaatatgctttaaaagaggtcatgcaaaaggaaaagtgggttagataaagcaaatgtggcaaatcttgatagtttttgaatctgggtaatgagtatatggggatgcattgtggctttccttcccccctcatgttggacagttgtggatgaggctgactgttaaacattttggatctctaaatactaggcttttgtttgaaaaaatttctctaaaaaaaaaaaaaaaaggcaagtacttccaaaacacaatccatcaattctccaaagcagcatctaattatttgattggcaactggatttcttgactgtggtataagtagactaaacactaaacagtactctgaacaatctgtggttttgcctgcactgtagttttgctttaagttggtatttacaaaaatgacacctgcaactttagatttaacaagattttaaaattacatgcattttttactgcctagtcttatttcggacccatttttttcattctatttcactaggcactaatgtaggcatgtggttctatacaaattatagttaagatcaacagtgaggtgaattacagcaaaattatcaataaaaagttacctgctgacacagcgccgataattgtcaaaatatattcttcctctctcataggctataggtgacctggaatgagttgtccagacattcttaaatttagtactttcctaaaagacataaagaatttccgttcaggaaagaactcttaggctttaagttagattttaaattttcaaagcaacataatgtcacctatattattttaaaactttttgcatccttcctccactctgccctcatgttttggcttaatgaggtgaccaacttttagaataattgtttccaggtaagacataagaagcgtaaaactaaaagcagctggtggccctattaccacctatcccagattccgggcttgtatcctcctccccatcacatgtgaccctataaagggaggccccagcgcgttaaaaccgcatccccgcaggaggctcggccgccgcgcgcccgcggccctccgtcccgccccggccggctggcggtcacctggcacaccagcgcccgcaggatgcccaggttggtcctctgcaccacgcctgcgtcgcgcgagaagcagcccagcgcccggcgactcagccggctgcacacgttgggcttccgggtcgggcccatggaggcgcgggccgggccctgggtaggctgggccgccgagtggcgcgccccacactcccgtgctgggcagccgccgctgccttcgaatttcgaggcccagactttcccggcggggcccagggaaagctgacacggggaggcgggcagggagcacccgacggcggggcgagggaaagcagagccgcttgcaccgccagagcgcggagagaagggaagaagcactcccttttcgatctgccccaggctctctggccgctgacagtgcgacgctccggtaccgcgcggccggccggagccgctctctcaccgggaaatgtagttcctagtgcctcgtgaggcagcccggcttctcccaggaactacaattcccgtcaggcggcggggagcgagggcttgcccggccctgcctctgcctgccgcggccccgcctcctccggcccgcggaggctgcgctgtcttgcgggcgcgcttctctgtgctgcgagtggctagctgggcagagccctgggggcgcggtgctgccgcctccaggtctccgccccgtgtgtgcgccctgcacttagggatccctccctcactgccccggtactcacaagcttctcggccccgaccttcgccctgggaggttctggccaggtgccgggaggggcgctgtgtcgagggcgatc

SEQ ID NO: 24891 - DNA, 2300 bp, Homo sapien
tagcattagataatgctgacattgtttttgtccagtggagaagggtgaggataatgttggaaagagggcagggagcaagcttcacttcatcaaggaggggctttggttcaaattggtttgggtgggcgggcactttgaaaatccatttgtcacactaaacggcaagtccaggtccaggaggttcctgtcttccctctctcaagagcaaactgcaagtagtttcattgcaggataaggccaagcccaccgctgcccatgctgtttttgttttgtttccagacagagtctagctgtcaccaggctgcagtgcagtggtgcgatcatacctctcctgagctcaagtgattctcttgcctccacctcccaaagccctgggattacagctgtgagacacctcatggggacccggtttactgggttttttttgttttttgttttttgtttttttttgagacagagtctcactttgtcacccaagctgaagtgcagtggtgcaacctcagctcactgcagcctcgaccttctgggctcaagtgatcctccttcctcagtcccccaagtagctggggctacaggtgcatgcatttgtattttcagtagagacagggtttcaccttgttgcccaggctgttctcaaactcctggactcaagtgatctgcccgccttagcctcccaaagtgctaagattacaggtgtgaggcactgcgcctggcctttactgttaacttaaaacaaaaaattataaatttgaaaaaagaggagactttatttcttataaaaggttatagcctgcaaggaggccattccataggctgataaacatagcctctggcctaagaccagagacaggcacttggaaggcagaggggttggggtaggagctttatgctgaacagtttggccaaacatacatacgtaacaggttacaggaggagctatgaatattaatggaggtggtccttacacatgcatattgaacaaacatgcatgtaacatgttctctttggggtggagacttaacatttaattgtattacttcaaatacatttaaatgtattacttcaaacctacacttcaaaaggtcttttcaggacgtgaatgcatacaagtgcacaatccctgtacactggccagaaccggtccatggtcggtcttcttatcatgaaaaagttcctgaaatcagcccagtgaaagctgtagttctggctggtgcaacaggggttcagctggtcagcatctgtgaactgattaagttgtaattgttttaatattgcttatctcaagccagtgcttgtttagcctctagaggaaaagaaaacctttgtggcagttagaccatagtttatttcttaagtgtaggagtgtgtgacttaggtcctttttataatttgatgtcttattgctacaaagagtctgttctgtccgccttatgatttctattttaaacattaatgctagtcagctgttgagtctaaattccaaaatggagggggtagacttcccttccggctgtagctagaaactcagctttaaggtttttctggggtctgcttggccaaggaggtccattcagtcagtgaggggcttaggattttatttttagtttacaccaccttacaggttcctccttaacaccctttgatgtcagagacagccaattctccagcactgtggctaaggaggcttcgttagtagttaaaagcacacacataaccctacccaacggatccctctcttctcttaaccaagagggcgcaccactgccctactcaacctccccacaaataaggacgagacacgggaagtgttaaaagcaagtggtgagtataaaatcctcggaattttctctttgagcaactaactaggtctgttactgaagccctctgcgagcttggatgctggacgagggagagggtgaggccaccaggcaatgagcgccctcggcggccgcgtgatcccgggggtggggcccatttctgagttggggccagctccccacccccaagaggccccacattccgggccagcagcccagaaagtccctccccgcaggcggagacagccccaagaagtcgacgccccggtcccgccgcccggccactacccagagggctgccgccgcctctccaagttcttgtggcccccgcggtgcggagtatggggcgctgatggccatggagggctactggcgcttcctggcgctgctggggtcggcactgctcgtcggcttcctgtcggtgatcttcgccctcgtctgggtcctccactaccgagaggggcttggctgggatgggagcgc

SEQ ID NO: 24892 - DNA, 2300 bp, Homo sapien
acaaagcagtccttaaagaaactgaggtcaaccctcagaggcatagagcttagcaaagaagggcaggaaatgaatctggggggcaaagaaaataaccagcacattagtctttctccggactactttgaaaggccagtcatctaaaatgcaaaccttctcataccttgcaccctcttaaaatctaccagtggattcacatcatctgtaggactaaatctaaactgggatgtgcgactttgcccctgcttatggcttcattccccagttcctgtcttagcctacggccattgtgaattatttccaaattcaccagcattctatgctctcacacctctgtcctttgtccatattcttttctcttcccaaggcacctttctgcatcttctctgcttggctaacttcttctactcaacctttgagaatcaaagacttagctctagaatcacctccttccaaaagtttcctgaaaagtttttccaggtgtttctatgacttccttatataattccatcattatacagatgctccttgagttatgtcctgataaacccattttaagtcaaaaatatatgttgaaaatgcattttactctaataagcccattgtaatgagaaaaaaatcataagttaaaccatcagtcaggaaccatccattcttagttgagcgagtgtcctttctcccttgagaagaaggatgtgcatttttgtgcatttttatgttttttgttttttttgtttctttttcttttttttttttttgaggcagggtcttgctctgtctcccaggctggaatgcaattgtgtaatctcagctcactataacctccgcctcctgggcgcaagccatcctcctgcctcagcctcgtgactagctaggactacaggcgcatgccacacaccctgctaatttttctattttttgtagagacggggtttcaccatgttgcccaggctggtctctaagtcctgagctcaggtgatctgcctgcctcggcctcccaaagtgctgggattacaggtgtgagccactgcgcctggtccattttagctgttaccacaacacccatcaccattgctggcacatggtaggcaatcaataataattttttttcaaattaatacatgaaaactattaggaaagaagtaaaaaaataacatagctataaagctctttgaatgttaggttattgggaaaagctgtggaaagccaaggattttctttctcaaatttatttttagaatatttttttctacacaaaagaccacagataaggcagagaaagataagaaaaagaccacaagcccaaggacttggaatttgaatcataaaggttcattctagacttgggcaatatctagaacttctagaacaatcagttttctagaacatagaaaagatattaccttggtgttagctttaactcctgccaaataatgctttaaattatttaaactttaaaaaggtgtgtcaatgtatacattgcaggtaaattcatgttccagtaacttttgttttctttgtatgttaaaaatctaactgtggaaaacattctagcttggtttgagagtccaataatacaaaatgctttatttcctaaaattgtttgagagaaaaccaaaatgctaccacactgcaacaaaatactaaagaattatttgctatgtcagttgacatatttttatttagattttgcctaagatgccacatgaagcctatataagacattctttccctaaaacttacatatgtatgtacatatatatatataatgttttacatcctaaacagtctacttcacgtcttcaccaaatgtgcagcagcgtgattcacaggttcaccactggaaaatagaccttaaaattccgccaatattgggtcaaagatcttacactataacacatactacactgtgggcacggatcaacagacgagaatactttatacagaagcttctcgacggaagaaggccttggagtgggaaatctaaaggaggggacacactacatgtcccagcacaccttgcgacgcccagcgaccacaattcccagaacgcactgctcgtcgcacgcaggttttccttgttgccggggtttgtagttcttctcgatcgtgtcagtttgtaaggcgagggcggaagttggattcctggcctgagaatattaggcgtagttttccagtttttggcaaagcggaaatacttaaggcccctgggttgactgggttctttgttttatctaccggcttctgctttacgacaggtaagtcacggaggggctacaattcctcgcagcagggcccca

SEQ ID NO: 24893 - DNA, 2300 bp, Homo sapien
cattgtgaattatttccaaattcaccagcattctatgctctcacacctctgtcctttgtccatattcttttctcttcccaaggcacctttctgcatcttctctgcttggctaacttcttctactcaacctttgagaatcaaagacttagctctagaatcacctccttccaaaagtttcctgaaaagtttttccaggtgtttctatgacttccttatataattccatcattatacagatgctccttgagttatgtcctgataaacccattttaagtcaaaaatatatgttgaaaatgcattttactctaataagcccattgtaatgagaaaaaaatcataagttaaaccatcagtcaggaaccatccattcttagttgagcgagtgtcctttctcccttgagaagaaggatgtgcatttttgtgcatttttatgttttttgttttttttgtttctttttcttttttttttttttgaggcagggtcttgctctgtctcccaggctggaatgcaattgtgtaatctcagctcactataacctccgcctcctgggcgcaagccatcctcctgcctcagcctcgtgactagctaggactacaggcgcatgccacacaccctgctaatttttctattttttgtagagacggggtttcaccatgttgcccaggctggtctctaagtcctgagctcaggtgatctgcctgcctcggcctcccaaagtgctgggattacaggtgtgagccactgcgcctggtccattttagctgttaccacaacacccatcaccattgctggcacatggtaggcaatcaataataattttttttcaaattaatacatgaaaactattaggaaagaagtaaaaaaataacatagctataaagctctttgaatgttaggttattgggaaaagctgtggaaagccaaggattttctttctcaaatttatttttagaatatttttttctacacaaaagaccacagataaggcagagaaagataagaaaaagaccacaagcccaaggacttggaatttgaatcataaaggttcattctagacttgggcaatatctagaacttctagaacaatcagttttctagaacatagaaaagatattaccttggtgttagctttaactcctgccaaataatgctttaaattatttaaactttaaaaaggtgtgtcaatgtatacattgcaggtaaattcatgttccagtaacttttgttttctttgtatgttaaaaatctaactgtggaaaacattctagcttggtttgagagtccaataatacaaaatgctttatttcctaaaattgtttgagagaaaaccaaaatgctaccacactgcaacaaaatactaaagaattatttgctatgtcagttgacatatttttatttagattttgcctaagatgccacatgaagcctatataagacattctttccctaaaacttacatatgtatgtacatatatatatataatgttttacatcctaaacagtctacttcacgtcttcaccaaatgtgcagcagcgtgattcacaggttcaccactggaaaatagaccttaaaattccgccaatattgggtcaaagatcttacactataacacatactacactgtgggcacggatcaacagacgagaatactttatacagaagcttctcgacggaagaaggccttggagtgggaaatctaaaggaggggacacactacatgtcccagcacaccttgcgacgcccagcgaccacaattcccagaacgcactgctcgtcgcacgcaggttttccttgttgccggggtttgtagttcttctcgatcgtgtcagtttgtaaggcgagggcggaagttggattcctggcctgagaatattaggcgtagttttccagtttttggcaaagcggaaatacttaaggcccctgggttgactgggttctttgttttatctaccggcttctgctttacgacaggtaagtcacggaggggctacaattcctcgcagcagggccccaccttttatttctgggagcgacctcgttctggtgaggctatttgtccctaagctctcgccgtagcagccgccgcccatccctctttgtgtgctttggaaagccgcggagctggtggtggctacagttggtgttgggggcttaggcgagggacgttaccgggaagttgcaggcgggaggactcttccccatccagtcacctgacaggtgggttgactgttcttccctcaaggcctccctgcctgtgttccacgtcgcaactcgaagggcggcttggcagttcctgct

SEQ ID NO: 24894 - DNA, 2300 bp, Homo sapien
gtaaacttgtcagaacacaaaaatcgctcaatttcaagtaatgtaggattggcatacgtcattatcattttgattaagttggaggttgtatcattgtgtgcattatacagtgtcatttaaagctttctttccacaggtacagttatatttttattgcctatactatagagttagaaagattttcatagctctctaaacctaacagtatgtgtgtggtttggcagctggtgtggcctacaagctgcattttgtttgctgggtaaaggcttgtctttaggcctcctggagtgctggtaattgcacaggcctgccattggggagagacacaggattggaagcagtgaagcggaagaatgttatgccatcccattgccaccttgtagcagaaagacacaatcccagcagtgccatctggttgttgctgtctagtcagctggcctggctgctgggaccatgacttggcagctggttcccattcttgaccattcttttgtgtacgtcgtatgtatgtgtgttttagataattttgaacatgagtcagggaaatgactacagcaagtaaagtccccttattgaataggttgtcattacttgaactgcactctggtgcagatgcctgctgcctttcccttatagacaaataacgcatgtgtttaggcaataaaaataaacattttcttcataaaaacccatctcagtgtgtagcaaaagaaaaggtgggcagggttatgtgttctataacattttaaaataaatgattttaaattacttcctggtttgggatgtaagagatttagtaattttttagaagtcttgtaaacattgtatattatcccaatgtatacttttattcaaattaagaaaacattattttaagtgcttattgccacatcatgtaacaatagataatgagacttgcatttaaaatgacagaatagaaaatgtggtcttatagctattatcttcaaaatctgcctctcaaatagcaacctgagagttaatgtaagccatctttatgccttatgaaggcccattagacactgatggtttcagatcacaagtaagcagccagctctgtaggctattttagacatttgattttcctcattctacagcattaatgtgtcagcatgctatataaaactatgcaggagttgcatgttgttctgtctagaatgataaatgcttgcaagcttttagagacttaatgaggaattcatcctagttgcttatatatcttatttcagtttatgtagctacagaatttagggtggctgttgctgaggtaccacataggtatgtataaaaaccaagaggttccacttaactatttgattatgttgataaaaatccctattatttgtacttgttctgtccggtcagtggtttacttttgcttatatcttgggagttgtgataccttctgaaatactgtctcaaaagttaccagctattttcattaaaataatttattatatcattctgtttttttgtttttttgtttgttttttttttttttttcagatgaagaggaagatgatgatgtagtggctcctaaaccacctattgaacctgaagaagagaaaactttaaagaaagatgaggaaaatgatagtaaaggtatcttaaggaattaaactttaaaacattttgttgatttctgttaagattccttttattatgtattaaagtaggatgaaatgctgtaaatcaaataagtgaatctgattgaaaaataataacatacattgatccatactgtgatagtgagttgacgtgatttgcctgacataaatcatacttcaaaaaattatttattttccagctccccctcatgagctgactgaagaagaaaagcaacaaatcttgcactctgaggaatttttaagtttctttgaccattctacaagaattgtagaaagagctctttctgagcagattaacatcttctttgactatagtgggagagatttggaagacaaagaagggtaatgtttagttgctaagatttttagcttcaataatgttaaattactttaagattaagagtgataaaagttataacaccatctttttggggggtttggtctttttttgtagagagattcaagcaggtgctaaactgtcattaaatcgacaattttttgacgaacgttggtcaaagcatcgggtggttagttgtttggattggtcatctcaggtaaaatataacaaaataggccgctcttaactcatttttaaaattataattagcaggtcattttattttaattatgggaattttgtataataaatcaata

SEQ ID NO: 24895 - DNA, 2300 bp, Homo sapien
ttaatttacttagttgtttttataacctctaataccatacaatgaagaaagaaatgtttcggataatagattgatttttagaacttgtcaggcattttccatttgaatctcaagtataaaaatcttacttatttgcagtcagctgtgatgtctgccacatttgcaaaatttcatccaaatcttgttgttggtggtacatattcaggccaaattgtgctttgggataaccgtagcaataaaagaactccagtgcaaagaactccactgtcagcagctgcacacacagtaagtaaataaggttatttccattaggcttctgtgctccttcatccttagctataatacttagtagtggccatcagagtcatctcagaatgtgcttcctttggtgtatgaattcctcaccatttagcaaccaagaatgaaggctatttttttttttggagatttattagaaactcatctctcttctgcgacaacattttgttaatagcaaacttcacattaagaatacccacaagttatgagactcgataataaacagaatgcttataattagactaaaaattttgttttgctttttggtacaataatccctgaaaactttttttaatatctctagcaccctgtatattgtgtaaatgttgttggaacacaaaatgctcacaatctgattagcatctctactgatggaaaaatttgttcatggagtctggacatgctttcccatccacaggtgggttaaacttgggaaactgaaattttgaggcaaatgttatgttttaagtgtatgtgtacctcaacttatgtttctcataaactgttttatagtagtgttacaacagcttataagctgaaacgtgtttaatataagtttgtttcatatatatatattttactttgaaacctgcttcatttaatttagatttatgtaaataataaaagaattgtttacaatcaaagactagaagtttttctacagaaatttaaaattgcaagtttacaaactaattttctcaggtttttctatgtaggatagcatggagttggttcataaacagtcaaaagcagtagctgtgacatctatgtccttccctgttggagatgtcaacaactttgttgttgggagtgaagaaggttctgtgtacacagcatgccgccatggcaggtaaacctaaactggaatttgcaataatttaaaattcctcctttaatcccattgaaacaaattgtcttatttaagtagaaatctgtcgtagatctacttgttatttgtgacagattttttgtgttcaggcacataaaattaaaacttaatacctttttgtataaaagataattttggattcatgatgtgtttagattttgtgggttgtggttttgtgtgtgtgcatgtactcacgtaagttagtgataggcaggaacattcagtagttacaaatacaatatgcacatgccaatattgacctatagacttataaatgagattttcagctgtttccccttttgatttatttggactttaagcattagttcattctcctgataattgtacagtaatgtcacatacatattttaaactgagtaatatttctccttccgttctgtctgttttgaaattgtctagctgtaccttattgcttccttaaaaaaaaattgagtgtccagatttcatctcaaatatagatcaccttcacttcaaagcttttgttttaaaagtagcccagattgtctctcttaaatgtagggtatctttgtttctattacaccacttcagatattggacttttgaggtctgttgtcaacagcatgatgtttacagttccaaaggtacttattgctttagtagagttaccaaatgtggatggaataacactcaacaaagttaattctgataagttatgagcacagagttaagtctgtcaaaatgaagtcaaggcctgatatataaacctataataaaatgtgtatgtaattggtctacttataggagacttctctaacattttcacttttatgaaattagcaaagctggaatcagtgagatgtttgaggggcatcaaggaccaatcactggcatccattgtcatgcagctgttggagcagtagacttctcacatctttttgtcacttcatcgtttgactggacagtaaagctttggacaactaaggtatctaaaatatagatgtctgctatttgctcaggtttctgacacaaggtggtgatctaatactacataggaatgatgaaaaccttttaaatcataattgtttgctaatagatgaagcctgctaggaag

SEQ ID NO: 24896 - DNA, 2300 bp, Homo sapien
ctgcctctgggaaaacaatgtgaagttaatgaaaagataagccatagactgggagaaaatatttgcaaaagacatctgataaaaggctgttatccaaaaaaatacaaggaactttaaaaactcaacaataaaaaaaaaaaaaaaacagacaacctaatgtaaaaatgagcaaaagacctgaatgggacacttcaccaaagaacacatacagatggcaagtaagcatatgaaaagatactcctccacatcataggtcattaggaagctgcagattaaaacaacaatgagatactactacacaccaattagaatggccaaaatccaaaatactgacaacaacaaatgctgacaagtatatggagcaacaagaactcttaattcattgctgatgggaatgcaaaatggtacagccactttggaagacagtttggcagtttcttacaaaactaaacatactctatccatacagtccagcaattgcaattcttggtatttacccaaatgagctgaaaacatgtctacacaaatacctgcatagagaagtccatagcacctttattcataattgccaaaacttggaagcaaccaagatgtcctttagtagatgagtgtctaaataaattgtggtacatccaggctttggaatattattcaccatgaaaaagaaatgagctatgaagccacaaaaaggcatacaaaaaacttaaattgatattcctgctgaggcaggaggatcacttcagcctaggagttcaagatcagccgaagcaatatagtgagatctcatctctaccaaaacaaaacaaaacaaaaaaacaagtgaaagaagccaatctgaaaaggatacatactgcgtaactcaaagtatatgacactctggaaaaggcaaaactatggggatagtaaaaagattagtggttgtcaggaattgggggaagggagggatgtcaggaattgggggaagggagcgatgaataggcagagcagagtatttttagggcaattaaattattttttacaatgataaacacacgtctttatatcttcgtcaaaacctatcaattagaaccaagtgatcacagcagaaaaaaaaagaaaaagaaaaagaaaaaaccctatagaatgtacaccgccaaaagtgaaccctaatgtaaactatggactttgggtgacaatgatgagtcaatgtaggttcatcaaacatacaccactgtggtgtgggatattgattcggggaagggtgtccaagtgtggggaaaggaaagtggtatataagaactctgttttccactcaattttgctatgaacctaaaactgctctaaaagataaagtttattaattttttaaaaaaagatttgccgcctcatcctgtgttcaattttttttaaaaaaaattatatgcgcagaaaagggttggtagaaatattgcagagttgatatccagataacaaagaatgtctataagtcaataaagaaaaaaattgtaaaccctatttaaaatttaaaagtaggcagttcacagaaagcacacaaatagggaacttcattcctaggaagatggcaggctatgttatttgtatcagcactaaaaactaaaaatgctagattgtttaaaattttcaaagcactgaaaagctgagaatataagtcagcaatctaaggaaaagccagaacctagagcagtaaggtgagcatttaagcagcttttgcactgtaggataataccaagtcttcaagtgtactaacatccttatataaaaaagagcagagtgaatcaatccaacttcaattttagaaaattaagtatgcatattatagatttactaaaacaataaacaaagtacataaactccaaacagtgggaaaagaatagaaaaataaaaataattgctctaaaacacccaagaatatattaaaaataagtagagatgggtcaaaggaatcacaaaatgaaatgttatacttaaatacaaataaggtatatctgtaattacattaaatgaactaaaatgcttccactgaaagagtgaagtcagactacacttttttaaaaatgcaaatatatgctgcttataagtgacatacctcaaattagagaaaatgtgaaaataaaaggacagagaaaattttccttgtaaatattaaaaaagaaaaatatagttacagtaatatcaaaaaataaattttcagacaaaaagcattactagagattaaaaaaagagacaatgacaaaagaatcaattcatctggaagctcttaatttgtcttgatgtacctaatgacataaccttaaaatgta

SEQ ID NO: 24897 - DNA, 2300 bp, Homo sapien
tgtatattggaatctacatgatttggccgaaaattgagcttttgtcgtgaagctgtccctcttcttcctaccattgccctcattagaccaaagtaagcagtacccctcagcaaaccaccttgaactcaatttttgtattttttctaatcgttaacactttgtcattagccaggtgtagtggtgcgtgcctgtagtcccagccagctacccgggaggctgaggtgggaggatcacctgagcctgggaggtcaaggctgcggtgagccgagatgacaccactgtactccagcctgggtgacagagtgagagcttgtctcaaaaaaaaaaaaatttgtcttttattaatagttatttgcataattgttatcctctgtactaggctaatagcttcttgagggcaagagtttcattctcttcatccttgcctttcctacgtggccagtgtaatagtaataggtgctcaataaatgtcaataacatgaatgaaaaccttcatgtcgtctaagataccaaattaggcacagaagagatttcatttgaaagaggagccttgtaagagcagggaggtactaagatgcttccttctgacctcataggtacagcctgactcttgagttaggaaggagctgacttggaatagaaggagagaaccaggtgtccttggctgcaccaacactctgaaaagacaaaggaaggaaggggtgcatgtttgctctctatacaaccagtaatgaaccattacagagctcagtgtggctctgaccagccaggcttatgttcactgtgttgctcttccttgctgggctcattctcctctggaggctctggctaaacatcagggcaacctgagcagctcccggagtgtgctgtgcttgttgtgtggtaggagcccttgggcctgagagtgttgcgatggaccacgttgttcttgctcgtgaagacagggatgactttgatcattaagaaacggccccagggaacttaccgcccttatttggggcccagcaagtcctttctcctctagcaatggtaattttagtcagttttgtgtttaaaagccagtaaagttacctgctcagtcttggcagtgagctgtttgtagcagcccctttctggtacttaccagtctcccacttttttttttttggtgagacagaatcttgctctgtcacccaggctggagtgcagtggtacaatctctgctcactgcaacctctgcctcccgggttcaagcgattctcctgtgtcagcctcccaagtagttgggactacaggcgtgtaccaccatgcctggccaatttttgtatttttagtaaagacagggtttcaccatgttggccagcacagctggtcagagccacactgagctctgtaatggttcattactggttgtatagagagcaaacatgcaccccttccttcctttgtcttttcggagtgttggtgcagccaaggacacctggttctctcctccttttccaaatcagctccttcctaactcaagagtcaggctgaggccgagcttggtggctcattcctgtaatcccagcactttgggaggccaaggcgggcagatcacgaggtcaggagatcgagaccatcctggctaacacggtgaaaccccgtctctactaaaaatacaaaaaattagccgggcgtggtggcgggcttctgtagtcccagctactggggaggctgaggcaggagaatggcatgaacctgggaggcggagcttgcagtgagccgagattgtgccactgcactccagcctgggcgacagagtgagactgtctcaaaaaaaaaagagagtcaggctgtaaatgtgaggtctcaaactcctgacctcaggtgatcctcccatcttggccttccaaagtgctgggattacaagcgtgaaccaccacacttggcccagtctcctacttttaaatgggggcagcatttgccttccaggcttttccttgtgctttccaatcaacaatgaaaaacagccagagaagaagagtctaattgtggacaggtgtttgcaagtggttgaaccaagtaaatatttccatggaactgtcagcaccgacttcttccccatagacatttgatgtcagttttcagaatgagattattttttctaatttttaccagtcaagctttgctagcaggaactgagaacattcagaagtctgcctccaaaggcaggaagtttacctagtttcatctgaatagggtgcaaggccatgccaaggggaagtatttgcattattccctagcagaacctcgtacaaggctgccaactccatccgcct

SEQ ID NO: 24898 - DNA, 2300 bp, Homo sapien
ccttgtgatccacccgccttggcctcccaaagtgctgggattacaggtgtgagccactgcacccggctgcaacacatgttttacacaaacgcaaggcactcaataaatgtttattaactaaaatttggctccttttaaatcatgaaattagagtgtttgaagaagcattaaagctcatctagttcaatcctccatctgattatatagtgtcctactaaataccaggttatacataattagtatagtgatagagtactcacagccatatatgtctagagcagctcattccatgaattccttccaaaattcactgaaaagaaaactgtttgttattgcttcaccaagggaataaagaaggctgtggtccaaaaataagatcaccatcatctccactgcataatttataggatttagagtcaggctgtgaggaagacagttcaggaaaagacataactgcaggagtacaactatttcttctgatttttgatacccctctcttccatttccaccaaaacgagaatttatttcaatgacagcaaatgttcatatagggagaatagttgtacagtatagagaagccctaaagtgtgtcatttatctagtgtctaattataagtggcttgggcgaaaccccatagctactaaaaatacaaaattagccaggcatggtggcgtgcacctgtaatcccagctacttgggaggctgaggcaggagaattgcttgaacccaggaggcagaggttgcagtgagccaagatggcgccactgcactccagcctgggcgatagagcgagactccgtctcaaaaaattaaaaatgaaaacatacacagggtcgggcgcggtggctcacgcctgtaatcccagcactttgggaagccgaggtgggcggatcaccagaggtcagaagtttgagacaaacctggccaacatagtgaaaccctgtctctactaaaaatacaaaaaattaactgggcattgcggcgggtgcctgtaatcccagctactcgggaggccaaggcaagagaatctcttgaacctgggaggtggacgttgcagtgagtcaagatggtgccactgcactccagcctgggcgacagagcgagactcagtctcaacacacacacacacagacacacatacacacaatacacatgtgattggggttgtggagaagcattgaccatctgtaagcccctagagggtgggggctataggttatttgcgttttttacaagcaggaccatgtcaggcatataatggatgcccatacatgtttgaatcaatatgtagcctaatacagtgatattggcaagacgggtttagaaacattgttttggttcaagatagagttactgcttcttctacttcttaggtagggctagaaatcgaatggagaattactttctgttcatgtatgggcaagcgattcattgccagccctgtcaaagacacatagagttttttttctcattgcacacaggatttgggtgattaggaaagtggagcgagtctactaataaaccgttgtaatagcacgcaaagcaaaaataaattcagcgtattcgtcccatgccaatttaggagcatatttctcaaattatgtttacgtaggttttccctagagtgagtggttcccaatcttgttttgtcggtatttgccatcagttgtcattaattcattgttattaatgggaagtgctctttgatccgtcggaaccttgctcagtataggccccaaatgttcctttaagcctcggggaaaacgactttggctggtcggtgcccaaagccacacccactaagaggccttaggaaacctggggctttcctggcggcgacctagctgtggcaaccacgcggcgcgtcgggatcccatgggtcgcgcttgttttccccgtgggaggcgcgtccccctcctccgcccggccggccggccctggaccagctgcctttctggccgggacgccgggcccctttccgcacgcggcgcgccccgagttcatttgcatagggacgcgcgcggcgccggcgagagggagggcgggcgcggccgggaagacggcgcgcgcgcgccctgacagctcggccctgctcgctcactcgctcgtccccggcttccgagcacagcatggcggtcaaggtgactccaactctctgctgctgcttttattgcataagagacattccgagcgccctgcctgcagccccccactgcttcccattttattcattgtctaggtcttagatagcttgtcctggggctccggcttgctgcggggagagctgtgcggggcttgg

SEQ ID NO: 24899 - DNA, 2300 bp, Homo sapien
ataatgtcattagtctcattgatttcagttttctgtcttaacattatgactgtaatttctttttttttttttgagacggggtctcgctcttgcccaggctggagtgcagtggcgggatctcggctcactgcaagctccgccttccaggttcacgccattctcctgcctcagcctcctgagtagctgggactgcaggcacccgctaccacgcccggctactttttttgtatttttagtagagacagggtttcaccatgttagtcaggatggtctggatctcctgatctcgtgatccgcccgcctcggcatcacaaagtgctgggattacaggcgtgagccaccacgcccggcctatgactgtaatttcttgtgtatcattaggtttcaagaaaaaggatcttgaaaccttttcttgggatcacgactgtaatcccagcacttttggaggccgagatgggcagatcatctgaggttgggagttcgagatcagcctaaccaacatggagaaaccccgtctctacaaaaatacaaaattgctgggtgtggtggcgcatgcctgtaatcccagcgactcaggaggctgaggcagaagaatcgcttgaacccgggaggcggaggctgtggtgagctgagattgtgccattgcactccagcctgggcaacaagagtgaaactccgtctaaaaaaaaaaaaaaaaaaaagaaagaaaaaggatctgggcattctcagtaccttttctgatctttatcttcaggaaagccatctctatatagttgagcaaataaatactgggctgagtatctgatgaactgcactctgcataggttgcatactgagaatgaacttgggcagtttatcttttctgggctttggtttcctcatctctaaaatgagagggcgtgttagttctagaccatcatcccaagggtccattttagctttagcgtgcatcactgtaaaacctgttaacaaatatttgttgagataaggaattctggtgtatagccaacattgtgggaatatttgtggatacctaaatagtggtttatcctctggggaaagcagttcctacagctactaaatactaacaaggcctatggctaaaatcaggtagcaccttgtgatgtaattcaaaccactaggacatgtggcatgcaagactacatcaggctacttgaggtatttattaggtaacaatttttttttttttttgagacggagtctcactctgttgcccaggctggagtgtagtggcgcaatctcggctcactgcaactttcgcctccagggttcaagcgattctcctgcctcagcctcccgagtagctgggattacaggcgcctgccaccatgcctggctaatttttgtatttttagtagagacggggtttcactatgttggctacactggtctcgaactcctgagctcaggcaatctacccgcctcggcctcccaaagtgctgggattataggcgtgagccaccgcgcccggcctaggtaacgatttttgcgcgctaaacggttcttagtaacctgcagagtgaaagcagagtacctaaatatcatactgtatacgttaaaaacaggggagaaaggaaaaaaggtgttaaagtttacagcaaaatgagaaacaaatgaggaaaacaagtgaaagcttctcccgcaactgaaactcaacctctacattttacctaggtaaaatggtaaaattgcccacagggctcaggtgtttggatgcactgtccaggccaagaggaaagattttcagccagtctccaaaacatctcagggacgggtatggaaaacaggcgtaaagtgtctgtattgatcaaatcaaccccagagaaactttcctagggccagagagcatctcaaccgcgaaagtccgtttgcggcctccttctccacttcaggcctgcaaagcggctgacggcattcgcagtggctaggcaacggcccgcgcagacttctcggcgttagccccgcctcttgaggcgcttccgccgccgggctcctggacacgcctcctttaattggctaacgtcacgctgggagtgggcggggaaaatatgtcagactgtgcggtcacttccggcccgggagcgcgcgggttgattcgtccttcctcagccgcgggtgatcgtagctcggaaatggcgggtaagttaccgggaaaagtttaccaaggggaggaggcggccagatcggggatagaacgccgagacggtggtgacaatgcccgcctagaactttcgggctgtagcctgggttccagaaggcctgcttgggaccggaagcgc

SEQ ID NO: 24900 - DNA, 2300 bp, Homo sapien
tggtgtgtctagtcagctgaatttcttaccctttctatatttctgtataattttagttgaagtttagaataatgctctggaatacagggaatttttcagtgatcttcagaaatagattctaaacttttagccacaaacattggaattaaaaagtttctgttcatttttaactctattcaattaacaatgattaaatgaggtcttgctcttgtgctgattttattatctgatcagtaatccaatctgaaagacgaatattttaaattaaactaaattatatatttgagaaaagagtacagatctctaagacatggtagtcaggatttttttttttcttaaagcagaatccatttaatagagaaatgcagacattttccctttagtgaagcgaagttgtaaattctaggttgaagaactatttggttttaagttgtatattttatgtaagtatatcagatacatatttatatacataactatttataaatatatatttatataattatataaagattccttgctttaaaattgccctttgccccgtaaaaattcttaatgtgtaaacttacacaaagcaaactattttatttgaagatatttattacaggaaatagacatcctttgaaggctgaaagccctttttcaactttgttgggctcaaaccttctggttgctctgcccgccaccaaaagtgctacttgaaacttagagtttctgagaagtctttgaagtagatttgatacaagatatgtaaagtgatttgcaatgccttcttgagaagacaggacataaggaaagtttttaaaagttaaaattatacatgctatgaaagtcttaaagtgatttttaaactgatagattataaatccctttttaaaagtagtttttcttggctttttaaaaaccttaactaacatactatactgttttactcatcactactttggattttaattgctacacaacacatctattacagctatccctcattatgatagtttccttgatagctgttgaaattgtactgatactataaaatatgcttacgatggcctcttcacgttagcaatttcaaggaaaaatatttatcaaatagtactttaaaaataagcaaaaactgtcctatgaaatgcagtttatttgatctagagtgtgaatgagttgcaaggactgatgtacatattagaaataaactgttgggcaaaatgctgaagagctatattttcaataataggtcttttttatacctataaacaaattatatataaatgttggtggtaccagagcattgaaaataaaacttgtttgtgataaacgtcatcactggttctctatcctgaaatgtaactgaatcataataaagtgctattcatctgcaggtgcattgcttctacttagttaaaagatggttgaaaggataggaattagtagcatgttgtattagccttttgtagtgtattttgtcctaagcatcttaatttccctgttttgaatgctaagtagcaagggtcttggtttagaactaatacccatcatgcatgtaaacggtatgaaagagctgcttagtaagttaacacaaagtgttcttgtgtcagtccttgtggaaatagatacaatacaaacattacagctgaactcacggcaaactccattaagtaaaaacctggcctcattgttcaggaaaaagtttgaatagaatacaagctcattttgttgaatgtaatgtcaggcttttagggactgtattgagggataaggttttgttaagttgagaccaattcattaagttttattgcctggtgagaagcagcaatactttattgtaagacttcatcaaatattcatggttaaagagaagtagtaaatgtattcaatcaagtggtcttttgggattttgaaaaggattatgaagtctgctcagctgataacattgatagaggttgtttaacaagggtaattttaatctccgagtttagttttgttgtccagtcttgtctcttttttactgtcacaaatccaggtctgtaagaattgtgtcacattctaaggataaaagaatgatatatccattcatataatttatgttatttcctaaatatgtatattttaagttatcatcttagtttgagtttggcatatgagggaattgtgacccatctagttgtgagattgctattcatttggtcagactctagtctcatctcaccactgctggtgatcttttcatgtcttggataatatgatttctttgacacatataaaataataagcaaccttttgccttggccagttcagactgt

SEQ ID NO: 24901 - DNA, 2300 bp, Homo sapien
ctttgttgggctcaaaccttctggttgctctgcccgccaccaaaagtgctacttgaaacttagagtttctgagaagtctttgaagtagatttgatacaagatatgtaaagtgatttgcaatgccttcttgagaagacaggacataaggaaagtttttaaaagttaaaattatacatgctatgaaagtcttaaagtgatttttaaactgatagattataaatccctttttaaaagtagtttttcttggctttttaaaaaccttaactaacatactatactgttttactcatcactactttggattttaattgctacacaacacatctattacagctatccctcattatgatagtttccttgatagctgttgaaattgtactgatactataaaatatgcttacgatggcctcttcacgttagcaatttcaaggaaaaatatttatcaaatagtactttaaaaataagcaaaaactgtcctatgaaatgcagtttatttgatctagagtgtgaatgagttgcaaggactgatgtacatattagaaataaactgttgggcaaaatgctgaagagctatattttcaataataggtcttttttatacctataaacaaattatatataaatgttggtggtaccagagcattgaaaataaaacttgtttgtgataaacgtcatcactggttctctatcctgaaatgtaactgaatcataataaagtgctattcatctgcaggtgcattgcttctacttagttaaaagatggttgaaaggataggaattagtagcatgttgtattagccttttgtagtgtattttgtcctaagcatcttaatttccctgttttgaatgctaagtagcaagggtcttggtttagaactaatacccatcatgcatgtaaacggtatgaaagagctgcttagtaagttaacacaaagtgttcttgtgtcagtccttgtggaaatagatacaatacaaacattacagctgaactcacggcaaactccattaagtaaaaacctggcctcattgttcaggaaaaagtttgaatagaatacaagctcattttgttgaatgtaatgtcaggcttttagggactgtattgagggataaggttttgttaagttgagaccaattcattaagttttattgcctggtgagaagcagcaatactttattgtaagacttcatcaaatattcatggttaaagagaagtagtaaatgtattcaatcaagtggtcttttgggattttgaaaaggattatgaagtctgctcagctgataacattgatagaggttgtttaacaagggtaattttaatctccgagtttagttttgttgtccagtcttgtctcttttttactgtcacaaatccaggtctgtaagaattgtgtcacattctaaggataaaagaatgatatatccattcatataatttatgttatttcctaaatatgtatattttaagttatcatcttagtttgagtttggcatatgagggaattgtgacccatctagttgtgagattgctattcatttggtcagactctagtctcatctcaccactgctggtgatcttttcatgtcttggataatatgatttctttgacacatataaaataataagcaaccttttgccttggccagttcagactgtcatgaaggggtatagtcagctgtttctgcataatggaaatgtccatagcattgcccttattattgtacttggtatcaggtcacctgccttctcttatttacttttatattatgctcatctcagttttgtgtgatgcagtttgtgcacaggaagctcatccttttccaattcgctgtgtgtttacgtctttagttttcaaccaaagttttgtaatttgtgttggttttgtcagttttaaagaaataaaccatattcaacttaaagtcgaatttgttattaattttttatatcctttattctttaggcagatgatgttgagggcaaaattagacaaatcattccacctggattttgcacaaacacgaatgatttcctttctttactggaaaaggaagttgatttcaagccattcggaaccttacttcatacctactcagttctcagtccaacaggaggagaaaactttacctttcagatatataaggtaaagataaatctaaatatttattgagtaaagttctatttgcctgaaacctgtatgtagttttgttgtcagtgatttattctaactgcagtaaacaagttttaatcagcattataaaccaagatctattttgtgtgtatgtctgtatctatgttcacatct

SEQ ID NO: 24902 - DNA, 2300 bp, Homo sapien
tgagtagctgggattgcaggcatgcaccaccatgcctggctaatttttgtatttttagtagagacaggtttcaccatgttgcccaagctggtctcgaattcctgacctcaagtgatctgcctgcgttcgcctcccaaagtgctgggattacaggcatgagccaccacacccagcttatatcccataagttgatggttttggcggacatgtgctggcagcttttaacccttctgcggtgagaaggatgtgtatgagagaagccagatccagggtcagtggatgagctatcacctgtgcaagttcatatttgcttcatttctagctcatcccagatatctacattccatgccgaacttattgaggatttcctcactggattccactactgctggtgccacctgggtcctcatagtgtttccttttccttttagttgtaggggaataaagcattcatttattttccaagggttggctgagttaagtcacatgaacatgtgttctatttcagatgggtttgaaactaggcttgatgccttaaggaatagggatgtctagatttcttttttctgtacacttcttaagactctgtggccagctaactctcaggctcctttgctgcactcagattgctggcctcagttacacagaggacagatttgccacattcaaaaatgctctccctggaattgaaatgagtttgcaaaaggtaggagtacattttattctcattcttgtgcatcttatttaccctgatggaaagcattacttctctttatctttcaaggtgacccaaaagcatccaaaaccaggttttccagaattatagcatgtgtcctctaatgaaatgccaacattcactctctttaaaagtaaaaatatcaagattatatagtcattaaaaagaataagtctgaactaagtgttctaagatttgatgcctatgatgactggaatggaaaaagcaagtcatatgattctatttaaaatacttacatttgcctgtgtgtaaaaggcaaagatctcaattgagcacacggtggttaactggggagtgggactatggtatgtacagagggcgaggaaggggcttgcacttgttccttatttctgaattgttctgaattgtctagattattcactgagtgtgtagtgcttaaaaattaattagaagacatcacacacattcactgagaatcctaatcaatcttcactgcatttaaagtctggaaacggttacattctcagtttgactggtttcatgcagtgttcaattgcttcacctgacattcctcgggtatcgggttctgtgccgggcacggaggctactaagatgaataacacctggtccatgacaggatggcatctaccccagaacacaggtaagagagacagtgaatttggtaaaaatgggcaccgtcatcagtaggcatacatcagctccctcatctgattcacaattggccttctgtaggcttcttctcttggcaatgcaattggcaggcgtcatccttttatacttaaactccaaatttaggattaagactccagttaatactgccaagcagaaggcgtccttggagaaagagaagtctcctgaacatacccactggggtacctagaatagattttgcagcgacacacagatcctgtgttgtctggagtctctgctgagtaatgtagattctgggacagcaaaaggggagctggtgactttgaaccaaattttacctttcaactgaatccaggggaataatttgcaacagagtggcagacgatacaaagtgctatgttgaacactagattgtgctttattttttccgcccaacttcacgtttccatgcaccaaaatgttgatgctataaatattggatgccacgcttacctgacaggcttcttccatcccacctgggcgcgggggctcagagcgagcgcgcgagccgcggctggagcccgcctctcgcggctggagaggactcagccggccgcgggttctgctgcttgcccgggtgccctagccgcttcccagccagggctcccgcagtcagccccgcgcgcgcacgcgcgctcccctcgggcggcctcgacgcctcagggcttcggcagggctgcgactggccggctccagcgggcggggcggcgagcgagtgctcgcggccacgtgaccgacgccaacatggcggcgcccagtggcgtccacctgctcgtccgcagaggtaagcgcgtggaggagagccccgtgagggttcgcacggttgctcactaggtacgcacccgggtccaaagggatgcgcacccgcgct

SEQ ID NO: 24903 - DNA, 2300 bp, Homo sapien
cctcctggtcctgaggtgactccagtaggctccatgaggaatcccggaccctcaggacaaatgggagagttttgttttctctcagagtgagggcaggcaacaatttaagcaaaccggcattcagaacaggtgtcaccttagcagtagggggtgggagggatccactccaagttcactgagtgcagctaagatcccacattgagaaaccagctaccgccagcggctcggcatcagagggcccgcgctcagtgctcctccctagacctttctgagctaagaaataattccggagtgtagccatctcttgctcacacacaacccgcttctaaattaagcaaggctctgaaacagtatcccgaggggctcatgccggacttttgttccaagaaggcaaccaggtcccctgtgctaccgcaaaagtctttgatccttttccagctgtggacacagagcacccaagagactgtcgcgatgtgcggccgtctctccccttcccccaccttgcaagtctctggaatacactgtccctaggcggcccggccgtcgggtttcctcacgccttgccctgagctccgggaattaccaattccgctttccccggtcccaaccccgaccccgcgcccgccgcggcgatcacttacttgggcaaggccctcagggcacgcgcgagagacctggggcccggcagtatccgagcgactgtgctgggcacacggcgtggcactccataccctaaaacaggcactaggaaggagcaattaaaaccacaagtgcgacacagaaatcaggacgagccgagcggctcccggagttgcctggtggcggaatcattagctggctgttgctacaaagcctcaccgtgtggttcggtgattaagaaaaaaaaaatcttttaaacgttggcaaacccgttattggtttggcgtattgggttttttttgcttttgcttttctttttgctccaaccactctgcctgaaatatttctgcccccagcattgtgcccttaaaccaaaggagaggaattctgcgggcagcagcagctggtacagaagttaaaaaaaaagagaaaccccctctactaatatctgtaacgacagcaccgatgtaatttgttttgaatgttcatttttattggtgttccctctgccaaaatgtgcttgattacagaggtttgtcctgtgatcattgcacactccagacaggggaaggtgcagcgatgaaggttcagctcaggccagatcaaatcccgggctgtttaacgctgaaaggctgcatgttgctattagtgttaaatatatggctaattatgcgtatgaaaattaaacatcagtgttatgctaatggggcgccttcagctgcggatctgagcacttgagactaccatttaatcaaatgaatcagtaactaatacatctgcacgtgtgaactttcacaagatcatttccccgttcccgtcacaccgctaaattatgaaagaaataattatcaacactttctaattacctaacaaagtaatttgggattcaccgtggggctggcgggatggggaaccaacatccacttacagccagggtggtgtacgccacaccgcgagggactggctgtattggtagtagtggcgatggggtgggggctcttgtgcacttttttgtacctagcaccccagaagacagaaggagcagcggcagatcttgcctccactagccctgccccctaggcctggtggcgcgcgctttggccactggaggtgaggaagatcctgggtggcaacgagagacgtctacacatagataagggagcctaccacaggcctgggtttgctgcgggtttcggtgtcccccagggactcctaaactctggaagtcgcgctagacctcaggaggccggaaaatgaccacctggcgtcggtggctccagcagatctgagcccctaggccccctgggctccacgctgagccgcgctctcggggcgagtgagcccggggctctccgcgcatggggagtggagaagggagggggaggaggaggaaggctgggagggaaagaggatgtgtgtgttgggggagggggcggtgcagccgcctttcctgggaggagaagcgcgggttcctggctctccacgcgcactgctttaatcagacccgtgcagcctcgagctggagtggccagctgggcctggagcaatgcgagcgggccccagggagcgacagcggcgttggcgcagcggccgagtgagtgagttcgcagggagggcccctaagccccgactccagggatgcggcagagcgtaccggggag

SEQ ID NO: 24904 - DNA, 2300 bp, Homo sapien
accactgtggtgacagaaagagttggaatttgaagtcaaaacaccaaaaggcgggcagatcacgaggtcaggaattcgagaccagcctgaccaacatggtgaaaccccatctctactaaaaatacgaaaattagccgggagtggtggcgcgcgcctgtaatcccagctacttacgaggctgaggcaggagaatcgcttgaacccaggaggtggaggttgcagtgagccaagatggcgccactgcactccagcctgggtgacagagtgagactccgtctcaaaaaaacaaaaacaaacaaaaaaacaccaaaaggcaatcatgtttcaatatcaagaggttggttttgcagctgaggcccacaaagtaggcagagaaccgcataaagcaatgcaggtgggtggaggtgagctccacctccaacgtttctcataagctggcgctttccatctaggggccttccttaaccaaaaaaaagctgggaactaaatccaggtagacttaaaggcgcattacctatctcattatttctctgtgtgaatgctggagttttaattacacacttgctttttatggggaagaagaccaaagatcatatttttgaaggtatcaacttgttttctatcagacagttgttttaacaagttctttcagcgacatgttatgtctttaggaaagggtgcttcagatggtgcgcactagcacaattttgtggcttttaattactattttgttcttttggggggtttcagaggctggcgcctgggcgtgattagaccgtctaccccgccccccgcaacctcgcacactgcccaccaggtggcgccacaaagcaagcgctgccgcaggaacttcggacttgggagtccagcaagtcgtgcagtccatcaccgtcgggccaaggtttccaactacaaggttatagagacagaggaagtcaccatttccgattttttaaaaaacagagggaaaagaaaaaaattgcaatgatagggtagaacagggtcctaaaatgcaaaactgtaaaacaggattaaattcaacaaaccagataaaactttttatatttgttgtaaatttacagagaagtgataaatctagtatctacttgataaatctataatctcacctattatcctatttcctttttcgcaagagcatcgaattttcaaggacaactggtgaacctttccacccgaaggaggaagtcctcgggatggctttcagggtgtcatttacttatcaaacgtatataattactcagagtctcgcgtgtcgggaaagtaccagggaaagtggtttcaaatatactattagcaataatacctttaagtttatgtagcttctctttgaagcaacaaggaaaacccgtttcaatattatatgattaattgtcctaatatccctgcggattggttaagaagcgagcattacacgtggtttgtggataattaaatcaattgattatgtcaagtgccgagtggctaacaagaataaatgccagacacttcgaggaaaagtgaagatagagctggctggactctgggcaccgatgtactttaatgtgtttgaaaactgacctcggacatgaaagtacgaatcactggaactggcacttgctcacagaatgggagaggggaccccacttcttcctctgaggcaaaacgccagtctgtctccacgccttctgtcttcctgctgcgggccaccctgactcctcgctacctcgacccctcgcctcgctgctcacattcggcggcagtctgtttgcacctggggccgctgcagccgcagccgcagccacagcgcccaccatgtgacgcccgccccttggccgggcgttcccggagctccgcggccgtttgcttctgattggctgttgctaggtgacgtcgccagcgctcacgtgacgagtgttaaatgcccacacttcaggagcccgcctggcagacaatcgtaaagccgctcggggccgctcacctgctcccgcctcccagagccccgacccggcccagccacccctgccccctccactgcccgccccccgccagagcccgcgctcgcgctgggcaaggagccgagcgggcccagaggccgaaagaggatgcgaccagaggcagctgtcccgagcagcgcacggtgatcgcctcccccggaggaggaggcgcctagacggttgcctcctttcttgtttccccaccaccacccccgtaattacattggctgctggaggggaccgggagagacagaggaggcgcctggcttcccccgcacgcccgccacctctgctctttcccgtctc

SEQ ID NO: 24905 - DNA, 2300 bp, Homo sapien
attggactgtggtgtctaggggaggatggaacaacacggtctctcttgattcaacagccctggtgtctcccacatgtcagcagcatgcttcatgcgagaagagaccaaggagctgagtgcctcacgctcttgctgaggagacagtgtccacagtaacagtcgcagcgattgaagggcgatagaagtgagagcctcccgtgggggtggtcaagagaggctttatagagaggcaggtcttcccctggcctcaaagaatggcaggacagaaatggaatgggatgtagtgcccggccagggagaggatctccagggacacagctgcctagagctggttttaagtgtggctgtagcaaggtctctgagggagagcttaactctgccttgagatccttctttcaccatggactactggcccttgatcaatcagtgcacacgactggacccaggactcaaggctaaactgaagggcctgggccagcccgggttttagggcccaggagattctctggactctgggcttcttggcatcctgttatagaagcaccatttatacatttatattgaaaaataagcgcgacggagggagatctgatgccctcaacaaagctcagaaagacttttctggttgaagaaataagcattgcacacaccacaagtgcaaagccttctgcccagaccctttgctggagagctgtgccgagcagagggcaggtggttgtggtgcaggctgggctgcaattggctgggctcagcatgcagcagtgttccgagagtgtgggttctgctggtgcccagatggcttcagggtgcctgataaacttctctagctctgattttcaggtctgcaaccctcttgctgcctccttcaagggcttccaccagaggcgacataacgtggcctggactgttctactctgggcctcacctcccactccacccaccttgtttatctgaccttcttcccacgggaacattaaacctcccagaaatattaatatgtttgatttttttctcctttgtagctatttaaaaaatgttctcctttttgttttctcctttaagaatttataggaaagaaggatcttggaatggttggtgcagataatgagaaaagattgggagcttgttacaatgtcatgagattgggaagaagaaatacttctttccctttgtcattacagccagtggagaaacagtttacagccattccgagaaatgtgaacaatgtggagggatttaggtagctcagtagcagggtgcatcctatacataccttataaggtatactgtagaaatcttcaccagaagattttataaataatcaggaatatcattttgaaatgagagaaatgtgccagtaatggatataacactattttagctaggatttgctatgatgcctacagtgtacatggcaaagttggtgtcagaactgagaatactctggtctataggatccaaggggaagaatccaaagaggaaggatttttcaccagttgaacagtggtccttgggtccagtgcttgattctgctttaataagaccattattgccacattctcctacactgtggactgtttagaatttacaaagtgtgcttctaagaacacatttaatgtgtgctctgataacacattattccatttctaggtttctttttgagatctgagcatgtttaactcaatttctttgtgtaggatctgtgttaaggtctttgcatgtttagtagaattctatttccaactgcaaaagtctttttagcagaatctttttttttttttgagacggagtcttgctctgttgcccaggctggagtgcagtggcgcgatcttggctcactgcaatctccgcctcccaggttcacaccattctcctgcctcagcctcctaagtagctgggactacaggcgcccgccaccaagcctggctaatttttttgtatttttagtagagatggggtttcaccatgttaaccaggatggtctccatctcctgaccttgtgatctgcccacctcggcctcccaaagtgctgggattacaggcttgagccaccgcacccggcagcagaatcttttctttgtcgcgaggagccaagatggccgaataggaacagctccggactacagctcccagcgtgagcgacgcagaagacgggtgatttctgcatttccatctgaggtaccgggttcatctcactagggagtgccagacagtgggcgcaggtcagtgtgtgcacgcaccgtgcgcgagccgaagcagggcgaggcattgcctcacctgggaagcgcaaggggtcaggg

SEQ ID NO: 24906 - DNA, 2300 bp, Homo sapien
tgacatggggatatccaagcagagggagcccttgctgcatcagggcttaagggcttaaactttcatttgccaggttgtgaggaagttgcttagtcctaggaaaatgggcagggcagggatggttgcctgtgaggaactaagggcagcagcttttatcaaccaattcagaatatttcagtaaccattacagccaaatcaccagctcctggctgagtacactctgcagtgaggttcattatactatgcctataatagtctggaccccatctctctggaatagtacatattttacacgaagggaaaaggctaacttgcaacttatttgcatgaaaaatcacgttgcaagtacttcttagtttactagattgtctccaatagtttctcaaccttatcaagatatatttgttaaaactgtgtgctctccaaaatcatctactgaatttaaaccactgcaccccactttggactataattgactggagttactgattggaaaggaagtggtacacacccctaatatactgacggacttactctgacagctgctaccacctgtggggacccttgatgatgttcacgcagcttttctgagtggcacatgctgttctcttgaatactccttgaggtgaagaagaggccacccctacccctatgcacacacagctcctgctctttcctggggctgcaccctgcttgtatttccaatgcagggatgtcagattccaaagagggctccccaaggcattccagaaggcttcaggccagcacgtcccaaccttttcatgccatgggacccctttggcaggctgctgaaaaccatggggttcttctcagaataagggttttaaatacataaaagaaaccacaagaggttacaaaaaaagccaataatattgaaatgtagctaacaaaatgtttttaaaaatttgtgctagagcaatatatatgcttcattattgacatataatatctggctgattgtctaataactactgttatttgagatacttgcaacaactgtgatgtgatgtaaaaacctatggtttctagtgattactaagtcataaatacttatcctactgctactgtagtttgttgtctacgttcataatggcaaaacgtgctaaatgtcagaggttggtgaaaattaagacgtaaattttttctcatccaagttcacagtactcttgaattaattacctctcctcgggttaagaacccctgcaggataaggttgcccctagggccaacacctcactggagccccgcctcatgtcctggaggcaggagccttcatgccacctacacagaactcggagctgtctcttggcccagcagttctccccacaactagttctgaaagtccggggctaggaaagaacggcatcgtcgcctgagctcctggcgccactttaaacaacccatccttgacttgcgtgacttcttccacaagctctcctggtcacctgggcaaaatcctaggtgatctggggacaaggcggaacttcggttttctgatctgcaaaaagaaacacctacctcataggactgttaggatgaattgaggtaatggctgggttgtgtacattatacagcactatcaaggtgtgcgctgtgatcatttttgagggttgttaggtgtttgaggacccagaacagtctacacagctgtagtccccaagtgttgggcacgccttaagcgctccataaacacctgtagaaatgaatgaatgacgtatgcatctgcacgtgggcccacatctgcaagaacaggctgctcaggccatgaggcccggtgcatcacctgcacttctctttataacgggtagtaaagtctccctcgctctgtgctactcggcaaccacaattctgtccacagagggcggcgcagtggggctgcttcgccgcgagctcgcctccggggctcccacgtcgtggcttccgggcaggtaccgggcagctggagacgccagagccggcgggtaaggtgcgggcggtgcgccgggccgcgggcgcgcaaggaggggcgagagggtggggaggggcggggccggcgtcctcgtcacttgataaaacgcctgcgagtctccagagaacaacgggctcattcagcggtcgcgagctgcccgcgagggggagcggccggacggagagcgcgacccgtcccgggggtggggccgggcgcagcggcgagaggaggcgaaggtggctgcggtagcagcagcgcggcagcctcggacccagcccggagcgcagggcggccgctgcaggtccccgctcccctccccgtgcgtccgccc

SEQ ID NO: 24907 - DNA, 2300 bp, Homo sapien
actagatcagctgagaaaacaagtctgagtgatgtgcccagcccccaaagtactcggccgcacccgagacccgctcggctcctgcgttgggcgggcacagccaaggggttaaagcaaaatgtccgatctgagcctggactttgcaaacaaggtttgtaagggacaaccccccaccgtagcggtaaacctcccaggagaaagaggagaccggcactactggcctctccttttatttcttaaacagtgtttggttcccacatgatcggctatttaagccggagagggtattttggcgcttagtcgccttaatcgctatggggttgcattcttcatctgtgctactgaaaaataggctgtagcaacaaaaggtctcccctccccacccaggccttgagttgaactaaggaccttccaggaccaacagaccggagaaagcaaagtgcagccacagtgaagagattttgtgtttaggagaggcgaatgggattttagaactggaggaaacctcttgatttcagcggttaacaactttggaattcgtgaatgttgcagcccctgaattttagtcagtttttttttttttctgataacacctgctaggtgaagcacagaaattagctgggggtggggaggctctaggagggtggtctgaggctatatgcctggccagctgcttatactctgctttctctcagaaataattgttgttaagctgtaaatctgaaatgaaaggttcctgttaactcagttaatagatgacgtttattgtctcggaatacttggtgtgtagaatttgagcttgttagtgcagaaatgattgtgggccagcagagggaattcattctcctgggcattctctctctgcaccagagccccactgaaaccggtggcttccttgaaatacttgttcaagcaaaaagtgtgaagggaaagtactgggacaagaaatatcctggcagtggagatttgcgaaacgtgactttgccaggaatctgtgtcgtgaaggttagcagcatgcttgctaaaacttgttactgctgctgggcttctctggtattagagctgaggcaactcctcccgaggtaaggataagcctgcaatggggtctgatgccttctaggaaagctcttcttagcagctgacagaggggagaggccccgtataaggagactgtatgtttcctagagtccaaaggcagtgaccacactttaaagaggctgtggtttatgtcacgtgctgcccacctccatgcttttgtaaagctttattccagcttcaggaatagcattggtcttcccaggagaaccagcacacacaggccatagcacaggtcagttgtcaacctttgacagtaaagaatgtgggtgtaaatggcagagccagtaagactgagaaaacttctggaccagcttcctaaactctatggaaaaactcagtgggggtctttcagggacctggtgggagagagacctaagctgagattccttctcggccttttattagcagctgttaatttactttgagctttaatttctttatctgtaaaatggagatattactgcttactggggttattatgaggattaagagataatatgcaaagtgcttaatgcctgtctggcatgggtacttgctgactaaatggtagctgttaatgatcatttaaaaagcagtaattgtgtacctactgtgtgtcaggtaccttacaaggtgtcttaaacattctgtgattctaagattgcctgagagtaaagccaaaggtggttgtttttgggtaatgatattttaaactcagtcatatttatgaaacccatgttcaaagcaacttaactttaataggtcttaattagacttataacaaaagtgagtttaatgaacagaggactttgaggaaggagaagtaaaatatcagatgcatgggacggtcagataaaagcacgatcatagaagacctatcataaatgtttgtagttcaaattttctatagtgcctttaactattcagtcacattttaaactccagttatgacttttgcagaataatattgtgtcagagagccccaaaacatgtcgggtgttcctaaagctttggagactataaaattgaagtagataccataaacttcatccaggttttcaggctgtatattaaagaagtttcggactccaaaagattactcaatggtcagccaagttggtccgccgagtgactgaggtcagggtctgagcaccttggactctttaatttctcttaggtagttaagattgagtcattcccagaggtggaaggtatgtgatgat

SEQ ID NO: 24908 - DNA, 2300 bp, Homo sapien
atacagagcataaatctttttatgccctattttgtttccattgaagcacacacaaaaagcatgccatggctggggctctgtggccagatggttgtaagagctggactccatattgccctctaatctggtggctcatgtttttcaattcacttcacaatttgagaactgcaacggtagtggtgaagcttttcataagtaaaacccaataaagggggtgagcttatattattctgcatctgcctcacctttctatagaaacatttacttaatttgaatggttttgatatgggcacttctatttgcttttcaccagatctgttatttgtaatctgacatcctacctgatgctttataatgggtgtgtcctaatgttttctgccctctgaacaagtatataactgataccaatgacaacttcctcacctctgttgtttatactaggttctcaaataccatgtatcatcagtcattgttttgtctgcatgtttgtgtctgagaactaagttggtccaaaacaatgaaatgctatctatggtgtattaatgatgttagcatttgtttttgtctgattaccaaagagttgatgcctcttaccaagcttaattactttttcttcaattttattttattcctgtaaaaatactggtcattaaattacagcagaaccctgtaacatgcactcaattatgcttccagtcaggttatatattctctgtgtatatgatgtaacataaccaaattattcctggacaattcagtatctagcttgatctccttttaccatagttccaatattaaaatagggtggaaattgattcttaagatgtatgaatacttcaaaattcaagttatacataggtgcttttagttaaaagtcttaatatccatagaaagcagtaaattagctagccccaggactttgtccttgtgtcacatctgaactctgtcactcatattacgaatgtgatagctggtgggagggtcaagaggagagaggggtgggaagccagaggaagaggtaatgatggagttaccaatgtcataggcctaaaatatatggattgatgtgaggggctctatatattttgtttttctaggtttttctttggactcagggaaaggtattgtttctaaagatgagatcacttttgtatctggtgctcccagagccaatcacagtggagccgtggttttgctgaagagagacatgaagtctgcacatctcctccctgagcacatattcgatggagaaggtctggcctcttcatttggctatgatgtggcggtggtggacctcaacaaggatgggtgagaaagcctcaggttatattatgctgcaaatcatttctgctttgactagcttctatacgactggagaagagccgtcctttcaggttcattgacgtaaagaatatttttattgccgcatttttaccagcctatctttatcatttctatgatggcagcagacagacattcatatccctccccagcgtataggattatatttttgattttcagtttttacttatatgttgggatcatgagtctatgagaattaaaatttgaaaaaaattgactcagaaaacacttgcatgattctgttctgtggtttcatatggggctgatggagcatcagctcccgttgaaaacaggaattggtgataaagtaaaaaacagatatgtggctgttggtgccagttgggggggttagaacagtgaggtcttaatgggagtcctgctgtactatggttctaactcgagaaattggctttgagttcttacccttagtatttttcttggggcgtttattataggctaccttggtttttaaaaaatgttataattgagtcataaattctggagttgagggcctttctattatatgtctttgtatccttagtacctagactggtgttgctggtatgttagctgttggttcacggctctttcccctcattatgtttttaggtggcaagatatagttattggagccccacagtattttgatagagatggagaagttggaggtgcagtgtatgtctacatgaaccagcaaggcagatggaataatgtgaagccaattcgtcttaatggaaccaaagattctatgtttggcattgcagtaaaaaatattggagatattaatcaagatggctacccaggtagataatagattatgaaatggctatgatttatagattatttgattgtttaaataatagcgctgctgggcacagtggctcacgcctgtaatcccagcactttgggaggctgaggtgggcggatcacctgaggtc

SEQ ID NO: 24909 - DNA, 2300 bp, Homo sapien
cttttatatgcacattctctgtatattggttgaagcatggtgaatatactttggagaaaggaaaaagcactttatacaacagttgattccttcctgagggaaaaaaatcttgctaaaatagtctcaaggtttctgctgggcctttgtactttcacgcaaattaatgttcagctgagcatcttgacatgctcaggcagaaagcagcaaaattgcaaacagggattgagggagctgaataatgctgtgcatgataaagtgacaagactttggagctcagggaataatctagaaggaaggagattagaaaggaggaggcaacctgagaggctggggtagagctgtggaaatgtttgagggactattttaagaatgtgtaatattcaacttaaaattgttttcttctttccaacttaggtcccgcagaagaagggtgggaagaagaagggggccattcagccatcaatgaggtggtgacaccatcaacattcccaagcacatcccattgaaacggacttcaggaagtgtgcccctcgggcactcagcaaagatatctggaaatttgccaagaaagagatgggcactccagatgcgcatactgataccaggtttgacaaagctgtctggccaaaagaataatgtcccatacggtatccacatgtggttgtccagaaaaacataatgcgaatgaagattcactgatatgtgaaaggaaaatatcacgggccacaaaatcactgagctaaagggaaaattcaagctgggaactgctcaaggcaaacctgcctcccattctattcaaagtcatccctctgctgagacagatgcatatctgattgcttccttgggaaaggcttatcagaaactccaaagactgcaaccatttgtctctcacctacttataacctggaagccttcctccctgcttcaagttgtcccacctttccggcaggaaccaatgtacttcttgcatatagattgaggtctcctgtctccctgtataaaaccaagctgttcaccccttgggcacgtgttctcaggacttcctgaggctgtgtcacgggcacgcgtcctcaaccttgtcaagataaactttatacattaactgagacttgtctcaaactttcggagttcacaaaactatgtacccgttacactttctaaaaccaacagtcagtgtgggagaactgctgatactcgaatacatcaaatagttataaaaccgccaaaaaccgttttctctcaaacttttggtaaaatgtgcttcagggaaaacgcagattggtggttctgataaaatcttaataatgaaataattttaaaaagcaataatggtaaaaataaatcccatttattatctggtatgtccccggcattgtgctaacacagatagctctactacccatgtcacagcaactgaaacagataatatgctcctttttcaggtaaagagacggaggctcagagaggttaaacagctcactcaaaggcacagagccagtacatggcagtacatctcttctcccggggccgccgtcgcggtgatactatttagggccacacgtcccagtgttcagctttcgtatttacgtactactgtttggcaagcggggactcctgaagctctctgaccctggaaaatgcgtggcttgcgtcacagaggagcgtttctggaacgcgctcgcagcacgacaccgcggtgtgtgcaagcggaacgccgccctgtccttgagccttttggctgagattgggagggcagaggaagcaggaaggtgggatttgtttcaaaagggtgcgggaaggggacgctccataccgcctcgcctcttagtgtccccagtcccatcacccgacgtgtacggggacggccgacacgctcaccccacacctcgccggctggggcgggatctgggcggcggctgcggcctggcgcgcgctccgcatctccttcctcgggaggctgggcgggactccggcgagggggcgggccccgcaagcgcccgccccttttctctccccgcctccttcccgctccgcgtcccgcccagcggcgcagggggccgggctccggctaggagggtgggggccgcgccggtgacagccgatccccgcccctgctgcccgccacgtccctcacgtaccactcggcagaggcgcggggaaacctggcgtactggctgtggcttctctagcgggactcggcatgaggctggcgcggctgcttcgcggagccgccttggccggcccgggcccggggctgcgcgccgccggcttcagccgcagcttcagctcggactcgggct

SEQ ID NO: 24910 - DNA, 2300 bp, Homo sapien
tgtacctacctccagggctggatgaagacatgagcatgctctggacaagctagtgattgttggttctccttcgaaaggatgttctttaaataagtcttcaacttctctttagagaagaggcagggcccccacacagcaaaacaaaggccttgcagttcatcagagctacactccttaaaatgcactgtggactcctcgagggtctcactctcactcccagcagctcatcagtgtcttccttccaatccaattaacactctccctgaaagtactgatacatatcattttcaatatttcactacattttcaaggatatttattgctgtttgtggagtagtgtctttctggctctgcctcatagagtgttctgaagattaaatgggatcacacatgtaaggagtactgcacagggtctaacactcagtggatgttcaataaatggcgactattattagtatcataaccaaagctatggcaactctgagcctctgtgtgatgacaggtgatgtgcagctcctttctcctctagctccttacctggaaaccttctttgcagaaaggcattttcagaaagcttttggtgaccttgaaacattctcaggtgctctctgatgtctttataaatgaaacttaatatatataggagatacagttcctccttcatacctgtatagtaaaaaagccacaacataaatacctttggttaatctttctatagtatattattttaaatattagcataaacatgatagaaattaacagaatgaaggttaactgggggaaaagccctgagcagggagggaggagttgctgtgggaacactgtggcaggtctgaaactagatcctggctatccagcagagggaaatggcacatatttggaggcttttatatcatggtaataattgttttattaggatcaaagcatcccagaaagcacttgctctttccttctctccagtccccctgactctcccctgagcagggttggataggaggtttggtggggggaggaggcagggaacagtagaagaaagcaatgctatgtccctttcccccattgtctggccccaaatgtagtgccataaatatcaaaacagtgcttggtaatagtccaaaacatttaacttgtccgcaaattcctaaacaaccattggcgtgtaatttggttcttggcagagtgtaactgaataacttgtagacatgacatttgtgtgaacatctacaagagacaggccgttatcaccacccattcaacactccagccagaggaagaacagcaagggggccagccatacaagttcacctgcgcgtccggggtctcggttctgctgtggcccggctactccccattctcaactgtgttttcttcaccatgcaggtgatggaagcccaggcaggcccagggttcaaggccagtgacttcagcctgtcaccccctcagaccacatcgggcccaccggcctcctccctccctgcccctcagccctgcccgcactgccccccattgcgcccagcccttcctcaccccgcaggagaagctggcctctcattcctcactgagagactcgacgggcgtccccacgccaagccttcctcgccctcccctccagccttttctgaaggggagacagcaaaggtgagcaagcaaccgccggcaagtttcgacagctgctgaggaagactcatgggtttctaaggaaacagagaggcagcagccattttagtagcatttgctgtatgaaaaatatatagacactggcagccctctccccactctgccttggcgcctgccctcccgccccgcctcagaggccccggggtgagggtggggccccagtctccgagggacgcagcggacacctgtcgcaggtggccggccaccggggtcgccacccccagtgtcccccagcagcgggaccgcggggtccccaccccggggcggaatccccacccacgggcgccgcagtgcagcggcgggcgggcgggcgactcggccctccccgcacccgcgtcccgccccccgggtcccctccctctccccaccgccccaggccgcgggagcccgcggggagggcgggcctgtcgcagccgcgctggtcgccaggcgtccgggaggagcggggtccgcgcggcggacgaggcgggggcggaggcgcaggcagagcgagcgcgggaggtcgccgcagccagggacaccgcgcgccgccgctcaacatggtcgctgcgcacgctgcccattcttcctcctctgccgagtggatcgcctgcctggataaaaggtagctcgccgggggccgc

SEQ ID NO: 24911 - DNA, 2300 bp, Homo sapien
ccagcacagtgcctggaaaagaagatcaagatagcatttaaaagaggatcaagatagcatttcacagtgcctggaaaagaggatcaagacagcatttctcagaaacattgagggcagtgtctccactaaacaggtgtttcagggggcttccctagccaacttccataaacactctcaacctttctcctttcctaaaaaaaataaataaataaacaatctaagtaaaaacacaacttcaaaacaagtccccccatggccttcatacaatgagattgctgccctaaactgttcctcattggaattaattctggcatgaacactgcagaacatgcaaagttcttttaataccacaaaacaaaaagcctacatggcactcacagttttcaaactatttcaccttttttttctccttccatttgtccacttatccctgatagtcctatcctcatttttcagacactcaaggaagtaaaagtgacatgtccaatatcagaactggtaacagctctgtgcctaaaacccttaacttattgatctatccactcatctgactcttctgatgctaggctcagtatctgtgaagggtttttttttttttcctagatttttttcccattatgaatggtggcattaaatgggggcaccatgctctaaaaaatccatttcaagcaaaatcatttaggcagatacacattatgaaaagagagagtcgaatatgtcccacttgtgttagtattgctctatgattttgccataagtacttcttattgactaacgggtttccagtgaattaccgactgttcaaaaaatgccatgccatgcatttctacacatagaaatatgttattatctaaaaattttgctcataaggaagcactactatttataggttaagtgcaagatcctgaatcccatataattcctttttcctgaactattaaatgtagatacttatcacattaacaacctctatactttaaatactcttagttcttctacataatcctgtgtgatttaactattactttaattctcttactatttattgcatgcaactcttttaatattagtacatatcattttagacataaatagggcactacctgccaaaaaatcttgctactgagtggtaattgaaagtcaagattatttctcagatatattaagcttttcaaatgagctacatttagcttttctcaaattacttaatatttttcaacaaaggcctataatagagtatgcaaagcacgtcacacttaagattttcaagtttgatctggttacgaatctgttaattgaaaatttttcaatatggcagagcacaaaatatttcacacaaatgcaaatagagatgtcatgcagatagctgcaagacgtgcatcattgcccttctgcatcaaactccgaaattcagaggcagttcactctgcaagatttcttgctcagttcttaaaagttcagatgcatcaccttttaatcagggtaataagctataattgctaacatactgtgtaacgtttaaacctgcaatctggacaaacagaaaattatgctgtcacagcctggaaacaactgcaatccactgttaacacacacatcctccttagagagagctgtcgtcgggagttacatgctttatggttttaattatttttagcgtaaagatcttttcccgagaagcaggtattaagacgaaagcagcctcccaaatgaccttctctaacacagaccttgagcgagcgactgcgggggcagagagctgtgaatttcagcaagggattcgacagctccaccgggtccctcacactttgctttcaagaacaaaaaaagaatgttactctgcacctgccggtgcccccacccctctttaaaacttcataccccgcaaggtctgaatagccggaaagggtatgcatcgattcttctgtcccgtgatgccaagagaaaataaacccccacccaggagcggagcctggagtcgcggcagggcagggggttggagaggtgggtgctctctccccttactgcgctgcattttctccaccacgtgtaataatctcatgccgctggcaccccacgagaggcggggatccttgtcctcctgtctcccggacgaggacctcaaccccttcccccgctcggggaccccggccacccgcagcccggccgcgctgcgcccaggtgcggagctgcggcggtctcagggcccgggcagcaccgcagagctcggcccccggctgcggcccccggcgagctaccttttatccaggcaggcgatccactcggcagaggaggaagaa

SEQ ID NO: 24912 - DNA, 2300 bp, Homo sapien
acggagtctcgctctgtcgcccaggctggagtgcagtggcgcgatctcggctcactgcaagctccgcctcccgggttcacgccattctcctgcctcagcctcccaagtagctgggactacaggcgcccgccactacgcccggctaattttttgtatttttagtagagacggggtttcaccgttttagccaggatggtctcgatctcctgacctcgtgatccgcccgcctcggcctcccaaagtgctgggattacaggcgtgaaccaccgcgcccggcccatttttagttcttgagacaattataatttacaatttaaactctttgacactagtggcattttctaccctcagtaaggaagttaaatggcaaagcagttaactgtaagtttgggagtttaaagcagttattatattaatagttgatctaagattatgggtattttatgattgatagtagctcttggaataaataaaaactgatctattatccaagtccatgaatttctgctcagcacagatagtataagagggtttccaatggctagaacaaaacagtgaaggttttgttgggttttcttcttgactttctgtctgatgttgtgtttgtatgaggatgatttcaggtttgtggcatgttttgacatctttacatggaatatttcaaatacatgaaattgaatgaggtgatgagtccactgtattcaggaaagtagattagagaggtgctcttggttaaatccatgaaagatgcttctgagaggcccttgaactagtggttaccacctctttacctgtagttcaattgcatgaacaccattctggaaaaatttccctgttgccatgagccatgtttgagcatattcaaaataataacacatatttatgaatatgttcttaaaaaattaaagacaataataaaattacagagccattaaaaataaaagcaatgttttcaatttgtagtctgacctgtgtcactataaaagtggtttcttagctgtgattgttatctgggagcctcttgacatgctattgtgattttattccaaccagggcaaaacgtgtcatggagagccgttgcttggatataatgattggcacattagattcactgctcaaatgtgtctgtggcctcagtaaacattgttaactgactgaaaatgtatttcatgctttatgagatacaaaactgagtggtaaaaataagaaagtgcacgtttctgtcttaagaaaagaaagtaattagtaaatagagatattaatcagaataatgaatgctgttgaagaaatatgtttatgactgtctctattccctaattttcagaatgtttatttttctataagattctaccagatatgttggcggttgtgaaactggaaagctttttagttacttccatttactgacttttttttagagtaaataggggaaaatcccttttccattaaaatctttcaagccacagtgagaataaggattgtttgaagcaacagcagcttagtctttgctgaggtgctttaaaaacactgttagaataatataccttccagaggcatctgatcttgctctaataggcttgatgtttctatctgtctgtagctgtcagaaaaatgaaagccaaatacttaaaaattaatatctcagaacacagatatcccagaagttctcaggtaaattgtatggctttatccaccatactaacaatttcaggttgtttcacttttgcattaatggtaggcttttcaggtttatatttaatgggcttgggtattgagttaggaatgcccggcccacctgcagacaaggcagccccttgcctgcctgataatgcacggggaccgagacccataccctcatcaggagcaaccagagcctccaagccaaggggcctgcattctcccaagtcaggagcccgagcttacttttggcaaccttggagcttgtactgtagggttacttctcaggccagaaatttgcatcaaaggactaagaaaaatatatccaaaaataaacatgaaagccaagacttcatgccaggaactccagccacacacatcctgttggctggttctcttgtctctctcctcacagttctgattcttttaaaccaagcggaagcctgcttcgatgacttggacttatgtctgcaccagggtctcattcctgtgtcttcaagcttttccatggagtggcaaaatgattcaaatccagaaaggaagggagtgaagttattaggagctaactaaagttaaaaaaaaaaaaaaaaaaaaaaaaggaagtgttttcttattgccttaga

SEQ ID NO: 24913 - DNA, 2300 bp, Homo sapien
atcatacaatcattatatatttatttcagctatggacaatacatatgcagataccacacaatataagatgtgacctcaaagggcttgcaacctatttgggaagacaagaaaatgtctactagattatcatttaagcatgtttctgaaactaatctttagtgttcattgttcctgctggttattctcttggcctaattatgtgaggaaaacagaatgaaggcaaagggatgggaagcaagggcaatgtggctaaaaatattgatgctcttaagccatgtgttccaaatttaaagcaatacattcatggttttaaagctggaacctgcaactaacttctaattagtccctcttattttacagaggaggaaactgtggcctatcctgcaaagcactctagctgataactggtagctctaagaccagaagtcaggttctctgactctcagtctagggtcctttccaaaacaaacaagtgcctctgaaggtaaggtaaaatgactggagtcttcctatgcctggggtctatgctaaagagccttagtttttccttgaatggataggatggaattatttgaattattttattagacctgcattatacatttttttagcatggcaattttcatcaattctaatttctcagttaccaaaataaaatttattaatgctaaaatctccagtccttatcaaagggcaaattaatcagactaataaattgttttttaacctctactcattcatccctcaactttcatatctttaacctattgaatgacttacaaattttctatttcactcttgacctctttcctgaatttcagtttcatatttcagttgctgcatctctacctgtttttactcctatgacctcaaactcaacatgaagccagcttccctttcacgtattcctatttttgtcaatgacaccatcattcttccagtcatccaggtctgagatcttggcatcatctctcttcttcttctcttctaaatcttgtgggttaccaatttctgtggcctcttgctgaaacgtttaatatttctctcaattccatttcttcttttttttttttttttttttttttttttttttttgagacagagtctcactttcatccaggctggagtgcagtggcgcgactgtggttcactttagcctcgacttccccagctcaagcgattctcccacctcagcctcccgagtagctgggactatagatgtatgccaccacatcaggctaattttctgatttttttggagatgaggtctcactgtgttacccagccaggtctcaagcaatcctctcagcttggcctcccaaagtgctgggattacaggtaccatgcccagcccatttcttctttttaattccatttcctacatcctaactcaggtcctcatgatcccacaaccgggtggtgacaatatctactactcatcctggttccatcctagcaacccaacctacaactactgtggactactctctcaaaattaccatttaaacagaatcacaaacccccatttcacccctttgattctaatttttcacagctcccagtgtccatggataataaaattcaaattcaaaatcctgaataatgttgcccatgcccttgcaacctcctctcacttttccttcacagaaccatcctccccaatcagaaatttcttttcttcccaacgcccacctccacctttggcttaggcctgtaacggactctggctcctcttctgaattctgctctgttaaaattagcaactagagcagcagaccacggcccctcctcaaaattccagaggtacctactgatctttctagagaggcagccttcagacctatgttcccagaaatctctacgtttgtgcctttcccaactagagaattaactcttgcggggcacaaaacagcctctatttctttgcgtccccagcgcctgtttgttgaagactgagttgaaggagtagcaggtggtgttaatttgtcaaaaagatgagttaaggtgctgggggcgagggggaacacccccacggccctccccccacagcaaggcaggtgtgtctgggggcctcggcgggtgccggggcgcggggcggatggtgccccccgggcgcaggccagggaggcccgagcgccttccccacgccccgctcgcccgcgcgtgtgaggggagggcggcccagccgtttcgcgccgggaggtaggtggtgctgttgccgtgactgtcttcctcattggcgccgtgcagagaggcggaatgttcaactcctaactgcagcggaaacgtgggagccgcgc

SEQ ID NO: 24914 - DNA, 2300 bp, Homo sapien
attatcatttaagcatgtttctgaaactaatctttagtgttcattgttcctgctggttattctcttggcctaattatgtgaggaaaacagaatgaaggcaaagggatgggaagcaagggcaatgtggctaaaaatattgatgctcttaagccatgtgttccaaatttaaagcaatacattcatggttttaaagctggaacctgcaactaacttctaattagtccctcttattttacagaggaggaaactgtggcctatcctgcaaagcactctagctgataactggtagctctaagaccagaagtcaggttctctgactctcagtctagggtcctttccaaaacaaacaagtgcctctgaaggtaaggtaaaatgactggagtcttcctatgcctggggtctatgctaaagagccttagtttttccttgaatggataggatggaattatttgaattattttattagacctgcattatacatttttttagcatggcaattttcatcaattctaatttctcagttaccaaaataaaatttattaatgctaaaatctccagtccttatcaaagggcaaattaatcagactaataaattgttttttaacctctactcattcatccctcaactttcatatctttaacctattgaatgacttacaaattttctatttcactcttgacctctttcctgaatttcagtttcatatttcagttgctgcatctctacctgtttttactcctatgacctcaaactcaacatgaagccagcttccctttcacgtattcctatttttgtcaatgacaccatcattcttccagtcatccaggtctgagatcttggcatcatctctcttcttcttctcttctaaatcttgtgggttaccaatttctgtggcctcttgctgaaacgtttaatatttctctcaattccatttcttcttttttttttttttttttttttttttttttttttgagacagagtctcactttcatccaggctggagtgcagtggcgcgactgtggttcactttagcctcgacttccccagctcaagcgattctcccacctcagcctcccgagtagctgggactatagatgtatgccaccacatcaggctaattttctgatttttttggagatgaggtctcactgtgttacccagccaggtctcaagcaatcctctcagcttggcctcccaaagtgctgggattacaggtaccatgcccagcccatttcttctttttaattccatttcctacatcctaactcaggtcctcatgatcccacaaccgggtggtgacaatatctactactcatcctggttccatcctagcaacccaacctacaactactgtggactactctctcaaaattaccatttaaacagaatcacaaacccccatttcacccctttgattctaatttttcacagctcccagtgtccatggataataaaattcaaattcaaaatcctgaataatgttgcccatgcccttgcaacctcctctcacttttccttcacagaaccatcctccccaatcagaaatttcttttcttcccaacgcccacctccacctttggcttaggcctgtaacggactctggctcctcttctgaattctgctctgttaaaattagcaactagagcagcagaccacggcccctcctcaaaattccagaggtacctactgatctttctagagaggcagccttcagacctatgttcccagaaatctctacgtttgtgcctttcccaactagagaattaactcttgcggggcacaaaacagcctctatttctttgcgtccccagcgcctgtttgttgaagactgagttgaaggagtagcaggtggtgttaatttgtcaaaaagatgagttaaggtgctgggggcgagggggaacacccccacggccctccccccacagcaaggcaggtgtgtctgggggcctcggcgggtgccggggcgcggggcggatggtgccccccgggcgcaggccagggaggcccgagcgccttccccacgccccgctcgcccgcgcgtgtgaggggagggcggcccagccgtttcgcgccgggaggtaggtggtgctgttgccgtgactgtcttcctcattggcgccgtgcagagaggcggaatgttcaactcctaactgcagcggaaacgtgggagccgcgcgggccgctgtcgtcccaacccccgccgccctcgtcgcgcgcggggcctccgcgcccccggctgctgctcacgccccgcccgggagccaggtaggggtcaggctggagcccgcggagggcggg

SEQ ID NO: 24915 - DNA, 2300 bp, Homo sapien
agtgtttaatgtttaggaacatgtaaacttgtacaactaagtccctgacatacaatccttttacagtagccaaagcctgaagacaataggtatatttattttgggagtaagcttactagattataatattttaaggaattttaatattgatccactacaaacacagttattacccataaggcaattttttttttttttgagatggagtccagctctgtcacccagggtggagtgcagtggcatgatctcagctcactgcaagctccgcataaggcaatttaaaaacaaaacaaagaaaagggttggggagaatggtttaaacaaagatgattaacaaaaagagcaaagcaaaaatgcttattttgctagtgaaagctggtttagagccttactatttctgtctcaggcctgaccattttattttgaattttaagatataataatatactagcaacaacaacagcaaataccataataacagctatgttatgatgacaagagccaggtgaatggagcactttacatagatacactttattcttttaaagatacttatcttacttttattttggagcaaatctaaaataattactaagtgaattattagtgaaacaattagtaagcatagtgaaataattactgagcattcttcttcctcaggtaaggagaagataaaatatcaccagaacaaacttaaaaaaaaaaaaaagcttggcatggcggcttatgcctgtaatcccagcattttggcaggccaaagcgggcagattgcttgagctcaggaatttgcgacaagcctgggcaacatggtgaaaccgtgtctctataaaaaatacaaaaattaactgagcgtagtggtgcctgcctgtagctccagctacttggcaggctgaggtgacaggattgcttgagctcaggaggttgaggcttgagcccgggaggctgaggcttgagcccgggaggctgaggctgcagtgagctgtgaaggcgagaggtggcagtgtgctggcagcccttgcacccctcgcttgcggtgcctcctgggccttggcgcccactctggctgcacttgaggggcccttcagcccaccactgcactgtgggagcccctctctgggctggccaaggccgaagccggctctctgagcttgcggggaggtgtggagggagaggcgtgggtgggaactggggctgcggctggcacttgcgggccagcgtgagttctgggtgggcgtgggctcagtgggccccgcactcggagcagtcggccgcgctgccggccccgggcagtgaggggcttagcacccgggccagcagctgcggagggtgtgccaggtcccccagtagtgccagcccgccggggctgcgctggaattcttgtcgggcctcagctgcctccgcgcggggcagggctcgggacctgcagcccaccatgcctgagcctccctgctgccgtgggctcctacgcggcccgagcctcccagacgagcactgccccctgctccacagcccctggtcccatcgactgcccaagggctgtggagtgcgggtgcacgggccggactgtgggcagctccacctgtggcccctgtgcgagatccactaggtgaagccagctggactcctgagtctagtagggatttggagaacctttatgtctagctaagggattgtggatgcaccaatcagcactctgtatctagctcaaggtttgtggatgcaccaatcagcactctatatctatctaatctggtggggacttggacaatctttatatctagctaaggtattgtaaatacaccaatcagcactctgtgtctagctcaatgtttgtaaacacaccaatcagcaccctgtgtctagctcaaggtttgtaaatgcaccaatcagtgctctgtgtctagctaatctagggtggatttggagaacttttgtgtctagctcagggactgtaaacgcaccaaacagcaccctgtcaaaacggaccaatcagctttctgtaaaacagaccagtcagccctctgtaaaatggaccaatcagcaggacgtgggtggggccagatgagggaataaaagcaggctgccctccctcagccatcagtggcaacttggtcgggtctgcttccgcgctgtggaggttttgttttttactctttgcagtaaatcttgctgctgctcactctttgggtccgcactgcttttgtgagctgtaacactcacggagaaggtctgcaggttcatttctgagccagcgagaccaccagcccgccaggaggaagacgctgccgaacatcagaagg

SEQ ID NO: 24916 - DNA, 2300 bp, Homo sapien
aatttacactactaacatcattgtgggagtttctcatattcttaacaatatctggtcttatcaggcgctttaaattttgccagtctgagtgaaattgtatctcctgtgtcagaggcatttgaactacagcaactccatcttgaataggagctgggcaaaataagccttgagacctgctgggctgcattcccaggaggttaaggcattctatgttacaggaagaggtaggaggtcagcacacgacacaggtcataaagaccttgctgataaaacaggctgcagtaaagaagccagccaaaaccaagatggcgaggagagtgacctctggttgtcttcactgctacactcccaccagcgccatgacagtttacaaatgccatggcaacatcaggaagctaccctatatggcctaaaaaggggagccatgaataatccaccccttgtttagcatacaatcaagaaataaccataaaaatgggcaaccagcagccctcgggctgctctatctacggtgtagccattcttttattcctttactttcttaataaacttgctttttcactttacggacttgccctgaattctttcttgtgcaagatccaagaaccctctcttggggtctagatcgggacccctttccagtgacacttgttttaatttgcattttcctgattactaaaaagacgaatagaccagagatcttatccttaaaaaacacatacaccaaattattttcttgtgctcccaggaagactaaaaatttccctatcagaacctttcacaggcaaagtgacttaatcttcccctgcttcatggatctagtaattccaaattttcatatatttagctttagtggcacaaaattatattcccaaatgtttattcattcaacaaatacttactgagggccctgtaattccgtaatttcaccacccaccgatagcctctcctcctggcactcaccttctagaccttgagctctttgtcccttgcacagtggcagagtgattactgggtaggtatatttaagaaaggctggaagactccttccaatccattgtcctcgggcattatttacttgctcacagtttttgtattcagtacaccaagagaggaacacagtatgtccatgcactctcttactgcaaaggaattaattattccccagagaaaagttttgaaatgagggggaaatgcgaatgttttcatttcaagcgcttgttttaaatgttaagagtataattagtgtcttctaaagaaactaaatttactttttcttgtagaagcaagttttgctcttcacgcacacaaaaagcctcgctttatttcattttttcgttgtaatgccaagtttggttaaaagggcaatgaaaagttttctcgttcgcactgactcagggtagttctcaattctgaagacagagaagatcatcaagccacaattgttcaatctttagtttcaatccccaacagataatcgttaaaggttaactatactatagacgtcttcatcaagctgctgcggcttttcttctactttgaaaaccacaagtaaacaagtcggcttcctgtgctttttggaaagaaagatcaggatttaactcattttattgcttcagataatggtgtggttcccagataagaggtgctacatccaggggcggtgaactcgattatgaagggtggagttcgtgctggattctatgattttttaaatcttgtaaaccgcacgcagcaatgaaagtgctaaacgccatggtgcgtgacccgcgccaccctcacgctgctctcctttaccccccagactccacttttcctccgccaccacgaaaattcttgcaaatcagacagctaaccccggggcaatacgaaccattttcgcgccactcgctcaggaccgcgcagctgcacaaggagagtggtccccgtagcccctaaagcccccctttctcaaaggggattttaggagtgcccaaggctatcctttgaggtcagaatatataggggggtcgtgttttttccagggggccacctagtcttgcgccatgtctggccgttaccacagcttgcaggacctgtgtcccaacgcgggaaagacagcccgagccccgcccctccgggcccgggtcggcgcgcccagcctgccagccgcgctgctgctgctcctcctgctgtgggaccgctgaccgcgcggctgctccgctctccccgctccaagcgccgatctgggcacccgccaccagcatggacgctcgccgcgtgccggtgagggctgggcgggcgaacccgaggggcgggcg

SEQ ID NO: 24917 - DNA, 2300 bp, Homo sapien
cttccaagtagctgggaccacaggcatgcgccaccatgcccagctaatttttgtatttttttttgcagagacggggtttcaccatgttgcccaggctggtctcgaactcctaggctcaagtgattcacccgcctcagcctcccaaagtgctgggattacagatgtgagccactgcacccagccaggagaacacatttgttcttgtcagaattcttttaaaatacataaagatctgtttctaaagaaatgaaaagcaggtggtaggaattttaacattttaaaaaaaggctcagaaccacaggcctagggactatgaaaatagcttataacagtgtggtccagatgggctacatggaattaaactgcactctgttgatgtactctttgtggttcctgattttgttacccagaggtatcaatgttcagttaaaattcatttcatacaagtgtctcattgaaaagggactttgtagttatactgatgcagcttgtctgctgatcaagtcctaatgactcaattgttgtgattagaggctgcagtcagttcgggaaggctgtaggacccgcagccagtgcaggcactctggacctctcagggtggcgatgaagtttccagcgcggagtaccaggggagcaaccaacaaaaaagcagagtcccgccagccctcagagaattctgtgactgattccaactccgattcagaagatgaaagtggaatgaattttttggagaaaagggctttaaatataaagcaaaacaaagcaatggtaggtatctgactttgtgttagaattaatttttcctctctaagcgactcattacttaaatctgttccatcacgcaaaagttatttttttctgttacatgaataaaaagttatttttgtttacctgtgaagtcttcaatgtgtgcctcaaaatgtgtttctttccctgaactactttttttaaatctgttaaaggcctggttaagtgtataggggaaatcagaaactctgaatgtgtcagcttactatcaaatataaaaccatgagatgtacttgagtattttccagaagttagttgctcattttcgacagttattctaagccaatgatatcagtttaatttcctccctttttagcttgcaaaactcatgtctgaattagaaagcttccctggctcgttccgtggaagacatcccctcccaggctccgactcagtaagtaccagttcttgtttatatacagtagtgttttgggcacacctaaggtcgatctgtgttgtatttaaaaatctaatttctttatttgtgtggccttctagacaaacgaaggggacctagaggaaaccccctgacagatctctggatgatcctccttgaatcctgggcagtttggtctctccttgctgtgctcctgtggcactaaactccttttgattggttctttctttccttcccagctagactaagcccctcatgggcaggtaatgaagattgaaaacttttttctgttctccagtgtgagcacattcctcctacatggtagatgtgcaatagatgtttttaaaattggagaatgaaaataaaagaagaaaatcacaatttcttatcaagttgtagcttggtatcatacacaattgcattctgaggaattaaggtggtacaacttagggagatttggtgtgtctgctgtgatagaaaagatttctttttcctggctttccctgaggaaaggaaagatggaaagagggaagccatacagatatccctctattttgcagtgtagaaactgaatgtgtttctacagggtcaagagacatcagagaaaatttttttttttagaacagaagatcatttcttacatcttcattaagtaaaagaataaatagctcatctctcaagttgaaagaaactgggcttggtattacaaaagcaaaattaagatggccatataggttttaggctcattttgccatgcattatgcaaaggacaaagaaaaagaaaaaatagagctctctttacttaaaacatccttaaggagaagctatgaattccccaaagtactacttctctttattatggaataaatggattcccttatacgtgctttgtttagcaatcaaggagaccgcgaaggcgtacattcccgggtgttgcttccaggagaaaccctgaacggagagctcgtcctcttaccaggtcaaggtcccggatcctcgggtcccttgacgctctacccatggaggaggaggaggaagaggataagtacatgttggtgagaaagaggaagaccgtggatggctacatgaatgtgag

SEQ ID NO: 24918 - DNA, 2300 bp, Homo sapien
ttttcacattgtattagcatggatgtgtgtatgtctgcttggattgacagtgaaccgtttgaagattgggattgtatgtcatgggtttactcacgtgtgtatttcatcttggtaaattacgttcaaatgtttgaattcagtcatttaactgtggttcatccactgaaataactgtatatatttctcaactatgtcttcatgaaaattaggtagtgagtttctttaagaaacttaagatttttttgtttatcatatttgcattaagttttatagaatggtttatgttgagagaactgtgtatgtctcaactgatttttatggtcccattgagattcccattgagaatataatgaaaccctagattatctttctctccctcaaattgtattaatacaccagaatacaaaaggtatatgccagacattctactgaaaacttagactagtaagtaaagtcacagtgtgtatcctccagcttctgatcctagagaaacctttcaaatggggctacgttgtcatgtggtcacagggcaatgactttttctcattaagtttttttaaggtctttgtttttcattagttcatggaaaaagtagagtttgatagcttaatggaatagccctagccatgagtttactttagagtatgttaatagatgccacaaaagagtagatttcattgtttgattttaggcttatagcaataaatcttttctaagtcggatgacttaatacactatgcttatgtttcctttttatacacaaatataatgcacctgatttggtcatagccatctccactgttttgttttgtgttttaactgtgtagtgttagagatcatagatgcaggattagaaaattggtctgtggttgtgatgaacattccgagaattttttttatcccactcaaataggatgaattgtctttgcagtaacaaaactggaagtgataattattgtagttcatatagtactgctcctgtatttgaactccattgtgttttaagataagttgaattttcaggtagtaggatttataccagtttttagaattttttgagggttgatttaaatataccacaaatatatcacctttttgttttcttcatccagacaggtgatttggcttctgcacagttaggaggagcaccaaaccgatgggaggttttgtcagccacacctacaactataaaagatgaagctggtaatctagtccagattccaagtgctgctacttcaagtgggcagtatgttcttccccttcagaatttgcagaatcaacaaatattttccgttgcaccaggatcagattcatcaaatggtacagtgtccagtgttcaatatcaagtgataccacagatccagtcagcagatggtcagcaggttcaaattggtttcacaggctcttcagataatgggggtataaatcaagaaagcagtcaaattcagatcattcctggctctaatcaaaccttacttgcctctggaacaccttctgctaacatccagaatctcataccacagactggtcaagtccaggttcagggagttgcaattggtggttcatcttttcctggtcaaacccaagtagttgctaatgtgcctcttggtctgccaggaaatattacgtttgtaccaatcaatagtgtcgatctagattctttgggactctcgggcagttctcagacaatgactgcaggcattaatgccgacggacatttgataaacacaggacaagctatggatagttcagacaattcagaaaggactggtgagcgggtttctcctgatattaatgaaactaatactgatacagatttatttgtgccaacatcctcttcatcacagttgcctgttacgatagatagtacaggtatattacaacaaaacacaaatagcttgactacatctagtgggcaggttcattcttcagatcttcagggaaattatatccagtcgcctgtttctgaagagacacaggcacagaatattcaggtttctacagcacagcctgttgtacagcatctacaacttcaagagtctcagcagccaaccagtcaagcccaaattgtgcaaggtattacaccacagacaatccatggtgtgcaagccagtggtcaaaatatatcacaacaggctttgcaaaatcttcagttgcagctgaatcctggaacctttttaattcaggcacagacagtgaccccttctggacaggtaacttggcaaacgtttcaagtacaaggggtccagaacttgcagaatttgcaaatacagaatactgctgcccaacaaataactttg

SEQ ID NO: 24919 - DNA, 2300 bp, Homo sapien
aaacgttggcagtggttgatgggcttatttcaggagatatctgacttggtaccaagaggataaagaggccgggaataatacgtttgtgcagcaaaatggttatgtgaccgattttttaaaacacagaattctgccccactgaatacatacacataccacaagtaaaatgaaatatacttttaagtgcccgttttggtgccactggccaaaattaaaactctccttccgtatgtgaggtgacttgagatttcttttttgctttaaatgcctgccttcagggtacgtgaaagtgggagaccggttggaaaactggggctaagggggctgggagcgagatggctgtgactgaatcaggaagctggatgtgagagagaaaaatcctcctccagcctcggagggggtgtctcccctaataccagctccctccccccgggctcgtggggcgggtctggtttgctcagtagcggcagcggccgcagcagcagccccggggctgagcagcggtggcctcctggcagcgcagggaagcggcggctccaagagcgcgaggccctggggagatccggccaagactgctgccgggatggaggaagcgtccagtggagcaggagtcaccggggacgaatttcctccccagctcagctcccctacagcttggctaggcctgctccgagcgcctgcaaggtggaggaggcctgcgcctcgggcctggcagcggcagccggcgagggaggcgggcacagcggggtaaccggcgagccgtagccgctctcgaaaacctacgctgccacggccgctcattgtctctccccttccacccgggggcaaacaggaagcgcgccgcctggcagaccgacggacaggcgcctggaccaatgagcacagccgacaaagagcacggcggcgaatgagagccaagaagaggggcgggagttccgggcgggctgtcaccctcttccccccttttgggctggaggctccaccttttgtgtttcccgcacagtcaatcaaaataggaaaaaaaaatccccggaccgctccggccgtgtccgccgccgcttcccgcatcctctcccgccgccgccgccttcgctcctcaccatgtgtaaggcggcggggagccccgcctgaggtgccctaaacacactatgaccggtacgtaaagccgagagagcaacccttgctgctgccgccgccgccgctgccgccgaccacagccagcccggggccgctgccgccggtctcggccccgtgtgtgcgaccgagtgtctgtgagaggcagaaagctgcactcccctgcgcctccctcccctccccgccagccaccgtccacccccgaagccccagcaacgccgtctccccgccaggccccggggcgggcggcccggtccgccgggagcgcatccccctgtgtgcgggcgcgggcgggcgtgtgtgagtgactgacggtgcgagaggagcgagcgcgagtgagagcgagcggcgcgaagggaaaggggaggagaggagagggggcaggggcagcgcggggaggaggaggaggagggaaagaggaggaggaggagggttacaggcagcggcgggcgggggcagcagcaggaggggaggagggagccgccgccgccgccgccgccggggggcgggtgggggaggggaaggggcctgggtccgggctttgggagtaatttcgcttcggcccgcgggccccctccctctccgccacccgccttcctccccacccccacccccccgcgctgtgcctgcagctcccgaaaagcccgtgaaacaagaggaaatggctgccttggacgtggatagcggcggcggcggtggcggcggcggcggccacggcgagtatctgcagcagcagcaacagcacggaaacggtgcggtggcggcggcagcggcggcccaggtgaggagcggctgaaccccggcccggctcccccctcgcgccgctttctcctcccctcgcctctcccctccctcctcgcctcacccctccctcctcgtctctcccctcccctccactcccctccccccgccccgggagctgcccgcccgaggcgccaacgctccgaccccgcccgcgccgccccgcctcgcccgcctgccgcctttttgtgcgcgtgtgagtgtgggccccagcgtgccctcccgggggtgggttccgggcggaaggcggaggcccggcgcgcagcccgccgcccgcctgcccgcggaccggggagccggggtgcttggagcgggggacgccaggcgtgggctggcggcgggaccaggaggaggaggaggaggag

SEQ ID NO: 24920 - DNA, 2300 bp, Homo sapien
tcttaaaagcatcgcatcaaaagcagtatagttagttcaggtaggtttttttttttgggacagtctcagtcttgctggagcgcagtggtgccatctcggctcactgcaacctccacctcccaggttcaagtgattctcccgtctcagtctcctgagtagctgggattacacgtgtgcgccaccaagcctggctaatttttgtatttcaagtagagatggggtttcaccatggcaatcaggctggtctcgaacttctgacctcaagtgatctgcctgccttggcctcccaaagtgctgggattacaggtgtgagccaccacgctcagctaggctatttttttctttttcagaagtgttttttttgcttgtcaaaatggtctgcggacgtgccgtccccaccccccaaaaaagaaagaaaaaagacaattcatgtctcatatcatttgccaattggtatcaatgaagaaacgaatttaactcctgtggccaagtactttgctctcaaggtggctggactaacactttgcaaaaagggtatggcgatagcgtagaacatatccccactcctgaaaaaaaaaacaaaacaaaactgaaaatgcctgaaatatcctttctagggaaagagctaccttccacccaagagatccgggtaggaacagagtgataatagtgacttcccttcctccctcccagtccacttattttcacctgtcccgctcttcaaggcacccatctctttttccattttccccaccccaaatcaggttattttgtgacttttatttccttaaaagtttttgttgtaaaatagtacataggttatacgactcaactttgaaagtgacttttccacttaaatatgagactacaaggactattagaagagatgaaccctattcttggactcagaattttgagtctcgtttccgcatgtttgtggtttttaggttaattccctggaaatttgatctttgtacaattaagagcaaagtaaccatacaatgtttctgatcctgtcagcataggcggttaagtgctttggaactgggatgtaaactcagtatctcacaaatggattacctattaagttaggacacacaaaatctggttaaagtgcttggacttcacaacctcatccaccagcacatcacatatcacacaaaatataataatcacagtaatgggaaaactgaatcttgagccagatttctaaaaaacaggtattgtggacagtgtttccacctcttgaatttaacttctttcttggcaactatacttgaaggtaacagggagagatgtctcttagttggcaaaacacacacttaaaacctgagcattttcccccaggatgacagcaagataccaaggatgccaaagaaggaaggagtgttaacctaatccagtaagagaaacaagattttaaaatacaacaaaaatgttccaatgggggaaaaaaggtagttcaccggttcacgactttaaaaaacgttggcagtggttgatgggcttatttcaggagatatctgacttggtaccaagaggataaagaggccgggaataatacgtttgtgcagcaaaatggttatgtgaccgattttttaaaacacagaattctgccccactgaatacatacacataccacaagtaaaatgaaatatacttttaagtgcccgttttggtgccactggccaaaattaaaactctccttccgtatgtgaggtgacttgagatttcttttttgctttaaatgcctgccttcagggtacgtgaaagtgggagaccggttggaaaactggggctaagggggctgggagcgagatggctgtgactgaatcaggaagctggatgtgagagagaaaaatcctcctccagcctcggagggggtgtctcccctaataccagctccctccccccgggctcgtggggcgggtctggtttgctcagtagcggcagcggccgcagcagcagccccggggctgagcagcggtggcctcctggcagcgcagggaagcggcggctccaagagcgcgaggccctggggagatccggccaagactgctgccgggatggaggaagcgtccagtggagcaggagtcaccggggacgaatttcctccccagctcagctcccctacagcttggctaggcctgctccgagcgcctgcaaggtggaggaggcctgcgcctcgggcctggcagcggcagccggcgagggaggcgggcacagcggggtaaccggcgagccgtagccgctctcgaaaacctacgctgccacggccgctcattgtctctccccttcca

SEQ ID NO: 24921 - DNA, 2300 bp, Homo sapien
cagcactttgggaggctgaggcggatggatcacttgagatcaggagttcaagaccagcctggccaacgtggcaaaaaccctgtctctactaaaaatacaaacaattagccaggtgtggtggcgggtgcctgtattcctatctactcaggagactgaggcaggagaattgcttgaacccaggagggggaggttgcagtgagccgagatcacgccactgcattccagcctgggcaacagagtgagactgtctgaaaaacaataataataatagtggaagctggggtggggtatataggaactctctctgtaatgttctcagtttttctgtaaaattaaaactattctaaaaagtaaagtctatttaacataaaaaacaaaaaacattcctgtctatgctcctaggtaaacagagcacagagactcagtttcagcagagcggccctggtttggctccaaggcacttgcgagggtgcccagagagagaatgtgacatgtggcagaaagcagagccacagagacgacagaagggcctggggaaggggacagaaggtcataggaagacaggagaaggaggggtggggaggatggcggtgagacagccccggtgcttcgggccattccttttcctagttgccctccccccaggagccctctactccaaactctactcccaccctgctgggtttcctagactgcatgattttgccaggtactcccctccactcctctccacccggcctctggcttccctggggctgggccagtgggaggccagggaggggagtgggctgagagcacttaggcccctcccccaccagtttgcctccagggccccctctcttgcaggggcgttgctcctgtcaggcagcccctccctggctcttctcactggtgccctggctgggaactggagctgtgcttgcccctgcaggcctggccacggtgatggttcctgcggtgaggactgcactatgccttgtttctctgatctctgcccacatcttagtaaatcctcccattattaaacacttctcagttactcaattgagtacgtcatcggtttcgccccgggactgcaatggacagaaaaaaaagtgactcacacatggtgtttctttagtgttcaccttcccctttagaacagaaactccacgagggcagagattttatatgctttgctcattgtcactgctgagtcactccataaatttaacttgtgaaatgaatgagtgaatgctcatttgatccgcagtgtctcatgtggcagtcactcctgcatgtggcagtcactagcacgaaatgtggctagtgagaccgaaacactgaattttaaatgataatctacagagctacctgtggctaatggctacagcctcctctctaaggggatctcctgcacttaggcaatttcctagctattcaagtctattccgccccaataggggttaagaaagttgctcaaggctgaggcagggaaagtaactaaatcactttagctgtttccctcaccctagggaactgggctgctgagttttctggcttgtctctgggcaggcaagctcgggaatgtgtgccttgctttgggatatttgcattttaatttcgctgcaaactttgtttcttggataactgtgcttaccaggcccttaaaaacttgcagctttataagagcgctggccccaagccaggggagtctccagctgctgactgatcctgcctggaaagtcaacttggaagagccacaaatgtcctaatcctcttccaaaccgcctaagtaggtttatccagtgacctgtaaaaccaaattagtaaagggacactttaattccagctcgttagagagcttctaaaatcgttgagaaagccaacacagcaaattctgcgctggggggctgagaaatgcatcccattttcaaaagaagatgtccttgctttctcgtggtttctctcacccacgcagttcaacacacagaaaaccttctctgtggctttcacagggatctccagggaaggtgggaagccgttcttgagaacgagaaaaatacggtggcccagcaaggtcaactaattttccccaagttctgccacgtccagtcccagctctggtctcctgactctggcagggggaacatttgcactgttcttgttccttaccccaggagctggcctattgcacaacctcaggaaacagcccctatgcaatcctggcccacagagcggacatgttctggtttttattcagcagcttttttatgaagtgtgttttcctttcccatcatgtcatctggaagcaattcctc

SEQ ID NO: 24922 - DNA, 2300 bp, Homo sapien
tatgaagataacatgataaaacacaactaaatgctattacaatctttcttcaagctttgggcacaagccttctcaagtttctctttctctttggagacagggtctcactctgttgcccaggctggagtgcagtggcatgatcatggctcacagtagcctccacctcccaggctcaagcgatcgatcaatcctcccatctcagcctcctaagtagctgggactacaggtgtgtgccatgatgcccagctaatttttgtatatatgtatttttttatgtagagatgatgtttcatgatgttgcacaggctggtctcaaactcctgtgctcaagtgatcctcccacctcggcctcccaaagtgttgggattataggtgtgagcctccacgcctggcctcaaatctcttttaaccataaatttgattaagatggagctacagatacatgcaaaaatatttacataacatcctaaaatatattaactttatcaatattaaaggagggaaaacgtttagatataggcatatatatgattatatgtaacagttcttggaattctcgactttcagagaaaatgaaattttgtatatgtacatacaatgttgtagaacttctaaccaaattaaacatttttaacatttattttcagcccctaatgaatgcagttacctcaaaactaactcctttcttttattaatggttctgttgcacaatgtgcaatttaccacattagaagctagacaaagtaaaattgcatgatcctaatgtctttttactgatttcaaacttctttaagaagtccatgcaatttactttggagaagacccaaaagcaagatatttgattctttcttatactgctgaaatccctaacaatccactaatctacacattactccaatacagaaatagatataacaaggatttttcacagcaaacttggtcagctatacctgtagcctagttttatttgttttatttagttcttttaaaaaacccttcattagttttattcttatttctctgctgtagtttactcatttttatgttagcaaaagaagatcactatttgatactaaaaaaatactcactggagagcttctaaattatactcacgactcaacctcatcctctttaaatatcttaagtatagccaaatctttaaaaaatcaccccttttcttgcctctagtgctacatttggtaactttccattttaagtttgtgtgtgttctaatacttctgcatctttaaagtcccaaagcgatacagtagaggcaaaggctggctgggtatgaatctgcattccatggaaatggtcctgtgatcacagaagagcacaaaagggcagaggacaaggacaaggaagggaggtctcacaggaatggaaacatgggagagaaagggaggctcagggccgagagagctttcaggccatcatcacaagagaaggctaagtggcaaagggtctccaaattaccaatttgttctagtctttcttttggaattttctgctacaatgttaagaagtgcttaacttacccatactaccacttcgactgctctcaaatatctgaaaagtaagaatgaaagaatttttaaaattttcaaagtctgatcttagtatttcaaaatcagtgtaggaacttttatacacattgctgaattgaagcaaaacataacccaccagacatcaatgggtcagtttttacaatttaataatttcaaaggaaagattaaaagtgaacctcttttcaatatggtcagaacaacaataacaaacaaaattctttaatttttgagacagaattttcttctttgtggtcagtcacctatctcatatccctcataatatcattgctatcatctttcaataaatgttgatctataaattaattaacttttttgagacaaatccctggtatactattcttctgattcccatgaaagactcacttttaagatacaattgcagctgccccacactgccagttactgtgtcatacacacgccttaaaattctgtaatcagcaaccaccaggtgccgtatcgcattcagcacaccacagtcagtcaatacagacatccccaaacacaccaaggctggttttgtcaaatgttttattgagtgtagacatctggagtactgtaaaacatgcattatctgtagattcaaaaaggagcaagccacattgtcctcactgtcaaatgtgtcaggcttggcatacatgatggagattaatgaagtatcatgagagtaatatggttcctgaaaagcttctacaatttggagtagggtcttaa

SEQ ID NO: 24923 - DNA, 2300 bp, Homo sapien
ttttcacagtggccacaaaatttgggctagttagccctctttttcatagttaaagtgcaccaagatagctgttttatacatatatagttttggtgacaagggtactagaccaagaatataaatagggcacattaatatataatattaagaaaaagtaatacaaaaccaaatcaagttgcctgtgtccttgagaatttccaaaattgtagagaaagctctttaactcacctcactagagcactgttacagggctaaggaaaagccttaatgcaattttattatgaatactggctcagagcttatagggagtctctatttgaatgaattctcgtctgggtgcggtggctcacgcctgtaatcacagcactttgggaggccgaggtgggtggatcacaaggtcgggaattcgagaccagcctgaccaacatggtgaaaccccgtctctactaaaaatacaaaaattagctgggtgtggtggtgtgcacctgtaattccagctacttaggaggctaaggcaggagaattgcttgaactcgggaggcggaggttgccgtgagcccagatcacgccactgcactccagcctgggcgacagagtgagactccatctcaaaaaataaaaatgaattctcgctgaaaggaaacagatttttcagatagttttagttttactttttatttgtatttattttgttagagataaggtcttgctctacacccaggctagagtgctgcggcagtgatcatagctcactgcaaccttgagctctcaggctcaagccatcctctcacctcagcctcctgagtagctgggactacaggtatgtgccactacacccagctaatttttgttttttggtagagatggggtctcaccacgttgtccaggctgttctccaactcctaggctcaactgatccccctatcttggcctcccaaagtgctgggattacggccagattttcagttagattgtggtttgaaatatgctgctgccatttactagttgtgtgacttcatccaaattaatcaacctttctgatattgtttcctcacttgtaaaatggggatggcgacctatttacatcctttaatattaatagcaactaatccctttaaaaggagcttctagtgtcacaatttttggacaggtatcatattcattacaacaaatacctgaatgacatctgaaggccaggacctaaatgaaagaattccttctccagtggcgctcatggtattgatatgatgtgggtgagatgggatgaaatcctaatattaacaacagcgactactcacaagccttttctgtatgtgctgagtactgttgttatgagctcaacacgcattgtctcattttattctcacacgaataacctcataaggtggttttaatagcctcattttatccagaacgaaattgaagtccagagaagttaatttgtctagggtcatacagtcaatgagtggcgaaatccagattggaaattcccaaatttcaaaggcccctgctctcaactaccaagaggaaaaggggggaaattggctcaattaaacgcattctgtgatccagtacctgtgtgcgacgctttaactataaggcgaggaagaaatccctagaccaaagtttcccttagccccttttccttcaagaacttttagttaacagcttctctccgcacagactgagcgaataaagttatagaaaagggagatgggctagcggccacgcggtcctcggggctggtgtggctgtttgcctgacttcagacgccccggatctcccggagggaagtcagggcccaaggcactccgcagtccagctgggaaagcttggggctgtaggcccgcgagtgaacgtgagcaggtaacccaggccgcgcagccagacggaagcggagacctagaaccgagaagcccacgtgccgaagcggaagactagagctcccgggaacggcctagccagcgccttcccctctccagctccctgccgccgcgcggctcctcccaccctgggctcctcccgccctactcccgcctccccggccggttaggccaatgggcgggacgcgcgggcaaggcggggaggggcggggcccatggtctgcgcgcaggtgccgctcggcgcccggcccgcccgttccgccgctgtcgccgccgtcgtgcgtgccgctcggcggaggggacgggcctgcgttctctcctccttcctccccgcctccagctgccggcaggacctttctctcgctgccgctgggaccccgtgtcatcgcccaggccgagcacggtgaggccctcagg

SEQ ID NO: 24924 - DNA, 2300 bp, Homo sapien
ataattatagagtaacatggtattggaggatttttggtgttattttttgacattttgatacataccgtaacatttacaaataaagtaatataatatctgagatttgcctcaaaataaggaagagggaaatggatgggatagagatgaaacaagtttggccatgagctgacaactgttgacactgggtgatggagatagaggggttcgttaaaatattctgtctatttctaaataaatacttgattttttttttcaattttcggacaggatcttgctctgtctcccagtctggagtgcagcggcgcaatcaaggctcactgcagcttcgacctcccaggctcaatctattctcccatgtcagcctccccagtagctgggaccatacgcacacacaaccatgctcagctaatttttgtatttttttatagagacagggttttaccatgttgcctaggctgctctcaaactcctgggctcaagggatctgccctgccttggcttcccaaagtgctgggattataagcttgagccactgtgcccagcagatattttctacaataaaagtttttaaaaagatatcagtaagactcacctggtaagattattgtgtggattaaatgagatgctgtgtgtaaagcacttggcagaatgcctggtatataataaccgctcaataaatattagctattacttttagagacaaggcctcctcttcccctcctggagaactatgaaagccagaccatgaaatgtgtggctgactggagcagctaaccttactccttccaaatcaggcagctgcaggctgtcattgcattcatcctcatccaaccttgcttctgtactaggccctgtgcttcccacacacacactaaaattctgttttatagcggctgttggctttgcctttagtttcacagtaagttttagctgggaatgttatttcagtggaaaatggaaggcaagaacttttttagctcaactattaataagtatggagcacattgttaggaattttcctatatagttttatttaaccttcataacaatccttcaaagtcgaaattattagcttcattttagagagaaggaaacacaagtttcaaggcccgcccaaggtcacagggccttaagtggtgggccttaagtggtgggccttaattcacacccacctcctgagacctccaaagggcttgtgcttacccaggagccctagctatcagctctgttgcctttcttttccttatcctagcttaaaaacaactgccatccagaaaaggttaagttgacattcctaatcaaaagagtctggaccagacgcggtgactcacgtctgtaatcccagcgctttgggaggcccaggtgggtggatcacgaggtcaggagttcgagaccagcctgaccaagatggtgaaaccccgtctctactaaaaatacaaaaaattaggcgggcgtggtgccgggcgcctgtaatcccagcttctagggaggctggagcaggagaatcgcttgaacccgggaggcggaggtcgcagtcagccgagatcacgccactgcattccagcctgggcgactgggtgagactcttttcaaaaaaaaaaaaaaaagagtctgacgccgtatttatctgtcttgtagaggcagaggcagcactggtttgcagcccagcggtaagaggtctgcccaactgatgaggagagttacaggcttgggagtagcttgggccgggcagaggggaggctctgaatgtagtaatagagagaaaaaggttttcaggattgcaccgatatttgtgtttcatttcccccttgttccaaatgctgttcaacttaagggaagaagaaagcagggagggataccttatacgaaaactgttccattccgaaaattaaaaacagccagctgccatcaaataccaagggcccttatattcaaacttcagctgtaatttagttgggaggttgcaatggcaccctaaactgtcaaatgatttgaccttagaatcctgcttacataaagccggacaattccatgcaaggggggtgtctggttacaactgaagttattggttgtttacgtccgacttgtccgggaatggagcagagaaagaggaaccagaagaaagagaaactcgcgacaacagagttgccgaaagagaagtgttggcgcctcaaacttgaggatcagcttcttgggccccactccagggtgtcgcgggggtcgggttctttccgccgccccccgaaagattctcagctaaccctttccccgccgagaccaagaggccctcactctgacac

SEQ ID NO: 24925 - DNA, 2300 bp, Homo sapien
gaagttgggggcagtccccagtcccgcctcaggcccccgcgctcacagggcgctccgccgagggcgcgggccaggcgcgcggtgtcacctccacgaagtcatttacttgccctgaaggagctggccctcgaccccttggaggatggagattcctcccattccctcctccgcctcccccaggtcggcgaagagacgtggaattgagctggaccgatgattccgcgagctctgtaattatgcacacactgaaatcttcaccgttgacttaagttacttggcgctgcgagggctggggccctgcatattgattaaatgcagcctctatttacctaaacaataaatgtagagattagcaacgttcacttgatcacaataatgggattgacaattaaggggcaatgcatcccagatgtagcggaacctatgggctgcgtgcagcaggcagagggcttctcagagaggggcgctgggcagttgcggcggcggaggtagtgcagagcaggaagcagcgcggaagcacagcgggaggcggagggggacgcccagcctcgtcaaggtcttcggccaccccgcccgggaggctcgaaactggctttggggtacctgaatgcctcgactcccagggagacatcgggagctcggagccactctccctgtggcgatggcacctgcctcaaggccgtctcgcttgctgatgcctggccgggaaggaggatggacgccgctggcatgtgccctggtaagtgtgtctgtttgtcatcagtgtacattctgcatgtggcagcagggcgagggggaggcgcacgtgtctaaagtgcacggagccttcctctacccctatgtatatacccttcagtcaatgttccaagaagcgggtcagggcggagggtatccatctggactctggaagggcgtgggtttgacatcggtaggtgtgacaggaaagtccagcctgtcagagttgggctctacagtggccgaaatcaagaaaggatggacgtgtcggcccagggctggcctgtttccggatatgtcacgggggtgcctcgttcctcgaggggagttttaggatgtatctttttttctcaccctctcactgaactgtagggttctgagaagaggttctaggaaggagagggctgaaaggaactaagaaaagaacccaggagagtggaacatggggtaataaaagacagatgagcacagttgggtgtgtgtgtgaaaccgtgatccacctggaaggggttccaaaccctggactaacatcgcatactggctgcaaaagacacatgcgtgttgcttctctgctctttccctcttctgtctgagccccattatcaacctggaaggcttctcattccacatttagacacaaacaaaaggatttgtcccagacactcaagaacaagccaggacgaagccctttcccgccaaaccacgaaggccgggaaataaacagcgcctgcccaggctctgggcgcgcgagcccaggagaggacttgggtgggaagaggatctagaagatcggaaggagggagagagggagggagagagggagggagggagaagcttggaaagagaagagggaggaggaagaggagggaccagcaaggcagagttggacccggggttctgttataaccgcccttccccgcccagggtctttccatcccctgtccccctcccccatttcagagctgaaggccgactgtgggaggaggaggttaaacaaagggaatcctcctcctctgggacgggtgaagtgcgtttgtcttctccttgcaggctctggaaaaactggcaggaatttccttgtcgtgagaagatggacgagtgtgtctgcagccgaggagacaactacaaacagactttgggcagggaaggcgggcgggcgggggtgggggtgggggcgggggcctgctttgatcgctccagctctgttgtaattttgtcttcgccagatagattagctggaaccgccagccctagcttggagttccgttccacggagtaccctccctccccacccccagcgtcatctcgcgcctggagccgggtcgccgctccttccgaagtctcgctggaaacttcaagggctgatggttctgtgttcttgacgtaattaggaggccacgcagctctccaacactccgttaaacaaatatgtaagtcgtcctccccctctctggggacagactctagggaaggaggcagctgggcccgctccgggtggtgtccttggctagcggagtggcgtcgctgtgaccttccgccgcccctcggggccttggtctttctaa

SEQ ID NO: 24926 - DNA, 2300 bp, Homo sapien
tttcatttcaataattgccttctggtcaatttaactgtgccttattttgaaagagactgtctaaatgagattcctgtcccaaatgtgttcccaggcctgatcccagcctttaattattcctgagtttttttcttcagaataagacgccgcactgagtaatcacaaagaagtcagagagcatccttgaaccttttcagaagcagcgccactgatattcaaataacctgcgagggccatttgacggcgcggggacctaggcatttccaattcactatttgcatagatcagccgtctttgaaaaggaaaggagcagttgtcttccataacattaaaaagcctagttatcaaatcaagtgcttagtttgggggctttttaaaacgtttacattttatctcaggttgccctttaccgtttgacatgcaaatttggtgcagttaatttagacaattaaaaagatcttcaagggagctttgtcacagagaatatttggagttttccccgcggaccagctgagataaagttggccagaacaaatgatgtctaggagattaattagatatttgataagacatgaatccctaataagggaatacaaggcacagggggctgctgtgtgctctaagtcaaaattaataacatttaacaagattttcatttaggcatgaaatgtcttttccggggtattgactctagcgatttattcccttgagttgccttccaacatacagggccttgggagctaaaagacttctttttttttaagcgttttcctttcacagttgtttttaaatcactttttaaaaacaaacaaacccaccagagttttctctgacccctcccagaggtttaggcacctccccaattaaagctgccaaggacctttgcattttttaggcgctccagagttttaaaatgtcaccttttgagagccttcacattaagtaatacaactacacgtccttacaacccaatttaatttatgttgttgatatacaaataaataattttgacttctcaaaaacgtatatgtagtatggcttttataacccacataaactttacattacctacaactaacattaagggaattttttcccaaccgaaaaaaaaatcgacccacgaaaaggttattgagggggaaacaggatttttaaaaaaggaaatgtattgttcagagtcctttaataataccaaaatgaaaatatgatgtcaagattttcttgatacagataaacgcatttaatttctttagatgaccttaacttacgtgtttgtgagtgaaatgataactcaacattttaaatatcttttacatatatactgactttcacaaagtgcatcagaaaattaaaaaaaactccctgaatttcagggattcacccaaaaaaactctattcgaatgaacatttacaagaaaataaaagagaacacaatcttttgaaccctatttatacagatgttatgaaatacagagaaactgtcgctagacttccagtttaatttctcaccttaagccttttgatgcttccttttttaggaaaaaagtctcattgtaagtagatatcaggcaggacttggagcattttatatataatataatccaaacaaagggtgtttttatcggtcccgtttgttttcaaatgttctgacagtcctttgctgggtggtggcttgtttttgagaaaaggaaagagacgggtgttggagggaggtggagagtgggcaaagagggagcctttctatgtattgctcttcgctcgagaagtttgggcgagtggtatgtgtgtgcgcgcgcgagtgtgcgtgcttgtggttgtaggtctccggtgtatgtgtacgtctgggagtacagtttttaaagtgtttgtgtcggaggatggttcgcttttgtttccggaccacgcgttcgattcttatccgggcgcggaaggcagaggggagctcctcgcacagcgggcgaaccgcagcccgggagccctgagcggctccacctcgcgcccagcccgggccctgggggcgtcactgaagcccctgccctcccgcctcccgctcgctcgccctccgaacctctcgttcgttctcggtgtctctactcgcttgtgtgctcgcgcctctcgcccggcctctaagagtcgttggggccagacgctgcttccttgcctcccgcggaggccgccgccgccgccgccgccgctgccgccgccgccgctgccgccgcccgggcggcactgacgccggagtcatgcaggatgaggtcgggggattcggaacggggcgtctccaggttgctggcgtccgt

SEQ ID NO: 24927 - DNA, 2300 bp, Homo sapien
ggaactcttttgcactctttgatcaaactcctttgtttcttccacttctattaaaaaaaaaaaaaaactttactggagtatgacatataaaaagctgtacatatttaatgtatacaacctgagtttggtgacaagtatatccctgtgaaaccatcatcacaatctacactataaacatatccatcacctccaaaagtttcctcctaccctaataaatttttctatttatcttcatttaatatagttcctttatccttagttaataaagaatgctagaggtcaccccctctccccataaagtgttaactatctagaaaggtctgctaatcaaaaacatttcattcttctcctctatcctgggaaaagtataaaacagatcaaagaggccaacaatatttggtacattttacataacactttacacagatgagaagaatgtaggttctaagcctataactgctttactgaatttctcatagcggacttgcaaaagttattctctgtggatttcttttttcttgtaagaaagctgatacattgaaatttataaagcgaaatgtcaaaagttccagtaaaaaattatgatttctcaggtatatttgtctctaaatataaacagcaaataagcaagcacctgaattccatctaatctcttcattcttgtaaaaatagtaacagctgaccccctaagtatgcagagaaaggaaatgtctgtgtttggtgtcaaaagttattgagccaaccaaatacaagaaacctctccctcccacagttgcaaccacacaaacacaaactggtgcagtggaaaaaaaatcactgggttaatcaggtgttccagatcctagttctggtacaacatttaactagctgtgtaactcttggcaaatttgtttcctcatttataaaatgaggagatggggctggatgattaccaaagagctttcaaggtgtatctgtgttattaaaatttcatgggggagttattaagaaaaaatgtttaataagactccttaggaaggtaacagtgaaaaaaaagttgagaatcactggtctagaagtgagagtatatagcagtatctcatcacctcaactcgttctaaaaacaaataaaagcttagttattttcacaagtttctatgtaggggcaatcaacattttattgagcacctcctctctgtagtggacacagtgatagatgcctacgttgtttcaaatcctttatcttcactatttcacttaatcctcacaattaagtcaatcatccttaatttacagattagaagactgagggtcagatattacaaatattttgtgcaaggtcttaaggctaaaagtgactgctcgaataactagaatccaggtttgactccaaagctgattctttctacttcactcttttgcttttcattactatgatattcaccaaagtattacaactggtagacctgtaattatgtaaaacactaaacttcaacgagtttagtcatcaaaaagacactagattattaggtaatttttttaaagatctatcttaagtaaacggggaggcttctttgtacagaaaagtagagttcagaagccgtgatccctgggatccgaaaagacaaaaaaccagaatcagctgaaggaagtactgaggaattttgacattagtcttcgcatattatggatttgcattctggccgacaaagattctctaggccaccggtctcctcgctgttgcagaataaacgctgaggacccgctgcgtcagcgagctgctcagcagagaaaggcgagaccaccagggctttaggcctagagaagcggaggctgtcctagggatctcagagacaccatcactttcacttccagcagcctctgggaaggcggtccctgtgggcctaatccctccccgggtctgtttactcacttttttgatattggatttggaggcaggatgaaagtctttcttgcacatgaagttggcgaaggatttccccatcttggaactggaactagggaaagcaggggctagatctgttagcaacgtaaacaaactcagccgcctaaccggaactgcgtttccagcagcaagggggaacttccgagatcaaaggtgacagcttccggcaactgatgcctccactggccactcctccctccgtccacctgtcacttcgggtagctgggaggccaggtgaggggcgcgcacgggggaggggcgtgcatagttgagacagaaacccggaagacccaactgtggcgcggcactgcttgaccgaggggctccggagcccagctgcaccggctgcggtttg

SEQ ID NO: 24928 - DNA, 2300 bp, Homo sapien
ttccctgaatttcgtttcaccatttccatatttgggaatccgtgtacctagctctattgttgtaaaggctagattccattacattcgtgtatatataaatccctttactggacaatgagatccttgagggctgggagtatgtcttactaatctttatattctctttgctggaacttgtcttatggaaaaaaatcttacgtgcccagtacttcctcaaaggaaggaagaaggggtcttatttgagctgggaaataatacacattataattctgatgagactgaaattttgaaacagactcattgattcagacaaaaatatgtcaatataattccaaattgctgatatttctaggagaaagttcacatatttaatttataaatcgcaattatatactttaatatctagattacctcttcagttgtaacttggaaaatcttagatcttcacttataatagaacacctaaaggtccttattttgctgccagaacagacacattgttttacagagtttccttctttcctttaataatggcaaaaccttaaaatggctttacacaggcagatgctagcaacttaaaaacaaaatttaaatataataaatgtttccttaaaaagaaaagaaaatgactaaataaaaacttcagactgaaactcttaagggttttcctcttctcctcagtgacgagaagtctgatgtcttgatggcttctgttattttctttctgtatttcaactcttatgtcctggatctccttctatttgtgttttatagttagttctatcactatataactttggcagactatttaatctctctcttacctatgccttctgcctcatcagaaaaataagacactatttgatgggctgttatgagaacttaataaggcaacacgtaaagtgttttgcacagtgcatagaacatagtagatactcacatgaaagctgttattgttattatttggtaggagagaaaatttctcataaaggcttattcgttttttgttttttttttttgatggagtttaactcttgttgcccgggctggagtgcaatggagcagtcttggctcactgcaacctccgcctcccgcgttcaagtgattctcctgcctcaacctcccgagtagctgggattacaggcgcgtgccaccacacccggctaatttttcgtgtttttagtagagacggggtttcaccatgttggccaggctggtcttgaactcctgacctcaggtgatccacccaccttggcctcccaaagtgctgggattacaggcgtgagctaccgcgcccggccaaggtttattcttaacattaccctgatagagaacttggttggtggatcacctgctgcagtagcagccacgtccactcaaaaacctggagtcccaagggccatcaagctgcaatagtaacctgagctgcctaactggggtcgtagggaaagctaaggaaacttgccccctggttagaattgcacctagcccactgaggaggtgaagccttgagagattttaccaactcctaacgcgtattcgtcattcaataagtatttattgaacgtctttcggcgccagtaccgtacagctgggtacaaaatagacagggcctccgttcttgcagagctgtctgtcattctatttcacgcgctcttagttcagccggcgctttcagaaacatcatattgttggattctcgcaagcatactacggttagggccggaattattatcttcataacatagatgagaaaaacagtgcagaaaagcttttgcagctcgagtcagagtccacagaaagtaatgggctcgagcttcaagcacctttggtcgaagggccgccgcggtccaccccgcaccccggccctgggcgctcaaaccgcagccggtgcagctgggctccggagcccctcggtcaagcagtgccgcgccacagttgggtcttccgggtttctgtctcaactatgcacgcccctcccccgtgcgcgcccctcacctggcctcccagctacccgaagtgacaggtggacggagggaggagtggccagtggaggcatcagttgccggaagctgtcacctttgatctcggaagttcccccttgctgctggaaacgcagttccggttaggcggctgagtttgtttacgttgctaacagatctagcccctgctttccctagttccagttccaagatggggaaatccttcgccaacttcatgtgcaagaaagactttcatcctgcctccaaatccaatatcaaaaaagtgagtaaacagacccggggagggattaggcccac

SEQ ID NO: 24929 - DNA, 2300 bp, Homo sapien
aaggtttattaggccctatgttaacactatcaatatacattttatgcagtcacttggtagtatacacattaattaaaggatcctttaaaaacttattttaaaaacccatttaatgtggaacttaaaatgagagcttcaaattatgctattgttgctaattcatactttttagattttattttattgatattctaatattaaaacatattaaatattagacttttttctgtatcctatgccatatttttttcttttgctaagaccacttattcatctgtgataccacttccactttatttcttcatatttaaatatagcctgtcctgtaaaccagtggttctcattcttttcattgctgtgggcatacctaatggttgacttcaaaatgtgatgtgagattcctatgacaaaactcttgtattcgaaggctaccatgtgagtaattatatcactaatcaagaaacactggatattgaggttgagaactacttccttaagcttcaactcacacatctacaaaaatgtttcaagatattacagctagagaccatctttctcctgagctccaatagcaccttgtcttcacttcatgaccctaatactttatactttattttatcttaatgtagaagttttagtttctcaaaagtgagatctttatctgattcatctttgtaactaacatatctcttggcagaatgttttataataggaaatgctcagcaaatatttgaatgaataaatattttagggttattctgaatatgttttaagggtaatgcctttattattgaaaatttcaatttacttatatttcctttacctctttcataacagttttgtcttctgactgatttttttaaattctggattttgataacttttctggttttgtggttcttgctatgacttttttttttttttttttacagtgtacatatatagaaattgatcaagttcctgaaacatatgctgttgtcctgagtcgcccagcgtggttgtggggggcagaaatgggagccaatgagcatggagtttgcattgggaatgaagctgtatggggaagagaagaagtttgtgatgaagaagcactattaggaatggaccttgtcaggttattttttgttacattttatactacagaccttgtctaaatttataatttttgtgtaactcttacttgttttattttcctatttttgagggggctttgatactttgcagtttgtgtcaaaatggtttaaagtaccggcatgcaatttcatgactctcagttttgtttggttttttaaaattaattaatttttatttttttgagatgagatctcactgtgtcatgcaggctggagtataatggtgtgatcatggctcactgtgcccttgaattcctgagctcaagcaatcatcccacctaagtcacccaagtagcttggatcaaaggcacgtgccaccacacctggctaatttttaattaaaaaaaatttttttttcagagactagggtcttgctatgttgcttatacttgtcttgaactcctggcctctagccattctcctgcctcagctcctgagtaactgggattaccagcacaggcaccatgcccagctttcagatattattatttgggagaagggaagaagtaggaaattataattcattggaagtacctaacatactttaatcacaccttaactaattctcacaataacctcatgggctatcgtgctcattttacaaatgagatatctgaggttcagagataaagtaacttgacagtgaattaccaacttcgaatttgataggtttgtttgactccagaaactttatttccatgattccaaactgacttcagaaggaaaagttttaaagttagatgtcatttcatctgttaacttggaagaaattttactttgaatctaaaaaatctcatgagcatgaaattatttaaaaaaaataatggaaatttattttaatatgagaactttatatttttgttttagacttggccttgaaagagctgatacagctgaaaaagccctcaatgtcattgttgacttactagaaaaatatggccagggtggaaattgcacagagggtagaatggtatttagctatcacaacagtttcctgatagctgataggaatgaagcctggattctggagactgcagggaagtactgggcagcagaaaaagtacaaggtatggacaactttttgtgatttaacttgtttttgcaattaataaaatacacccttacctatagatattgcatttaattgcttccaagattaataatcta

SEQ ID NO: 24930 - DNA, 2300 bp, Homo sapien
tgaaggtagccttgaactttggaggatttgggtgttatttttcaaaacaggtcattaccagttgttttgacggacattttgttttatgttttgcatatatgtttattaatatataacattgtagttagactttttctttttgtgataattggcttgataataccattgagcacttttattttattaaatgtactacgtgcaagagagaactgaataaatacattttgttgaaaaagtgccacctggccatctaaaatgaacaccttcattgggtctcattgtctagctgtagattaattttgccaattgttttctctttctattactaactaagcccaagaactaaattgttaaatgatagggaattatttattagatggaaaattattggctgggcatggtggctcatgcctataatcccagcactttgagaggctgaggcaggaggatcacttcagcccaggagtgtgagaccagcttgggcaacacagtgagacctcaattctacaaaaaatacgaaaattagctgagtgtggtggtgtgtacctatagttccagctactcaagaggctgaggtggggaggatagcttgaacccaggaggtcgaggctgcagtgagctattattatgccactgtactctagcctgggcgagagagtgagaccctgttgaaagaaaagaaaagagggaaggagaaggggaaagaaagaaaagaaaattcttccatctgattctttcatgacttggatctggtttttgtaatgagggtatcccaagtatgacctcattagagtaatttcattgatttttacttgacagactgtcatttcagctgtttttaaaacattatcgatttttgtttatcgtgatctgtttcatttagtataatctctaagacaggcttttattttttctattttgtattttagttgaaaactttgtttatagcttcatgccataatatttttggaagtcatatattttggttctagacttatttataatttaaaaaaatttatagaaaggactactatctggaatatataaagagcagtcaaaactcagtagtaaaaaaaaaaaaatccagttagaaaataggcaaaagatatgaagagtcatttcacccaaagggatatacagatttgaaataagcatgaaatgatgttcaacattattagccattagggaaatgcaaaaccccaaagagattttactacacctctatcacagtgactgaaataaaggtaagaatgtacagctagccactctagaaaatagtttgtcagttaaaaaaaaaaaactaaacatgcaactaccatacaacttagcaactgtactcctgtgcatttatcccagagaaataaaaacttacatacatttacacaagaacctgtacgcaagtatagcagctttttccatgatgaccaaaaactaggaacaattcagatatcctttaccttgtgaataagtaagcaagttatcatacattcataccatggaatattactcaccaataaaaataataaactattgatatatacaataacatagatgaatctttagcgaattgtgctcagtaaaaccaaaagcttacatattattccatttatataacattcttgaaattacagttatagaaatggagaacagaatagctgttacctgaggttaatgaaggatttggggtgggagataagtaggtgtggctataaaagggcaacatgagggatccttgtggtgatggaagtattctttatcttgactatagcaataccaatattctggttgtgatattatactacagtttggcaagatgttaccattgggggaaactgggtaaagggtacacagtatctctcagtattatttttttataactgcatgtgaatctataattatcttaaaatcagtttaattttaaaagtaattcatttatctttttgaatatgtaatagatgcccatggcacaaaatttagaagtctatatttatgtttacatagtgattaggaatcatgatatacagatacatgctttatgttaaatatgacttttcttctcctttctcctcttcttctttgaaaatagagggagttcgtaatatttctaatcaactttccataacaaccaagattgcccgggaacacccagacatgagaaactatgctaagcggaaaggttggtgggatggtaaaaaggagtttgattttgctgcagcatattcctatcttgacacagccaagatgatgacttcatcaggcagatactgtgagggctacaagcttctaaataagcacaaagg

SEQ ID NO: 24931 - DNA, 2300 bp, Homo sapien
ttgatttggggtggagagttctgtagatgtctattaggtccgcttggtgcagagctgagttcaattcctgggtatccttgttgactttctgtctcattgatctgtctaatgttgacagtggggtgttaaagtctcccattattaatgtgtgggagtctaagtctctttgtaggtcactcaggacttgctttatgaatctgggtgctcctgtattgggtgcatatatatttaggatagttagctcttcttgttgaattgatccctttaccattatgtaatggccttctttgtctcttttgatctttgttggtttaaagtctgttttatcagagactaggattgcaacccctgcctttttttgttttccatttgcttggtagatcttcctccatccttttattttgagcctatgtgtgtctctgcacgtgagatgggtttcctgaatacagcacactgatggatcttgactctatccaatttgccagtctgtgtcttttaattggagaatttagtccatttatatttaaagttaatattgttatgtgtgaatttgatcctgtcattatgatgatagctggtgattttgctcgttagttgatgcagtttcttcctagtctcggtggtctttacattttggcatgattttgcagcggctggtaccggttgttcctttccatgtttagcgcttccttcaggagctcttttagggcaggcctggtggtgacaaaatcggtcagcatttgcttgtctgtaaagtattttatttctccttcacttatgaagcttagtttggctggatatgaaattctgggttgaaaattcttttgtttaagaatgttgaatattggcccccactctcttctggcttgtagggtttctgccgagagatctgctgttagtctgatgggcttccctttgagggtaacccgacctttctctctggctgcccttaacattttttccttcatttcaactttggtgaatctgacaattatgtgtcttggagttgctcttctcgaggagtatctttgtggcgttctctgtatttcctgaatctgaacgttggcctgccttgctagattggggaagttctcctggataatatcctgcagagtgttttccaacttggttccattctccccatcactttcaggtacaccaatcagatgtagatttggtcttttcacatagtcccatatttcttggaggctttgctcatttctttttattcttttttctctaaacttcccttctcgcttcatttcattcatttcatcttccattgctgataccctttcttccagttgatcgcgtcggctcctgaggcttctgcattcttcacgtagttctcgagccttggttttcagctccatcagctcctttacgcacttctctgtattggttattctagttatacattcttctaaatttttttcaaagtttttaacttctttgcctttggtttgaatgtcctcccgtagctcagagtaatttgatcgtctgaagccttcttctctcagctcgtcaaagtcattctccatccagctttgttctgttgctggtgaggaactgcgttcctttggaggaggagagacgctctgcgttttagagtttccagtttttctgttctgttttttccccatctttgtggttttatctacttttggtctttgatgatggtgatgtacagatgggttttcggtgtggatgtcctttctgtttgttagttttccttctaacagacaggaccctcagctgcaggtctgttggaataccctgccgtgtgaggtgtcagtgtgcccctgctgggaggtgcctcccagttaggctgctcgggggtcaggggtcagggacccacttgagcaggcagtctgccggttctcagatctccagctgcgtgctgggagaaccactgctctcttcaaagctgtcagacagggacatttaagtctgtagaggttactgctgtctttttgtttgtctgtgccctgcccccagaggtggagcctacagaggcaggcaggcctccttgagctgtggtgggctccacccagttcgagcttcccggctgctttgtttacctaagcaagcctgggcaatggcgggtgcccctcccccagcctcgctgccgccttgcagtttgatctcagaccgctgtgctagcaatcagcgagattccgtgggcgtaggaccctccgagccaggtgtgggatatagtctcgtggtgcgccgttttttaagccggtctgaaaagcgcaatattcgggtgggagtgacccgattttccaggtgcgtccgtc

SEQ ID NO: 24932 - DNA, 2300 bp, Homo sapien
cgggtggatcatgaggtcaggagatcgagaccatcctggctaacaaggtgaaaccccgtctctactaaaaatacaaaaaattagccgggcgcagtggcgggtgcctgtagtcccagctactcgggaggctgaggcaggagaatggcgtgaacccgggaagcggagcttgcagtgagccgagattgcgccactgcagtccgcagtccggcctgggcgacagagcgagactccgtctcaaaaaaaaaaaaaaaaaacaaaaaacaaaaaacaaaaaacttcccagtatagtgtttttgttacaattgcttttgaggactgagtcataaattcttcccaaaggtcgatgtccagaatggtgtttcctaggttttcttctaggattcttatagtttgaggcattacttttttttgagacacagtcttgctctgttgcccatgctggagtgccatggcacgatgttggctcactgtaacctctgctcccaggttcaagcaattcccttgcctcagcctcccaaatagctgggattacaggcggccgccaccatgcctggctaatttttgtatttttagtagagacagggtttcaccatgttggccaggctggtcttgaactcctgacctcaagtgatccgcccatctcagcctcccaaattgctaggattacaggcgtgagccaccgtgcctggctgagacattacatttaaatcttagtccatcttgagttaatttttgtatatggtgaaaggcaggggttaaggcaaattgtaaactctttaatgagaggttaagagataataataatttgtttcacagttagccaaaatagggtattcatgactaatatgtagatttatcagtgataaaacttgagttattaattcggcctttaaaattatatgtatataattttaatatatacaatataaaaataaaaatatatattatatactttttcaacctttgtcccccttcctccctcctcacctctagtagtccccagttcctattgttgccatctttatgtccatgagtatctgatatttagctcccacttataagtaagcacatgcagtacttggttttctgttcctgtgttaattcacttaggatatatataatatctaatatatattatatatttaatatataatttatatatgtaaattataaatataattaaatataaaatttttatttatatatgcttatatattaatttgtaatttatataatatgcacaaattacatatataattatatataaatttatatgattataatatatactgatatataatatacatttataacataatatataattgttatataattatatatgtaatgtgtatatattatttatataactaatatataaaataaaaattatatataatttatacttaattatattaattatataaaaattatatataattttttattattttttttaattttttttgagacagagtcttactctgtggtgcagtcttggctcaccacaacctctgcctcctgggttcaagcgattctcctgcctcagccttccaagtagctggaattacgggtgcccgccaccacacccagttaatttgtgtatttttagtagggatgaggtttcaccgtgttggccaggctggtcttgaactcctaatctcaagtaatctgcctgcctcggcatcccaaagtgctgggattacaggcatgagccaccgcacccaggcaaattatgtataatttttaaagaccaaattatataacttatgttagataattatatatataaaacattgttgaatagtgtaaaagggaactattgtattctacttatgttttttgagataaaaacatttcagctagaattcttctaaagcaacatgaaggagctttcttccaatttcatctaaaataatatactgattcttagctgaatgtgcttttctgttgtttctcttaggaagtcattacaaatttaaaatgcatttagataaaaagctctgattacaaattgttgtgcttactcttttatagacaatcattgtgtgagtcgctgtaactcccagagctgcatattagcccaggaagaagaacagtatctacagagtggagaccagcaactgacccgacatgtgttgctgtgtttacttctcatcattggcctgttcgctgtaatggttttttctggttttgttttggggccatttctttaaatttttggcaaaggttttattcaggcatccgggaaaaacttagttgctgctttccagaagtgtggtagctaggtcacctgaatt

SEQ ID NO: 24933 - DNA, 2300 bp, Homo sapien
atgacattaactgaacttacatatcctgagtaagtaaacaagtgtattttcctacctatatcattttatcttagtgtaaattgagaaacctaattttttttttttttttttttttttttttttttgagacggagtctcgctctgtcgcccaggctggagtgcagtggcgggatctcggctcactgcaagctccgcctcccgggttcacgccattctcccgcctcagcctcccaagtagctgggactacaggcgcccgccactacgcccggctaattttttgtatttttagtagagacggggtttcaccattttagccgggatggtctcgatctcctgacctcgtgatccgcccgcctcggcctcccaaagtgctgggattacaggcgtgagccaccgcgcccggccgagaaacctaatcttttacatgttttcacgtttgcctctctccttgtgaacgactgtggctgttcttttttatctttctcaacttcaaatcaattataaatcagcctttatttgcattagattgtataatttcgggacccattgtcaaaaatgtgctagagaccagttgtttactgaaaggccctaagttgctctaataaactaaagactaggtcaccaaccctcacgtctaccaggaaactgctagaagtctgatcccactcactcacctccctcatgagattaaaaaaacacatcttatgcagtggttaagtcctaaagtcatcttgtatattcaaactcttgaaaatgcccaccaaatacagcacacatactttgtctatattgtaccatttttcataagtctaacacagccagatttttttagctagcattgttcttcaatgaacagcagttgaaataatttgtttgcacttggaaacatgctatggggggtggggggaaatgaagcttttgttttcccaagagggtatggttgaatttgtgttaactaaatgtgcattgatgtgactctactgtatttccctcccaaacattgtaagatccacctttctatctctactccttaagtatctccactggtcttctttgaaggcattcattccttttcattcctctcaaatggaggttgttcattttcccattgccagcacaccacatgagcagtggaaggtaggactggcatccccacagctactgtggaccattgctagaccatccctctgctctgctgttaaaaactgctttgaggttcatactttccggctagaccactgatcctctctgctgttacctgctgacctcattctaggcattccctctcatttacctttatcccaagttttgtcattgtcttgtgaactaccatgaaattctctgccctgtcatttccttgacctcctcttctccagtgatgttttcctttactccatttcagccactaagtcccatagccacatcctggaccttgtcatctggaaaatatttaactgagtagctcattagctgttttactctgaactcccgcacttccaactgtccctaattcctagaggcctccaaacatctcccatcttcatttcttttcttacacagcttggattccacatccgtgctcctttttagttcctgaaataactcctactctctcctcaaccctctgtgatctgacttctgtctcttaccactccagtaaaactgttctttccatggataccaataaacacatttttgctattactacttaaatgtttagtttgtccctagatttttactttgaattgtttcttctaaaaattctacaattctgctcatttttggagactaattttaacccttagatggtaaaaattagtgaggtttaaaaataatgtgtaaacttggttatcattttataagctatatgatatttattatgtttttcttttttcagctttattactaaaatgtacttttccaaaataggctatttgggtcattttgaaaattttagatttatcattgctataaagtacagaaaatgttatatacataacatatatctgtatttctgtggtcatcatttaaaaatcaatattcttgttttgcagttgaagctttatatcaaactacatacccagaatatctccagtacatttatttggtggcaccaatatctcttatgatgttaaaccctatagggtttattttctgtgaaatccaaaagtggaaagacactcaaaatgcttctcaaaataaaataaaaattgtgggactcggactcctgcgtgtattacagaacccaatagtatttatggtcttcattggcatcgccttcaattttattcttgatcga

SEQ ID NO: 24934 - DNA, 2300 bp, Homo sapien
ctgtctctcaggcctattccattatttttactgtcatcacccaagagtaggtcttcatttccttatgtcttggttcttctccaagtcaccacactgtttttcttgccttcagtctctctttcaactaatcatggtacagcttccagattacacacccacaaatagtgtgatcattctgacatgttcctgtggggaaagaaaagttacatgttttactgtggccaaaggataaggttcaaactaacccaaggaacctcctacaggttgaccgtaacttacctctgcaggcctatcttccagtattcccctgatagtcaatgctcaataagtatttatttaattgaattaatcttcatacttcctaaacaaaaatccttttagccttgagataatttagatcttcaattttttttttaagtagtcaggttcaagggaaacaaagaaggcagttaaaagtgaggaagacagagaacaaaggagaagcaaagagaactggagcaggatccatgccttttatagctttaatttctgctcatttttcctgctaagtttcagatcctttaacctacccttagcttactgtaatttttcttaataagccacacaattttgtatctttgcactaagatggccgagatgataggaagacacggaaattgccatacagaaatgtttaagatgcaaagcaagataaaaggttgtaaacaaatgcttgtagatatcttaagtggaaacatatataaatattttaaaatttgaaataatttttatttcaaaaggctaactcaattgcaggatttcttcaggtttcaaagtggagcaccatatttgggatactatatataggtttgttgtctgatgcccatggcaagttaatacactgggacaccaggttgcagaagagaaagaggtttaatcatagggccaccaaacacagataggaggaaacctcaaattcgtctccaggaggactttgagtctcaggttcttaagggttttagagtggtcccaagtgtggagatcattaattggctgaagagtacagggcgaagtcatgggacagcgagatgaagaagctgtattctcatgctgattcccttcttctgtggcaggggtcttcaagctggctggcatcagctgtttcgctggaatttggcgtctgaaaaacattttaagcaattcttaaaaagccttacgactcttaacatcagaaagcctatctatagggacaacgggatacaaatgtactatctagctctacccgactttcgggttacaaggaagtgggtcaaagtgtagcctgattaatgcttaattatatttttgtccagaattcttataaaccctgtgaggatagtttcaatacctttatttcaagaagctttggaagttttccatcaatgtaaccagtttcagtatactgagtggacatgcatgtagttccccacccccaccccacccccgtaccgcaatagaatagaagcagtcatggacggggcccagattctaaaacaagctcagggctaagggtttacattttaatctcttatgtaggaacgtcaaggtcacactgccttggtgaaggtggaaggcaggattttgacccaggtctgattctaagcccttgctttaaaactctatgctataaaaagtcctgggctaaccgggagcgaaactggcagatcacacgaggttgaggttaagcggaaagacaagtctgctctgcgtctgtacttgggaagaggaaaaaaaactggacatcccccacggcggctaccattttgtgggagcagggaagccggaagtcccgccccggaggatcgcggctgggaggctcccagccggcagggcggggccgggtaccctggggctccgaggctggaggagggggcggggactgaaggcggggttggggaacgtgtggctcggaggcccgaggctgtgggtggggcctgagggcgggacggagactctgggctcaaggctcctggaaatgggcggggctcgagggcgggaagcggcccgtcttgctggaagttcggggctgggggcggggtctgaaggcggggctgggagggagcggggcctgaaggcggggcgggggcggggcctcgcggccggcgaggggctgagctgacagggccgcatcggcttaccccaccttactttatcggaacgtgcctaagctgctgcagctggcacccggttgcgctcggcgaagagggctgggggcgggagatgacggtggtcttctccctgcttggcaccctgcgagcaccagctcccttctcctcgccact

SEQ ID NO: 24935 - DNA, 2300 bp, Homo sapien
cttgtgtgaccagggcacagaatatgtcagaatcttgggtatcttctatggtacttagccccgtgagtcagatacaccagaggtgctgaggggatgcttgtagactcgcttttacagataactttcacgtagatctaatgtgtgtggcacaccagatcgatgcatttgcaaccaccttcctggtccacagcgtcaaaacatgcctgaaatgccaagaagaatgtttgtatttgagcataatttttcagggaggcagtgctttgattttcctgatttttttgtgtttcatttttttaacctgactatgtagcaagaatattagaaataaaatttaggagaggatagacaatccttgggtgtatggagacagggaatggctcccggcagctgaataaatagcatgcatgtatctggctttctgggccctacccaagcctttttacaactaccaggtgttttatagacacatttttctatgaagtagtcaaactgtaaacagcatgaatcctgaatgataatcgtgtcttaataataataaaagaaagaaaataagagacaagcatcacgattttcccaattgaaatgtcttttggttttgcctttggtggcacagggtcaagggtgtgggggcatttgtgtggcattcactattctttcaacctgtcctgattatggaaccctttaaggtccgtccacttggaaccacggtgctctgagaggacgctgaactcacagcagcccacacacaattccagtgatactactgcaatgttttgtacacagaatcttaggtttgttgggtaaatgtagcatcatattttgttttagcaatttgtgaacagtcttgcttctcttcacacttataagctcatcaggctaaggattaaatcgtatgcacccaaatacctcttagtatacaaacgtctgcactcagtagcgtttctggctgagcaggtggaagaagggccacgttcgccaatgtcatgaggggccagcatctttaaccttcacgcccacatcaccagccttgccttcttcacaacagaaatgttgtcccacttcctttccaggtctctcagattcatggtacgagttggaaagagacctgagagattatttaggctaaacgtttcattttataaatgacaaaattagggttgagcaaaatgtggtgattttgtctgtgcaaagccaagaaaaaaaattagagcctcttaaaagtcatttttcccctgaaataaagtatcttcatttcactgttaaatatatgtcctcatgtagttgctataatcaaccacttctcaagaaaactctaaaagctgtatttcccatatgacacatttcagaatattacataagaagctctcaccaagacaccaaggtaaaatatatatgacaagccaaagacaggtgccataaaaaaataagaaatcttcaaaggggaaagaaattccaaaagtggcaacatgacaccactcattctctgcctactttcgaggtaagacgatgttgaagttctgagggggctcagtaaataacacctctcttccccctccaggtcctgcacaaattgaaaacataaaaggtagcagatggactcaaatgccaccttcatgactgaggtgccaagctggagggcaggagttgccctctggtcctggtttaggctgaccttctgaacggggcctgagggcaggaccacacgggcagggatcagaaaggagctggaggagagctcagaagggagggcgggcccagctctcttggcggccaaggaaaaagcctggcatgttagagctggtgcaggactctccagggtgaccgagccacccagaagagggaaaagccattctccataacaaaaagtcaggaccggctgaaagcccctcccagccctccaccctccttcggcggggcttctttctgagctttgccccatccctgccccgtgctggtgactggtgtttggctccctcctagagaaagagatgggcctgggttggttgagagagaaagagagagaaagggagagacagagagaaggcttagctcttgtccaacagggccacctagagggactctcaggcttgagcgggagaagcagagttttgaggcagagctgatcaagggaacctcaacaaacaaccccagccatggaggcggcggtgtctttgaagaccccatgagagcatcaaacaagggagagaggtaactttaaataccacaacctagcccaggaagaaagaatgggccctctgagacgatcaattaattaagagcttttctccctttctccctcc

SEQ ID NO: 24936 - DNA, 2300 bp, Homo sapien
ataaatgtgtccaaagttgactgtaggaatagactcaaactacacaactactcccttgcatgtcttggggactgcagccttctaggtgacatactcccttctaagtgagcttttcctaaggtaggggtctccaaccagtctatggccccttaggaaccaggccacacagcaggaagtgagcagctggtgagcaagtgttccctcctgagctctgcctcctatcagatcagctgcgcattagattctcagaggagcaagaatcctaaagtgaactgtgcatgcgagctccttatgagaatctaatgcctgatgatctgagttggagcagtttcatcctgaaaccatccccaccccctgcccccactccgtggaaaaattatcttccacaaaaccagtccctggtgccaaaaaggttagggaccactcccctaagggatggaaatagccatgaatggtatgtgtactgagagagagagagagagagagagatagctagagagagagagagagagagtgtgtgtgtgtgtgtttggggtgtcttacttagagaacttcaaaataattctgaaaatacgtagagaaattgtcatatcgcccatgttctctttttagacccaactataattagacttccccaaagattcactcaggcatttacttaatagttgatcaagttttctgttttcctgagggtttgtatcgcgggaagtggctgatagctgtaggcctccacctctgtccagccccatgcctgcaggtatttatttgtgacctaagtcacgggtggacaccaggccagagttagacaagaggcggtccctgccttcaaggggctccaggcaaagcagaggactctcagtcacttattcttgggtactccactccaggaactgtgcccatggcctggcatcatgaatctgctcatgcaattagactcctatctcagggaattttgagtttaaaagatccttagacatcatctgtcccagtactccccagtaggagcacttctggtattttgggtgggactgtcataagcaccataggaaatttcccattcctggccccacccactgaatgctacaggcccctgcccccaccattcccactcactgctcaccacccccaacagctacctgagttgaaaattactcatctagcccagttccatcactttacaggtaaggcaatgttagacaacatacgttcttttcatgcctctggcctctgatcctagcagaatcaggacccaacattcagattttacaatgaagctagtttctgaaatatgcctctcttttaaattctttgactgttactgttttctcagagttatatactatgtgttgcatatgtaagtctgaacctttaagatgggttaagaaaaaattatgagcattttcagatcgttctatacataactcaaggttttgataaaatgttttctacatgtattccattgccatccacctcttgagttctttaataatgagaaatctgactttcttccttccaccctctttatctctatgcttttgtcaagcatcttctaggagagttactgttatcccattaagtgtgggggacagaaacatttggcatagaaagctatggatctgcagctgacttaagctgtatattattaccctgacttgggcaccaaaatcacgtttcaaaactcatttgctgccaagtatggtagctcaagcctgtaatcccagcaatctgggaagctaagatggaaggatcactttgaagctaggagtgcaagaccaggctgggcaacaaagcaagatcccatctctaccaaatataaaaataaaataaattagccaggtgcagtggcatatgcctgtagtctcagctactcaggaggctgaggctggaggattgctcgaacccaggaggtcagggccacagggagctatgattacgccactgcactccagcctaagtgacagcaagactgtctctctaaaaaaaaagaaataaataaaacaaaaccaaaaaaagaacctcatttgccttcatacacctgacctgctctctttacctgcatttgtaactttctccccacacacttgaatgccctgtaaatgagaagaagcccttagcctaatgaagcgataaggtaaggtaggtaagagcttttctttcttgagtgactcttttccctattactcaatggaatagtcagtatttacagtgatactttcaaatataattttcctaaaggaatctcaagttccatgaacagttatttttgtgggaatatctagaataaagttggactcttcact

SEQ ID NO: 24937 - DNA, 2300 bp, Homo sapien
cctgagaaaccatcacagccaagtggagcgtaagaaacacgacgactaaatgtaatgtggagtcctggatgggctcctggaacagataaaggacagcaggtaagaactaaggacatctgaataaactgtggactttagttaataattatgtatcactattggtttattaattggtacttatgtatcatactaaatttaagaagttaataataggggagactgggcgtaggatttatgggaactctgtactgtcttctcagtttttctgtaaatctgtaactgttctgaaatataaagtatattaaaatttttaaatgcctaaccagaaaaaaaaaatcatggacagaaagccaggttagggattttcatggaaaattataaagcattttattaaggcctttaaaaattccacacagaacacggcttaagcagaacatatgcagctgcttagttgaaaaatggaactggcagcttaacccagaatgtgagacttctaaatacattcaaattgagtcatcatcatttttcatctatgtagtattttgtttttccaaagttcttacaatttctgactccaagatggcaaaattgtaccattattcctatgttaaagttaatgccatgtctactatagcttggacagccattttgactcaactgtctaatctaaatgtcatttcaatcagaaaaccagccatcaactgtcaaaatggtaaaaacagttatgtgtgttttcaaagccagaagtgcaatcatgtggtgagacttcagggttttactgttgtccacagttctgagtcccaggactggtttccttactcggtattctcccatggaaaacttcatcggggaattatagggtaatattttcaagacttggaatatgtctacagttacctttctaaaaaacaaacaaaaaaatccatttaaaagcatttttttaaaaataatcatgccagggtagccaaatagaagcaactttggggtttttgcagagtcaagtcttataaattgtggaatattccccttggtccaggagatcatttgactcccacacaccaccacttcctatatccacaaattccagtatgtttggaccctcctgatggctgagagaatcacaaaaaaaaaaaaaaaaaaaaaaaaacaaacagaaggcaccagtgagtagaacaagaaagctagatatggtgcccttgggcttgttgcttagtccctgctccagctctcctccagcctctctagctgtacagggcagagagggtcacagccggcactcttctggtgctcttgtcaggccaccatcagagcccccatggccaggactcacacgctgccaggaacccagcaccatcctggaggaagatgatgcccagccctttcaagggaaaccaaaatgctggcatattttggaggtcagcaggagggaaatgtctcccagttatttagccctggaaggctgagaatacagtggttttgttttccgaaccaacaattggggcacactgtctgacagcatgaccacatgtgaacttgagagagtcccaggaaattcagggtgtgtagccatggttgctgcaggatccagaaatatgaaccaaggcctgagtgtgttcccttgatgttggtgccctccagagaggagtgtggggacatcctgggtgcagcactgtcgagggcccttcctcagctgccctgagggtggcagtcccaggggctgtcctaatgacagcagagcacccaagccccaggctcctctgtgagcgctctgccccttctcagctgctgaactccagtctcaagataggtgaccctggggctcaagactgtctctcccttcccccttcaggttcctttggagtcaggagtgcctggagtccaggcatgacttccccctggcttatctcctctttacctgtgtcctgggaacacctgaaagaagctgggggagacaatcatttctgcagacacagggttacccccatgtgaagcaagcagcaaattgatcttatcacatgcctctgaccggttagggaggcgagtcaaagaaggtgcagtgaggaagtataatgtcacatgcaacatttacaggaaactggctagaagacagcaggggaactcgagaagttggttgttttcagcagattaaaacaatacaggttagtgctttttgccccctggaaaacttttcgtagccactctaaaatacctaattctctttccttgaactgtctttaacgatttctttaatgtgaagaacttgctttttggctttgaatgtaagagccagcgcacagctg

SEQ ID NO: 24938 - DNA, 2300 bp, Homo sapien
ccactactctgctcatctttagggagattatcccatttaatccttacaacaaccccaggagataggaaatattgttatccctattttactggagcaaaaaattgaggcttggagaactagtaaggggaccaggcagctcctgggtttaatttccttgctaaccacagttagtgctactgatatgttttcaagtctggagtaatatatttatatattaaactgcttgtcttcattttatataaaacataatatatgtgtattaccatagaaatggttttaaaagaaaggcaaatagttaatggaccttaaaaagatgggtacatttagacaaaaatttgccaatgggaagagtttcccatgttactaaatgtctttcccagagaggtcattgtatctgttaaaagcatatcaagatacacgtgtgcacactggagtggtacagaagcagagaaagccgggagttaaggtccctcagcatggtgtaacaattccgaagtgcatctatttgtaaccgcccaatgggttcaccttgcccgctgcctagacagagccgatttaccaagactggggaattgcaatggagaaagacggattcacgcagagccagctgtgcgggagaccagagttttattattactaaaatcagtctccctgagcattcagggatgactttttaaagataatttggcaggcaggggcttgagaagtggggagtgctgattgaccaggttggagatggaatcacagggggtcgaagtgagtttttcttgctcttttctgttcctgggtgggatgggagaactggttaagccagattatcattctgggtggtgtcagctgatccactgagttcagggtctgcaaagtatctcaagcacagatcttaggttttacaatagtgatgttatccccgggagcaatttggggaggttcggactcttggagacagaggctgcatgacccctaaactgtaatttctagtcttacagctaatttgttagtcctgcaaaggcagactggtccccaggaaagaaggggatcttttcaggaaagtgctattatcaattttgtttcagagtaggtctgatttctttcactgtcacaatttcctcagttataattctgcaaaggtggttttatattctcacctttctgctttaattcaaagggatacacagccttgatattttaacaatatgatccgatggttattacactgagcaagaactttttgttgttattcctttcaaatgcacactcagtagctatagcgtcttagcgagtgaatgttaacttttctttggggcctggaggtggcagctctcagagctggtcagaaccccctgatgagcaggagttagctagggcaatggagtagagcttcggttttctccacatgtttgctgtggatcctaccgtatttaaggaagtgggtggctgatgataaatccatccccactggcagcaaaacgactcaattccaaccgacttgtgaggagaggcagcatctttccgagggaagagcagcacgttgtccccacatagtgggcaggagtcagatgcgtgtggaccttggccctctgtggggttcaccccgattttaaatccatttttaaaaattaatttgaatttcagatatctgaaagttggacactctttttttgagagcagacgggaaagcgtgggaaaaggcgttccttccggctcgaacagagggaacacccccacccgatccccccgccagcagccgcaagaaggtggagaagattcaagagttggggggaaaggccctgggctagactccccttccagttcccgcccctctgcaaactcctgtcctcttgcctcggtcccctcgccgcgcaggggagcgggactgaggaaactgcggactccagccccgaccatcccgccccgccgcgatcctctgcgggccgaagctgcaggcgcagagccccattgctggcggggcaggcgggcgcgcggagggcagggcgcgggccggcggggcctcgcggcgcgtccacatgtggcggggcggcgggggggcggcggcgccggaggggagggcccacatctcggcgaagttcccggatggtcgcagcctcccggcgctgagcgcttttcctgcccgcccggctcagccctgcggaccccgggagaagtttcccagaaaaaatgcccagcgcggcgcggggctgcggagtcgtccggagccgctgcgcggtaagggacgcgtcgcctctggcgcgacccgggttccgggctcccgggggccgggggagacgccgggaggggct

SEQ ID NO: 24939 - DNA, 2300 bp, Homo sapien
aagaaagaaaaaagaaaagcacttagcacaaaaattatgcttgataaatgttggctattattattatcattattattaatcaacaaattttatataagtggacaaatattttgtatttgtaattgtattctttttcactttgaaaggttttcctacccaccaggtagaattgacaatttcttgtttgtttccactctttatcgtatacatacatacatattctatatatattctagcatccggaagcagccagtaggggacagcttcatcattgaaagcagggtaacacaagggtttccagcagcaccaacagcaaggccagcccagggaaagtccctcccagagcttctctgctgcacctaaggtggtcaagcctcacaaaactacctcagtgccattcggcccctgaccttcctgctgccaagtttgcccagccaaaactctcctgagatcaaagggcctgcagaaaagaggtgggggctggggaaatccctgctcccttagtatgcaaaaaaaacaaaacaagaaataagtgagaagacaaacttcctcttatatgaaaatgagacagcgagtggtgtgaaaccactgtatcagaagatcactcaggacgtcaaggagaactccttagccttccggattttgtccttttcttgggttttggtcttacagcttgctccctcaataacagaaagatatgtgtacttctgggctgcccattcatctgctgggtaagaaataggccaggggtggttccgttttatgaggtttaatgcatcctgctgcagaagggaaatgccacaccgagtccagcttgtccacccagaactcctttcagttccctgggttccaccaagaatcagaaatctggagcatgagatgaaatattgttccgttttctgcttggcagcctctaatggaaatgcttgccactggctgctgtcagaaaagttaaggtatggtggttacataggaaattctgcagaaaaaaatgctttgagatttcccagaataatgctttgagaacatgtcagtcacattcctcttacccttgggtttcagtggtgaattagtttgcttgggctgccacacaaaacaccataggctgtgaggcttagataacagaaatgtaatttctcacagttctggagactggaattccaagatcaaggtgccagtagagttggtttcttgtgaggcctctctcggtttgtaatggccatcttcttcctgtgtcccatggccttccgtctatgcatctgtgtcctaattcctctccttataaggacactagtcatacttgattactcactaccccatatcacctcgttttcatttaattacctccttaaagtccctgtcttcaaatacagtcacattcttaggtcccaggactcaggacttccacatataaatggtggggtgggaggaacactgcagcccaacccagatgggtagttgtgggatttttttttttttttttggtcttttcaggggagaagatgactctgagcatctctgtcttactgtctttgactgtgttccttctggtcatcgtggagctgatcccctccacgtccagtgctgtgcccttgattggaaaatacatgctgttcaccatggtgttcgtcattgcctccatcatcatcactgtcatcgtcatcaacacacaccaccgctcacccagcacccatgtcatgcccaactgggtgcggaaggtgagtggggaggcccctgcagacttcacacggaggcacatctacaggcctccccttcgaggagccagtgggtttctagctaatacttggggctatttaggaactaagttctctttgggctttagggaatttttggaaggaactttctttggcctctttttaggaataaataactcctgtagccttcccagagagaaaagaaaaacagaattaacaaagctcattccaaattcaagtttaaagaatctctttgatcagagaagatgaacaaacggctgctttttattgaaatgccgtgaaattctcgcgatttcttttgtatgttttccaatctgtgaacagactggcttattttttgctggtgaaatcatctgttgagaatagaatgaatagaatgagggctagagatgggagggttcctgatgagagagggtcaaaaagtgagttttagtgaaggactaggtctgaaatagttacgttattgaatttaaaaatttaacatttcaaatatgtctttctttgacaaaactttacagagacactgaagtccaggatcttttgtccagaatgtaaaatatttgt

SEQ ID NO: 24940 - DNA, 2300 bp, Homo sapien
catcttgaagccatctgaaaaaaaaaatagatttggctgtgaagaaagcacccttaaagtgatctttgctgtggtgatgaaactgcctgtttaaagagaagtcttaacgggctttggttgctcaaagcctttattccatgttttcacttactcttttgaagttcaaaacagaagactccacatttctggactcattctatttcttttcatttctgctcttgaaccagcacatttttgcctgagctcagctcttccttgtactgacttgctaaacaaagccagaaagagccatggtgcactaactttgggtttaccagcctctattctgggagctacaggctcagtagacacattgttcaccaagtaattgaggacaacagtttatgaaatgatttgataccatataacatgggtcttcatattttcagcctccagtatcaattttcttgccttctgctgcagtgctacatattttagaatttatttttaacctcaggatactagtgcaaaggattacatattttattaattacggaacactagctgctgtacaaataaacccaaggattttgatggctcagcacgatgcatgttttgttttcattgaaatagtgctgggtggtgagcaggtggatagggggtccccctccatgcagtcattcaaggattcagaatgtcaaaagcaacaccaccttcagaacatggtttctaaggttaactttgggaccatgtccattctagccggtcagaagactagaagggcggggctgagctctggtaggtttgtgagtctgagaacatttttccactcatgccactggccagaggtcagtcccatggctccatttagatggaaggggctggtcagagggtgggggttgtatttctgccacggggctattccatggaagggagagaaccaaatttttttttagcaaacagttaactgatctcccacagtttaaacaaaaaatataaatagtatgagcttgcagctctctcctctaccctccaagccccttctctaatgatttgtttggatccactggaatgagaggatctgtcaggatgttgttgtgggcttgaggtgagaggacctttctcacctagttccatgtgggaaggaggcctggaaggaacaggcagggtacctttaagtaactgtctccttctgggaactcacctcacaccctgcaaagaagcacagctagggtaacaatacttctcagactgagaaattactaactgctggtttttaggatgtttttcaagcaagataattgaaaagctgaaccactctgctctttgcttccctgagtgagagtaggcagagggacggatggaaggaggcaggaacccggaacgactgctgatgcggtgggacactttttcccaataattactcttcgcttgaatcacagtgcataggacgtgggcaatttgctccagctaatggttcgtgtgggataggtattgcctgatacagaggcaggggttggaacagccactctgggggccagtaaagccagttttatggaagaagctgtctttgttaaaaaccaaacccaatcaacgtgggggcttcccagcagcagactcaacaccagctacacttttctgaaatccaggcagtcagaaaagcccccggcaccctcagcctaacactgaagcagaggaaatgaaactgaagccatgtttgcagaatgtggatttttgtggtttaggacaaacagctgactatctactcagaccaaatgaccctaatcaagtcaacccacagagatgaggttctggtttacacaaaagagaggcagtttgctcaccatttaaaataattccttccttcctatacatttttttttcattaagatctgactactggtgcatttaaaatataatgcagttcatactcagcttgtcaagggtaagcaattgtgtaaagtgaggcatatctgtaatggtgtacagtcccagtaactccctgggctccagggctgagggcagcccagctgtcgctcccacaaacaggtggtgtaaaacaatagctctagtgagccgactcgctttccaaaccctccagcagacaagcacccagccagagtgccagtgagaagcacaggccaccactctgccctggtccacacaagctccggtagcccatggagccctggcctctcctcctgctctttagcctttgctcaggtaagtgctggggtcaggggtggggagagggctctcctttgaggctaaagtgctggaggcccccaaatcaaagtcttgcttctttgatgagaccacag

SEQ ID NO: 24941 - DNA, 2300 bp, Homo sapien
ggcggaggcgggcggatcaagatgtcaggagatcgagggcatcctggctaacacagtgaaacccggtctctactaaaaatacaaaaaattagccgggcgtggtggtgggcgcctgtagtcccagccactcgggaggctgaggcaggagaatggcgtgaacccgggaggcggagcttgcagtgagccgagatcgcgtcactgcactccagcctgggcgacagagcgagactctgtctcaaaaaaaaaaaaataaaaataaaaataaaaaactcctgtcatttgcagcaacatggatgaaactggaggacattatgttaagtaaaataacatgttactcatgtgtgggagctaaaaaaaaccgtgaatctcatagaaatagagagagaatggtggttaccagaggctgggaagggatggaggatgacgagacgttggttaatggggacaaaaatactgttagatagaaggagtaagttgtagtattcgatagtatagcagggaagttatagttaatcatttattgtctatgtcaaaatagctagaagaattgtgactctcccaactcaaaaatgtttgaagtgatagatttcccaatcagctgacttgataattacaaattgtatacaggtatcaagatattatacgtacccccatatacatgtacaactattatacatcaatttcgtaaaagaaagaccttagtgaaatgggaaaagttcacttgtcgcccttgcagggcgtgcgacacggggaccggcttgcttcttcagtgccccattactcaggcctctagggagcatacagacgcgaaggctaccgggctccaaccccacggcagtgtcgaggggtggatgtttacagctcctgaagccccagtgggcgtgtgctaccctgcgctcttttagttttgtcgtctataggcagcttgtattaaccagctcaattagaccctctgccttgttgcaacaacagggggctttctgtatcctgggtgcttgctttgctgtaactgaagaatcggatcacacctgggcttggagaatgagtgcaagattttgagtaaaggcagctctcagcagatgggggaagtcagaaggtgatggagtgggaaggcttcccccctggagtcgacagctcagcggcctgggctctcatccgactgccacagcatcattctgcttctgccggtcagtggcctagttcctccgccattgtgctcctctccacgtcctgccatctgtgtgtctgcctgctagggcctcaggatttttataggcacaggatgggggcgtggcaggccagggtggtcttgggaaatgcagcatttgagcaggaaaacaaaaatgcctgtcctcatctaggctcgtaggggtggagccctagccaggggccacgcccttccctccccccccccccccgcccccgcttccgtatcacttaaagggaccacgctcttcccttcggtatcattaggaagctcaacaggaagggaggtggggttatcataggctagccattccaaaatactatttgaaaatgggactgagaccgtagtttggaaagaagtacttgttctgaatgatcaaaggggaagatgatcaaaggggaagatgacacaaactctataaaagggtcagatgtctgttcaaggaaatgaagcattaaggatctgattattctttaggtttttaactgatcaggacttgcagttcttgtgttaccaagggcctggttttctggtcagcagcacacaattgttttaaatcccaaccactcatcctagtaatccaagcccctgagtagccacaggggtcttgcatttccccggggcaatggcttgagggagagtctcctgcccctctatgattttcaggaagaactgattccctgtcccaggttagatgggtctccaggaatatcccttagtgactagaacagagccctcagccagccatcctggagcttcaagcaccctactgcagtgggtggtacatctgggccccatatgttcgcagggaggggctgaagagcccaggcctacattgccaggtcacccacccatttgatgtgtggtcacagtggaatctggttgccatggggatgcgaggttttctactcaggctgtttgagaagcaaatttttccattgtgtatatgtaagcatacttcaacatctttaaattccttttctttttcaaatagcattcagggtggattcatacatttaaagaaaaattctaaaaggcaatttcccagaaaacaggcttttggagggtaaccagggttcagcctttgttgagg

SEQ ID NO: 24942 - DNA, 2300 bp, Homo sapien
tggtttaacttaattattatagcatgagaaacagatgataggacgtacttagggaaccaaaatgggaaatgtaagcatcctgtagcaccttagtgaaaaaatgtaggtattgctcctaagtcaagttgtgctaagtctctcacctagccaccccgtttctacaccagcaaacaaaaagtatatgggtcctataagtagttacactataattgagatctgtgcaaataaggaattattcccaactggcttccactatgacctggcctcaagctctctgaataaaaaaaatgttgagactagagaattaaaataatggtttcttctatgtaagtgtagcccacaacaaaactactcataatacaaagacaaaactgaccactgcaagctgttagcaatgtgatgtgcatgctccttgttctgcatgaaaatagtatgatacctagttaaacttcttttatctttcatcaaaatactcaccagtttttccttgtctttaataaaattgggttttggttagctaacctcagtccataatgagcaaaggatacagattagcctttcataatttacctggcagtggtgctgcattatttttaaaacctagtgctgtatgtatgttaattttcctctgcttttaataggttaaaaaaattccattttgcaataatgcatgactcattcatttctcattaccttcccactgattttttttttttttttttttttttttttgccttgagccagcaagaaacttacttacatgagaggagggagaaacagagacagagtgagtttaggaatacagtacttaaatactgttgcttgattttcattggttatctcctttcttacggtggccaatctaatgcagccttccttgtgaaatccctcccttccccccaccttccctgctaggggcttcatagggtgtctgttgctagaaactgattgcaggcagtatgtaggcatctttcattcagaatggacattaatatcttgaatagagaagaaagcttttagaaatgtatcatttgtcaaaattgcatgccttttaaaaaatgataaagagagatgctgagtgttttgtatgttagcatcgactctttctttttatttctgttcagactcaagtttttagaagctagaatatagatccctttaagaaaaaaaaaggaagaaagaagaatttgctggttagtcgacctctgtttaagaagtgcttcatcctcctcctccacctctccgtggtgtttctctgcagctctctgtaggttagggttctgtgctgcctggcagaatgctcatgtgttagctgaatagatatcatcgacagacatagaccactataggttttctttccttgtgaattccaaaatgccatccaaagagtcttggtcagggaggaaaactaatagggctgcagttcacaaatcaaaacaagagggccgtcagcaagatttattgatagcagccttgggaatgaaactgggttctccaaagtcgtctgtgacaatctggcaacctctgaaactctttgcttattcgcagttgacatcacttgttagaagagcaactctgaaagaaaacgagcaaattccaaaatatgaaaagattcacaatttcaaggtaagaatatttgcttttagtcttttaagaaatgcatattacttgaaatatataatattaaaggaatatcttatgtctttttaaaactaggatgacttgactaaaatgttcttgctatttaaggagtgagatgttttcagcctgattttacttgaggaatagctgaataaggctaatagaaatccaaccctgtttttctctaatgctgttctaatattgttttatcaatgtgtactcactggtaaaagtcttgactgatatttaaaaggtctcagttaatgatgattttggcattgtttttatttgtgatacaaatgtgtctgaatacctctgttggagattttatgagaggattagatctgtgtttctggtaaaaagctttggatataagaggcatgtgctgttgcatctggattgagcagatggtttgcatttctcatagtttctgtcttttctcccctgttaatgaattgaccatgatgaaaggaggatggctaccatgggactgttgatgctgctgacactagcagcttctcctcactttttgagtatttgctttcaccatgtatgcgtatgtgtagtttttaattattgtgttaatgtggtttatcaactgtacttgaattttctttcaaggtgatatgtgtgttgattcaagctgtatgtagatctag

SEQ ID NO: 24943 - DNA, 2300 bp, Homo sapien
tatatatgagtagatggctatctactagatattgtaagcatgagtgatacacatttgtctagaatgtcagactattgattatattggttctgaattttagagttatcaatttttgttatttacaagttcttcaccaaaattaatgcagaagtgcagttactgccatgttgaaggcataatagtgaccaaacccttagccatttgagagtagccaacgctgttttcatcctaagctgttgttttctatctccttactgccctaggtagctgctcagattgcagttaatccagaatttcttgactaaatagaacattactcaggaaatacagtacaatctgcagagtctacagtagaccttacctctgaatgacaaaatgtttacttttacctagctataaattttctgggtaactatcatgaatatttttatgcttgaattttagtaactatagctgtagaaccaggaatgatctataaaataggatgttgatcaaaaatactcaagaaaaagatgctactttggttacatgtgtgattgttttaacttagtaacttgatatcaaatattgttgaagaaaaaattttactgttcaacttgtgtttggagctgtttttttctggttcctactgagaattggttaaacttcactttaggctgtacatgtctaaagagtcggttggccgttatatttttagtcatcatgtgacaaaataggtccaatctgaaaagcaatttaggctaggcaaggagactttttccattgcatttcttcttgcagtgggagcattttatgtctcatattaattatctaagtatataaactcatgaaattgaaactcctatgtaaataaattttgccttttatttacttagacataattttagaaaaataaaagggactaaagactgaagtaaacaaaaataatttagggatgtttagaaaatcagtcatttgttatttttaatgtctagcatagcttaagaaccacttcatgccctaattaaagtagaatatgcactgggcacatacctcctgtagattatgaaatctgagattaaagtatttacactacaaatatactgaatccatttaaatacatagaattttagatgctttaaatacagtgtaacattggcataattggtttaacttaattattatagcatgagaaacagatgataggacgtacttagggaaccaaaatgggaaatgtaagcatcctgtagcaccttagtgaaaaaatgtaggtattgctcctaagtcaagttgtgctaagtctctcacctagccaccccgtttctacaccagcaaacaaaaagtatatgggtcctataagtagttacactataattgagatctgtgcaaataaggaattattcccaactggcttccactatgacctggcctcaagctctctgaataaaaaaaatgttgagactagagaattaaaataatggtttcttctatgtaagtgtagcccacaacaaaactactcataatacaaagacaaaactgaccactgcaagctgttagcaatgtgatgtgcatgctccttgttctgcatgaaaatagtatgatacctagttaaacttcttttatctttcatcaaaatactcaccagtttttccttgtctttaataaaattgggttttggttagctaacctcagtccataatgagcaaaggatacagattagcctttcataatttacctggcagtggtgctgcattatttttaaaacctagtgctgtatgtatgttaattttcctctgcttttaataggttaaaaaaattccattttgcaataatgcatgactcattcatttctcattaccttcccactgattttttttttttttttttttttttttttgccttgagccagcaagaaacttacttacatgagaggagggagaaacagagacagagtgagtttaggaatacagtacttaaatactgttgcttgattttcattggttatctcctttcttacggtggccaatctaatgcagccttccttgtgaaatccctcccttccccccaccttccctgctaggggcttcatagggtgtctgttgctagaaactgattgcaggcagtatgtaggcatctttcattcagaatggacattaatatcttgaatagagaagaaagcttttagaaatgtatcatttgtcaaaattgcatgccttttaaaaaatgataaagagagatgctgagtgttttgtatgttagcatcgactctttctttttatttctgttcagactcaagtttttagaagctagaatatagatcc

SEQ ID NO: 24944 - DNA, 2300 bp, Homo sapien
tctatgcagaatggctaaggacaaaatactctcgttattttgcttctaatactaaacagatttttcttttgaaattcaaaccatgcaacctctaaattgatgcgggatgtgggtagggaaggtggtcggtgagaacaccagaaatctaagattttcccattggttctgctactaaataggtgaacacatttgggaaaatctttttacggggaactcaatttttttacctataaatcatgggagttttggtcttttcctattcaaaattcaatggttctattctgaaggaaaatattttcctttaaattataaaggcaaaaactttctgagattacaaaaaacacttccaggggctcacctaaggtccctgaatagcccataatccccttgaaattatgtgaaaaatttccggtgaatgtgtgtatgtatgcaagcacttttctaagaggagggacagtattttcattagagcctcaaaaggaaatttggtccaaaaatgttgaagaccactagttgaaacagtaaatggagtcttcggtttctgatttatttggctgcagagcagattagcagcaatctttatatggttataaaatctatcccacaaagctttcttgagtttctcatttattttcatgagctgtgtgtttgtaattttttatgagcagaaaggttgttcaaaatcaagagtccattttcatgaaagattttaaattctggggattttaaagatgtattttgattagtggctaaagagagccattttacatcacaaaattccaaacatatagcatcttaaacacttgcccattcatgttgaatcattttaatatttctttcttcctgagttaactgacttgaaacaaaaggcttggctcctccttccaacctgcttttcttctgatgcttaagtctgctttgaaataatgatggtgaattaactgtggttccattggaagtactgtagtaatctcccactttatcaggattcgatctctaagatacattaaatacaagatatttctataatattcttaaagaattatttgaaaatgggagagaagacactagggaacctgaggaactaagaggaaagacgcctgtagaaagaaaggagaaccaaagagaagatctacatgatcagataccaaaatagtatcaaatccctaagcagagaaacaagaaaaaagaaggaatttcttaaacagggaacacatatagcaactagagaagaatgactttttgaatacattaaacgacaacgacgaaaaacatataacccagcttttcaagaacatcttttggctgacaatctcaaggcgttgtatggctcctcatggcagagacagaggtgaggagacaacatcacagaaaggaggacgttgccagtgattatcagataaatacaagaagctcaggggaacaatcttttgtggcaaataagtgccagtcagtgacacatgctgatttttttttccttgagacaatatcaaagaggtataatgtaaagggaagaaaatcaggtgtaagcattggtcttttaacaaattatcttaggtaatctcagatgctttttaagcgactccttttcctaatgtgtgtcaatttcatcagaactactagcagctcctaagtccaaacggagaggaatgcagctttcagtgcctctgttcctaccagagccctgcagcttcaggtcaccggctccagccacagtgagcctggagggcgccaggagaagaaatatgttctcacacgcaccaggtccccagatgaccctgcctgggcgctgcgttcactcagcatcctcctgtgactcttcctctttcgagtaacagcgtttttctcctctctgcgcctcctcaaattccattcaagaaaaaacctgggctttcagctaaaacgcacaccggccccgctccatcccgctccgggcggccgcctccaggggggcgctggtggctcctcgcagccgcgggaatgagggcgcaccctcttacccccgcgcgcgcccgttgccatgggaacgcactcgaccgggaagcccgagggagaggcgggaggcagcggcgcggccgagctcgtgggagacgctatcgcaagatggcgtctgcgaggccgcgggatgcggagtgagcgcgccccgccgggggctgtgcgaggctgctgctgctctccccgtcgccgccgccgccgccgccagtgcggcgccgcctctccgccagccactgcgccgcggccaagcctcctgcctcgcaggtacctcctcccgcgcgcacgctccgcgcctgatggcagcg

SEQ ID NO: 24945 - DNA, 2300 bp, Homo sapien
aaggaatattagttttatttagcagttatgctgggttcttaaaggagattcactagaccctcactaattctcttagaactaagttgggtagatgcatcatggaacaagacaggcaaagaagaggtctacaagaagtttcctgcgtttgtaaagagaagactgtaaagaattttaggactcttggggatattgaggaatgcaaaagtgagaacaaagatggaaaagggtggcattttatgaggatatgaataagtagtgagacaagttcatggaatcagacctgaatatggtaactacattcattttgacaatgctgaatgttttccccacttgtagaaaaactatagtaaacaaactgctgtggaactagaaatatgtggataaagtgagaccctttgttaaatgccgggctgccaaaatgcatatataacagatcggcatagtttccacctgtttcctgcgcctatcttatttttttttctcactttaggtataccctctctttagaaaattagctaaaactgaattatcaaaacagatcagagtactgttcatatcactaaacagttcttctcttgtctaaaaagaactgaaagactttctttaaaataatgtgtttctcgaatgcatcatgtagataactaactgcttgacaacagactggagaagtagcaatgagaaatttaaaaccaaagctactgcccaattgaatcaacactggaaaaaatttcaaatggaaaaacaatttttttaaaaaaatctattctaattgacccaaacttcttttgaaatgtcgtaacatttgcagttctttttctcacattagttgttttgggagatggagagagaagcatctatttaatcaatgcgttctagacctaacaattgtgatgtcaatcaaacattttgtccaccatttccatcatgagtaatctgaactgtgaggttttgctgacataattagtgttacactacaatggcactactacattactgttactatatggggacggtactttcattttaagtaggaaagtgttaataatttggcttaatgtttcttaactaaaattagttttaaaagaggactgagttggcttatacacatgtatgcggtccagagacctacctgttaaaatgtcaatgccattacaatttcacttttatgccagatatcattcttgaacttcaggctcattaactctcatactatcccccaaaacctttcaacaattttgagagtgtattttatgttaatatataaactagttcataattttgttccagactagaaatcagtatttaataaatggaaaaaataagacactgaaaatcttttattgaataatgtaaattctcacagaggcctctgatcatacttttcaacttgtgcctatttattgaataaccaacatccttacagttaatattaaaatctttaagttgtgtggggttttttggaggggagggatgggcaattaccagcaaactccgcctcccccaaacctcacctaacccgaagctccccgcctcaggctcccggggagccaaggggtgggctgaggaacgcagcctacttttacccacctccctacctagtgctgggaagtgacggaaacggagacacccggctcctggggctgggctcggaggacccatcctgctttccctctagcagcctttccggagctcaccacctttcctcccctcacaccgccaaagccctgcctagcccttcaccgccgcctgcacccgcgccctcctccagccgacagccaatcacagtcttccacagctccgggtttacagaagtaacgctccttgggccctctggtcccgccccctccagaactgcttcccgcccttcgggctccttgtccaatcatgagcgcccgagtgctctttgatgcccgtcccctctacccgccctgccgaagacccgccttcttctccttaagcctgacggaatcacctgactcggaggcgctccctcagaaggaaggcaagaaggggcgtgtgggtgaaggggaggggcgccagaaggaaggtggggatgccgggagcggggcgagcgggcgggggttgtcagtccgatctcgcgagagaggacggaagcctgtgggagcccgtggcctttaaagtgccgttcagccttttcctccaggggtgctttgtaaacacggctgtgctcagggctcgcgggtgaccgaaaggatcatgaactagtgacctggaaaggtgagtaacgatgggcagaggtcagcagggctggagactgtagggatacggagaaagaaggc

SEQ ID NO: 24946 - DNA, 2300 bp, Homo sapien
cagaaaagattagatacttctcagggaggtccctgttcatctttatggcctcactttagtcctctcagaaggtactctttttcttcaatcttcctcagtgcaaatatccaccctcaatcaacatcaacatgggttggtgttactccaattcactcctctttttcttttctttttttttttgtttttgtttttttgagatggagtctcgctctgtcacccaggctggagtgcagtggcgtgatcttggctcacggcaacctctgactcccaggttcacgccattctcctgacttagcctcctgagtagctgggactacaggcacctgccacaacgcttggctaattttttgtatttttagtaaaaagacggggtttcaccgtgttagccaggatggtctccatctcctggccttgtgatccgcccgccttggcctcccaagtgccgggattacaggcgtgaaccaccgtgcctggccttcattctcctctttctataacgcaatcttaggatgcaaaaccaagcaaagtctgaattaatctatctagaatagcaccgtggagtcacagccatggtcaggcccctccaaagaacagactggatttcggaacccatgtctctccctgccacaagcaactagtccatatgcaacttggaagcagccactgtggatcttggcttctttcttgcttcctcctcaatagttactgccactgatttagtgctaaagagataggaacatcacttaaaaccatctctacacataaatccacttagaataattttttcccctggaggatctattattgaagtacaaggctttactgtttattctactgtagacaccacaggacaccatgttcttggttagaattgagtacttgagaaactatatgaataattgcttgttgaacagtacacgtgaattatctctattttccagctaaagattgagcctaaaatgattagtatttttgtaattttgaatcatttgatccatttgaagttggattagtgacaaagtcttattcatttttcaagtgttagttctgagggcttctcccagaactagcagcaaccagcgttgctgctagataatattgcacctttaagctaacaagtaaaaagctgatcctctgggttgatgttgtctcatgctagggctctaggcagagtgggctggagttcagtccccagccatcttcttagcagggcattctagatgtttaatcttttatgttgacgtgttgatatcacttccattagccatttgttagaattactaaattaaatttacataattcaaggatctaaaaagaccagaagttcagtcagagccatttttctgagatatttctgcatccctctgaagaagataatttgtccaaacttaacaaaaacaggtgttaaaattgagtacgttctgagaatactcagactttttttaagactttttttagtctcaaaccctacatgaaatacaatcccttaaatcttccaatcttagagctagaagaaaagtcgagcaccctcactttacccagaggcaattttgtgccccagatgacaaagctcttagatctactcatttgcttatggctccaccagtacttctaggtcaggccctctttcacctgaaggattagccatacttctggaaccattttccaggttccttgaaataaatatcttcgctttgctggggaccctagtttcctgttaagtagtgaatgacccttctttcctcccgccagccacagtcctatttcacagaggaagagaatgaccagcaagtcaacttctactacagagaagcagcaactgataaaaggccaaatcttacaaggtgccaacgtgaagaaaaaggcccactatcctgcagccaactcatatcaaaagttaatctgtttagtcctctctgccggggtgaatctacagtttttctttttgtctccctcttgccccatcaccaggtggttgtcgttgtccttcccggctagttgccaataaagttgttacaaagtgaccttgagtgtcttccttggtgcacccgaaaccccgccttcttcatccgggtgctgcggcgcgaataagagccggaccgcgcttgcgcattgagtcccactccttcgacctctgccgcagcccgtgccgccgccgcctcctgggaaggtaagtggagggcacagggagcccggcctggccagggcggagcggcgcccagtagggacccattcattgtgccggcgcctcactgggcacggggcccaagctgacggcgtgcacgggagcctgcggggcc

SEQ ID NO: 24947 - DNA, 2300 bp, Homo sapien
cataagagaatctgagaagctcagcatttttttaactggggacagatctctgtaagtaagaaaaaaaggagagaatggatattggataggcaagtagctgtgtctgccacaaattgaaaaattaggaaattacttacatttgagatgggcaagaattagcagagggatttgatttcatttccacatacttgttcattttcttttcatgtaagtagtcttttatattaattatacactatgacatacaattgttttatcctcaataactagcatatcttaccagaaaagaaggacagaataacatttattttattatgacattgttttcatgtaactcttttataaagtttagcctagacctaaagaggacatggagacatacatttactttttgtttcttactaaattatttgtggcccatttagtaaatattctagtccagtatactagatgtcattaaagtggttaaataatttgtagaacagtcaaaaatgaaatttaagcacaaaattttctacactagaaattgattagcagtgtaggcagttgatagatctgggagtgttaggatctatttaagagatacctagaaattttttctatccaaatcatgccatctttcaagtcctagctcaagtttctcttcagtaagctactttctgaccaggacaatctcttttctaatgcgatttcccttagtgcatcacacaactttgtcctgaaatgtgtactaatttgtatttttctctaattttttatataagtcagtccaatttctcatatgccccaattatattgcaaactcttaccttttccctgtgtcctcacaatgttcaaagaaagggcatagtatttatttgagctaacctcaattgaatgtcctgtaaaactagtgcaggttcagaggtttttttttcaaagagaaattgataacaaattaaagccaataataagacacaaaagcttttataagaaaaactaaatataataacagaccccagaatattttaaacttatatttctgattttcatttcaacaatttttttttctcacaccagcatgagaaggctggtgaaacttttgcaggctattaacatttaaaaaaaaaatttttaagacagggtttcatttacatcacccagtctggagtacagtggtataatcttgtctcactgcaacctccacctcccaggctcaagggatcctcctgccccagcctgccaagtagctgggactacaggtgtacaccatcatgcccagctaatttttgtattttttgtagagatggggttttgctatgttgccaggctggtctcaaactcctaaactcaagtgatccacccaccttgacctcccaaagtgcgggtattacaggcctgagtgagcatgcctggcctaaaatgttcaaaagtagataatttaaatatctttccatgtggtcagttagaattaccttactaaagttaatgatgacaatcctactccacctcaatacttcaaggaaagggagttagtaaccaagacctgggcttctttctatctggtttgctatgagctacacttggaattttaaactgaaattccccattttaagatgctgctaccagatggatgtggtggctcgttcctgtaatcccagctctttgggaggctgagatggatcgtttaagcctaggagttggagaccagcctgggcaacacagggagactgtggctctataaaaaatttaaaaattagcaggtgtggtggtgcatgcctgtagtcccagctactcagaaggctgagatgggaggattgcttaagcccaggaggtcaaagctgcagtgagctatagtcgcaacactgcactccagtctggatgacagagcaagaccttgtctcaaaaaaaagagatgctgctacctccacgtagatctcaaagaagtagtgaatatttagcagacaatgtttcctgttttagttatgtattactaaatagatattagcacttcataataaacaaccctaaaacttaatagcttcaaatgacaaagtttcttttttttcttttagcaccagagtccatgaggcattttatttgtaaatatgtattacatctctaaaaaaagaatcccaggattttacctcctgtgtgttttcttcttgcttcttcatggtccatgataccagctgaggttgttagtacaataaaaccaaaccggccggatagaagcagattattctgccatttttccagatgtttgagttgcacatcaaatctggggctgattactcaacgcttgtttagcctacctgtga

SEQ ID NO: 24948 - DNA, 2300 bp, Homo sapien
atttatagtcttactgatgtcagttattgctttttcggtggcacttactttttttgcccctctaagggtatgcttgtgtatcatttgaattcagattgcctagctatttgaacatctcaaagttatatatactgggtattaaaattaaaagcaagttatatcagtgaagtaagatccttttgaatgtacaaagacccacactattgagacagcttttagatacttttttgtccattctaaaagtaagcaaacatgattgccttcttgttttctgtatgtataacccgtaaatatccattttgacataggaagaactttggttaagagtaagttctctaattgtgtttgttttaaggaatgaaacttggttaagattttgactacttcattattaaaaattgatagaattttagctcctgagatatttacaactgggagaaatgtctatttaggtgtttacattaagcggtatgaaagttgttaccacataggcactggtacgaattctcaataagaatgcagtggaacagttaagtagaactgtaactacgttggcactggtacgaattctcagtgagaatgcaatgaaacagtcaactgcagtgtttctttttgatgtcttttattttacaactgggccaaaggcacattatgtatataattagtttatatttacacactagcatataggaaatatttctgcacttgaccctatttgaattctgagcattatttataagtataaaatgatgatatataagtgaattttgtgctcttgtttgtattttattaaggaaaatgaaaataatctggcatcagtttcattttgctaaatatctagtcttcttcaaacagtatcttggtgggtgacttggctacctgaaaaatcttaggaggaatagctcacaatacaataaatctgtagattctgcttagagcaaattatggtacttttattcagacttgtttcctttctagttaacagaaatagtgacatttagaggttttaatcagaagttaggtttttctgattcaggaacatcgtaggccagccatttgtaatttttaactttgagaaacaaattttgtgagaataggtagtgggttgctggtagttaattggatttaatatttgtattaaggattaactggaaaaaatgtgtctcagtgctaattcttggacctttaatacagtgtgcttatctgttacggcctccttttatctctcttctccaatattaaaaaaaatggaaatcaaattattatgctgaagggaaaaatatacctgtataagaatggtgtgtttggctaatgtttctaagttgcacacagtttattaacaactgaacaaaacatttttatcatttaaaaatctatttttatgatttaatatctcatatgtgacagtttttttttttttttttttttggaactcaatctgttaacagtctgggacatccggtatagtaaccagagtttttgagcctgccgtattgggcttaaatttcaggtctgtagtcttgggcaagtcacctataaactcactgagattattttttcatctgtaaaatgggaagagttatgtttatttttgaagggtattaggataattaaaaataatgtaatgtgcctagcacactacctgaaaacgatggcatttgttcttattaatgtctttaaaatatgcaaggaccataagtttttcctcttgcagatgaggaaagtaaaaaataatacgaacatgtaattcagcttctcagattcaagccaatgttttttgcatcaacttttctatattgtatgtatgtatataaatacatagattaaggaaataggaaactgaaactctgtggaatataaactttttaaaaataatttcatcaggttttttgtatgttactgacccatatggattttagtaacatcttgcttagtcatgttgttataaaacattcaaattctgatatacattgcttgaaaatgagtgagtacctcagagaaatttgatagactcaaacagatagtatgagaaatatctttgaaagaaatatggaggaaggttaaaaggggattagtaaaattaatgcgataggtaacatgtttgtaaccatatagtatccttttagatacaaaagcttattttcattattattataataaacagttaatggttgaaacttagtaaaatgtcctatttctgattattaagactagtataaatgagaaaatccaagctattaagtaccattagctacagtgatcttagcttccttgcttacaattgttcagtgggtcatcta

SEQ ID NO: 24949 - DNA, 2300 bp, Homo sapien
ttggatagaattgttgaatatttggttggtgatggtccacaaaacaggtaatatttactaaggtggtagataaatgaaaatgaaaacaggatgtgtgtgtgtgtgtacacactagatgttttagttttgtggcacctattttctgactttagagcatagtggagtattttatagccctgcaaaagagtacatattcaattatttgacagtagaagttttgacaacatagtctggattaaatccattttgaaaaaatattaactctgctataacttttagagaaactggattatttcattgaaacttttaaacttaaaaagcaaaaacatagttcaactctgataggttctaagaagtggagctttataggtatcagtactggacttggtgatagtagtacttttaatgttaagagcaatttgcatgtatttatttctcaaaatgcttttccaattattcttaaaataactctaggaagatcgtatgatatgtacagagcaattgtcaaagtatagatttttaaaaaattcatcggataatagatgtttgacagcgctcctaattaatattatttaaaaaaaggaatgagaatttagtgtttatgtaataaatcgtatgttattcaaaatagaatgacatttgatatagcgaagtattcattgagtatatccacagagaactgagaaagtatataaatagatgtttagtgtaactgggaaaggtataagaatcatgtatagtaattaatctttgggttgtactaaacaaaattaaatatgtttgtttgccgcaagacatctcaggttttaataatattcattgtgaatctctaagagggttccaacttttccagccttatctgaccacagatttggaggctttcatccccagcactatactctgggaaacaccaaaatttaagtgttcagttgtcaaatatgtttctgctaatttaataaagatatattcatttaactgttagtttattttaaatttgatgtataaattatatttttaaatgcttgaaatttgggctttggttaattttggcttttatttaatgaatattgtttgttgtttactaagtctcatataatttgttatggcatatttagctgtgttaaaatataaattagccatgatggctaaattagtctctgtcatgagctttgtttgcatttgtaactggtctgttcatttttccttacggtgtaggtatgcacttatatgtcagcagtgtttttctcataatggcatggctttgaaggaagaatttgaatacattggtaagaattattgggcaatgagatttaaatattttatgcttaaatattttattctatgccattttctatgcagtgtcattttattttatatactctctttgtatacattggttaggcatattatccttattttagtacatagagcaaagcagggaagacaattcaggtttcttcctatataatgtacagcccctaggccagttgttctcaaaccccactgtgcatcacaatcacccaaagagcttaaaataattatgatacccaggacccatttacaaagagtctcctttaatggactgagtatgaggtccaggcatcagtatattttttaaagctctgcagatgattctcatgtgtagccactattaaaaactactgtggtaaattgaaaatgcttctgaaatattatgtactacattttcatgggtaaatgtgcaagcttctggattttaaaatacctaatgattctggttactagaaatgtaatctcactaattcatttaaatcattaatattattctgctgtcaacctgctgtgtaacttattacatagttagcctgctatgtaacctgttatgccttttctgcctttaattttaaaaattaaaattctaataattaggaagtatgctttagttctgtttagagcatctaccatattattatttaaataacatacacagtaacttttaaaaggttcttttgaatatctgcaaaagtgatcttgtgagttaactaattagttcttgaactttgcttggtttgtggttttgcttatttttaaaaaattctctgcagcttttcgatgtgcctactgttttttcttgaaccctgcaagaaaaaccagacctcaggctccaagacttcctgagtttagttttgagaagaggcaggtggtggaaggttcaagttcagttggtcccttgccatcaggaagtgtgctttcatcagacaaccagtttaatgaaggtatgaatatgttaaacagttttgccccttaataacatgtgttat

SEQ ID NO: 24950 - DNA, 2300 bp, Homo sapien
tttggactctgctaaagcagcaccttcactggctttctcacattctctccggctgctgttttcttatcattttccaataccgtgaacattagcctctatcacagcacttatttagtctgcattgtattttttttaaggtttctctcactagtgtcagcggctttaggacagctggtttatttatctctgtatcctcagcacgtaacacagggccttgtcaataaatatttggaaccaccctgtagcctgaagtccagccacaatagtgtgtatgttgatttctctgcttgtaatgtctttccctcactttatttgctcgatgaacaactattcttgatatgaaggaggcagtggcttagtgttaccttcaacagtgtacataatctttctacatttcagtttcctcatttgaaaaatgatactaaaaaggttgttgggaggattaaaagagttaatgattaaatacttctctcccttctctttccaggtcaaatctctactctcggtagagcaattccctagggaattttatctcaggattaggtttttggaatctcgtgtatccagacagctcttctctgtccccttgctacccttttttcagaggtggggtatcgcttggtagcccaggctggagtacagacactgatggctcaattgaaaccagaggacacattactggcaagtggaaagccgttcttcccagtcttcttaggaaaggagatctttctgcggtgagatatatttgcaaaactgcacaggactttaatactttgcaacagcaaaggttgaaaaacaaaacggttaaatttccacatcaaaacaggtgaaatgtttctgttcattttcttctacatttggaaagtgcctgatccacagtgacacgctaaacttcagttcccttcccctcatccttgcaagtgtacagaactgtaactaaatatttaggcaattagggcaagcaaattgcacagtgaattatgcggtagcttctagtataataaattttcttaccaaccaaacaatgctcagttgcttctcttgacaacctgtttgcatcgtcaaagtttaaatgtaacatattaaaactattactctttaaaaaatcattgaaacttttttgtgtataaataaaaaaatagaataaaaataaataaaaaatagaaaaaaacccatgaaaaatgtttgcacatggggtaaagcatgtaaaaggggtaaagcatgataaaaaccttcgctgaagtttccctgctcacacattactgtgtgcacgtctagtctttttctcattcaggcatcatttgttatttgtcttttccagttgaggaggacacttaataccgtttcggcagcgtttcaaatccgagtcaaatatagcctgagtggtttttttgtgggtccacctatcagggcctgtgaagagtgttcttggggttaagagttctaagatagaaaactcagcttatgctgttacccgcaggttttaaagcaacatgatacggcgtttgaagcttacctcacaccggtgaggtaagcgtccagtcatcaaatgaccctttttgacgtccaagagtgacagagcctcaagcactcctggggaccgggctgacttttctccactggcttggttgggaactggcttcttcggagctgtgtagtcttaatttgctttgctgctggctggctgacagctgatgggggactcctcaggacggactcccttccagatgcacccatctccatccttctcaactccccaacctttgtcctccccactcttcgctcgcgcggcggtctgagaccaccaggaccagtttcaggggtttccttctccagcgagacttggcagaacaggctttaaaagcaaaggaggcagcggaagagtaagaaataactatattctaagagtcataataaatggcagtacataactgcgacacgacaccgagcagcctaagctggctgcggaggccacaaacacaagatcctaacctcccggccgacccgccccaacaactacccgcccagggtacggtcacgtgacgggggagcggcgcgcgccgaccgcggcgccaattggcgagcggctggagcgcggggtttcatgggaaggagttggcccggcttgtctctctgtcagtggcggctgctgcctgctctggaggcaggctgggcggtggcggccgagactggcgggggtggacgcccgggccgggctgcgcccgcttcttgcaggtagaacgctcaaggcgagggcagttgggagggctctgcagcggggaggcatgctgagctgtgcc

SEQ ID NO: 24951 - DNA, 2300 bp, Homo sapien
gttaaaactatcttcatgttttctctgtctgaggaagaaaaaatgagacaaagggaaaataaaagcatttcatggtggcccatggttggtggtttggtaccaaaattgtttcataaagacccagccaaaccctctttaaaagttagcaatcctgtcgcctcgccacagttggcctttttaaaatgctggttgaactttcattgctgacttttgccttcttttcccaaatagtgaaaaaaattttctcatcagcaaacttctattccctatgatttcctgtaaattcaggcccctcccatctcaaatttgatcatgaacatgtctagaacttcaaaacgatgaaacgaattctcttgcttttcctttccaacacccctctcataactttcccctttatttgagccttttatggttactgcgttttgcatgtcaacactcctaacaccagcagcctaccctgaaatgccaggccaggccaaggagggccttcctggctctcttcctcatcttactcagggcatctttggtcggggaacagtggtgctgggtgacaagctttcaccaatcacaggcttaggggagtgattttcttggagatgggctggcttggggagtgcatgccacagaaccaaatgggctctgaaggatcccatatccacccccagaaccctgggctcattggatctaatattgttcctaaggcagagccccaaagtcacagcaggactctcattggtgccccattagttgctgagattgagggatggtgggctggagctctgaggctgaggagcaacagaaagggatgatgagggacagggctgtaatccctaacaccctggcagcttggttccagagctggacctagccccaccagcactgccctgagcccacctaaccccttgaagtcagaccgtttctctgggctgctcctatcacaaaatccgaatttgcttggaacaagcgccctcttaatttgcccctctcagttctctgcagttgacagcttggaaaaggaagcgaaacaaaggtccctgggaaagtgaagttttcaattaatttggtgtgagaaacgggcgggagtgggtggtgactgcaaaatgcgaggccggtcggctgctggagagacacagaagtttcacggtgggaggctgagtggctttctcccccggcgccgttctcagggtctttctgcgggtcgaagaaggacccgcgggagctgagaggcccaggtcggaagcactcccggctggcccaagagtagaggcgaagagcgttgagtaggcatccatggacttttctttctgggacagattgtcaggctcactgcgccgatgcctgtctttcatctgtttaagtctctgccgccagccccaagggcgcttcatgggcattttccgaacggacagcgtgtgtgtataggaagggtctgctccaatgcctcttacctgtgtgaaatgcctttgccgggtaccagtgcacaaggtagggcaaattagctcactcggatttggggtctagaagtcgactaactgagggattcagcaacaggataaaaaaatgggcctgttttcacatcattctgatcatctctgtccttcgtcttcattttgctgtgcaactcggggagccgaggagaggtggcaaaaacagcggttgccgagacaaggcgcaggccttggcgcccgcctcagtcgcagacagggcctgggatgggccgtcgcgcaatcaactcgtgggggtggctgcagcgcgtacgcctgggtcgggggggagggcgggaatgggaggtggaccctgcaaggggcaggagaggggtgggggccggagtgggtgggtccagccaggcctgggccgggagccaggctcccccgcgttcctacccccacgtggccgcgcgcagccaatggcacgcccccggcgggggccctcggggcgggaggcggccccccgaccggcccaggccccctcccaacctgaacttcgtttttataaacgtcccgcgatgagctaacctgttggagggcaggcgggccggaggcgggaggctcacagagggagagagggctagaggaagagggcgggagcgagcgaaccagagagaaaggagaggagggaggaggcgcgccgcgccatggtgtcctgcgcggggccagggccagggccggggccgggccaggccgggccatgagccgcgccgggagctgggacatggacgggctgcgggcagacggcgggggcgccggtggcgccccggcctcttcctcctcctcatcggtggcggcggcggcggcgtcagg

SEQ ID NO: 24952 - DNA, 2300 bp, Homo sapien
cccttcactgttgatcttgaccgtgcggctgcgccccgataggcatggagcgcgctcgccatctcctgggcattgggcggcattggcagagctctctattcgctcctcagccaaatcctgttccattctcttaatcaccagccaagccactctcccgccactactttccaccccgatcctccctcgatcaggttccccagctcgcataagactttgcctgccagacctcgaaagtcataaacccgggggatgaagtgggaagactgtccaaggagcaatggagggaacctagttgttcttgtttttcctgtttttcactgagttcttttatgcctttagtcctgaggcgcaaacagctgttgtagggctgcctaaaggtccgaaagagacacccctcggcttggaaataacgaggaatcgtcgtgcactgaaacgtgaggagagactgcagggacccctggagctggagctttcgggagtaacgaagctgcagctcctcgaaaataggatgggttccccaaaataagagctcttagggatctgaggcttgtattcccttgagtatctaggaactgggattgcagtttgtgcttgcccccacctcccaagagaggacgagagcgagtgagtctctatgcctgggctcctaaggaaactctctggcagagccagaggagccccagacatccccacccccccgtcctcactccctctctcccccccaccagagcaggaggaagaggccgattgcgttccccagagccacccaattggtcgccataactcacacaataaagtggcagcgcggcggtcagtcttgccctccggcggcgcctgtgtggtctcagtgcaggagcccgcgatctaaccaattccagcttggctcggagaccgagggtcctgctgcaggctgagactggcgccggtcaccgggtctcccagggtcttgggatcagaggcaggaggggaggacccctagtcctctggccggactaggcaagagggccagcgacggggtctgagcacaccgctcccggctaagaactgctgcctttcccacttccctgtttgtcagacccgtgaactccctatccccggcacccctgggggcgctgaggcaaggaactctgctagccagctgcctccgaacgcccgctgttccccggccaggtggttctggctcttctgcctttccacacccagtcgggggagttcgtcctgctttgccctccacttggtggatggggacacctcggagttctggtttgcagtgtgtagtcctggagaggactcctgaagataaaaggaatgtagcctttggccacgattggtggatcgagctgatgggttccctggcggacattctccatggacctgtatggcaatttccctatgatcagagttcttagccatggggacacaaaccagaaatagtgtggcctccttcctggatcccaaaattgggtagtttgtgatgccctttttgtgtctgcggcctgggactgagggctcaagtagcgaatgggtctttgctgccagatcctcaggcagaggtctctggagaaaccctctctgtgggagtgattggggtaaaagtgacattgctcaggccaagggacagagctcctggtgccgccggaccgcgccctctccggataagtcgagaggcgccggttaatggaaaatgcctccgctgcaacttaaagccggtagaagcaagccgggcccagaaagcctgcggaaaacgaatcgcaaagccaatcacgaccaagaagagtcccaggggacacttgggcagagtcaccctcttgcccgatgtccccagctgctgaagccgggcctggaaacccgcagacagttagtcttcgctcaacctgatttggctctgctggcagcctcgtccttcgccatcgaacattgcgggtgttatcataatactctgaagggggggaaaacgggtcggggggatgtaggcggtgctgaaatgaccggctttgaagaacctgcaggcaaagtttcgtccaatcgtctgagcctgtcctcttattcccggttgtaactaaatactgttgcgagcgcagccgaagccctttgttggagatgtgtgagcgcagtctctacagagcgggctatgtgggctcgcttctgaatctgcagtcgccagactctttctacttctccaacctgaggccgaatggcggccagttggccgcgcttccccctatctcctacccgcgcggcgcgctgccctgggccgccacgcccgcctcctgcgcccccgcgcagcctgcgggcgccac

SEQ ID NO: 24953 - DNA, 2300 bp, Homo sapien
tctgggcgggggtgccagctgcggggagggagcacacaagatgggcagttctagttgggggaggctcgatgccctccagtcgccacagacctatttgcgcagtgttgggggagggaagaagacatgggaaggggcggaggaaggagagaggaagggagaaagggagggaggagaaaaagaggaagggggggtacatcagccagaaaatagatattagctcagaccacccgccttttctctgtctgtccgcacggtgggcagagcgcacagcaccggcactgcagcagcccgggccagggagggaaccagcatcacagccagcgccgcctgccctgggtataggactgaggcccaggccccagcgctgggattgcctgggcggaggaatcttggggaaaggggcagcctcctgccctcggttctgggatttgggtttgggaagagacggtttacctttgaaaagcgtctgctcactcggaggtgggatcccaggccttgcctggacccatgggctaggagagggtcgcggcaggctgggaggagagtgaggccttgggggagtggatggggtgccccacgaagagtctgcctcagagccaggtgacacagaggggctccaggagggagtcaggctccgctgagagcccttagagagacaacctatcttgggggaggggctgaagtgaccatgcagacccaagggtaccagaagagcctcggggaaacgcggcgtggattcgcaggccttggcggggctccgaagcagtgaagggtctaggtataaggcggacacccaggctaggcctgaaagcagaggggtgaggaggacgaaggtgcgagtgtgtgggggttgtctcttgtggggagccagcgggaagccaagcaccctaagagtaggactccagatccttttgttcaccagactccccagattctagggaggctggggaccacgggctgagccccctcctggcttcagtgctgaaggagaaggcagagaggcaacggggagagagacagagacagtgacacacagcttagaggaaaggaggggagaggatgagaggacagagagagagaggagaagggagacaggaaagcaagaggaaggaagaaggaaagcggaaaagaagaggaaggagagaagtgaagacaggagagagaagggagaagactgaagagaaacgaggcaaggagaaagagagacaagaacagagagggaaaccagagagaagggaagagagccgggtgggcacgaaggccccggcctgggtgagtgcctaggtggtgaatggcctgggtttttccgaggccagcactcgcacccttggggtcagaaccggaaagagccaagtcactccactctgaacgcgctgggcagaaaaatatgtaaatcagggctccctgcgccctggagagtggcgaaattactcccgcccggtgaacaagaagcaacaagctcccaggcgggtgagctgcagagggtggcagagtcgcgggggagggagcggctgcagtaaggggggtggggttcggaacctcacaccctcacacctagttcctagcttctagggagcctggagccggggcttccccccctctgctcgctgcttctctcccttcccccttcctccccctcttccccctccttcctcctccccgccggcctcggtccgcgtacttaaagcggcgcgggagggcggacgcgggcgggcggcccgttcgggcggtggcagatgcgcccagcggtgacagcggccagcggcgcgcaggtgaccggcctgaggcgcagcctggtcagggagcgcccggggagagctggcggcagagggcagccgatccgcccccagcgcgcgcgtctcggcgccaggagccgtcccggggcgtgttggcgagcgttgatatagatataaggacatttctcttcatggcgtcacgtgacataattaccaccagaatcaatcaagatgaattgcacgtcagcgcccggtggggatttttgcttagttgatcctggcccaagcctcttgtgcaatcgatggctcaggttggctgcgcggggagcggccagaggctcgctggcgcgcacgccgcggagtcatgaacgactttgacgagtgcggccagagcgcagccagcatgtacctgccgggctgcgcctactatgtggccccgtctgacttcgctagcaagccttcgttcctttcccaaccgtcgtcctgccagatgactttcccctactcttccaacctggctccgcacgtccagcccgtgcgcgaagtggccttccgcgactacgg

SEQ ID NO: 24954 - DNA, 2300 bp, Homo sapien
tttttgggaaaggtttttgtaaaggagcgggcgggctactaggtcccccagaatgctgaggcgctttaatgaacctcaggccccaaagaaatgttctattgaggtggaaacccaatttacccacaagttcagtctctgggcctgaaatccaaggccagcccatgccccagcgagtacggggaaaagagaacacagatgccctcccggactgagaactggttcatggtcagagtttctgggaccgctttagtttcttggctggcaggaagggaacctggcaggccgaaggacggctccaagccctggccggcccctcactcagggcaagtctttggaaatcaaggttaaagctccccgctgctgccccgaggcccgggcttccgcagggcggctcacccgcctgcagcaagagagggagggaggaagttgttgaagtttctcataaaactctgagtttccatggtggtagtggtggtagtggtggtagtggtggtagtggtggttctttaatgagccggaccacaaccccagaccatatcctcttcatagaagtttccctcaccaaaggaaacagagaactaagattcccacctccttcccctcccttacccaagcaaagccttgtcaaataatttcagaaattgtccaaaactgtaaaactcaacttctgacaaaagtatagcttttaatatttgacaatttgtattaaaacaaaaatgaccttcttggttagcagcgaagggaaaaaaatcaatagtataattttcaataattcataaagcgaacgccattatggtaaatttaactattaatcttatcctttacaaagtctcgattgatttgttaataaagtatcttcccgtgtgtggcaacagcgggcataactctttaaaaaccttcagaagcaagaaaattaccaagtagcccaagaatgtagatgagaattttattgatcgccctgattcttcttaatatgtattaataaattccacaaccttttgtaccttgcacttgtcagaaaccagtgcttttacaaaatccataaaaggaaaacatttttctttgcagaagaaccaaaatgacacctttgcatttctctctgtccttcttggcccagtcagttttctaaaacttctggattctgagggtcagagtttccccttttcttaaattattttttcctttcttccttcctgtttgccctccattatcagggtgtggggagagaaacctctgtttagttctcctacagggagcccgagggacgctttcgcggatagtgaactgctggcaaagaattgtctctgggctgaaagctcccagaggtccggccccgcagaggtcagggtgtggttcctctgagagccgaagcctcgtgtagccctccggggcgcataggaacccggagccaggcaggaggaccgagcgggaggacaacgcagggaccaacccatccatggggatccgggcccggccagctgcttggcctcccggccctcgcggccctttttgcctccgccctcctagagacaccttggccgcttcttagccccaagggatctttcctttggacccctggggtgggatgtctcagggcccgcggaatccgactcaccttcccgctgggctgcccgggactaaattaaccagcctgcgcccccacccgcttgtcctggacccggccctcttaagcgcgttctgcctggttgtgtgtggggggaatgcttctgtgcgctggcgccagggcactctggcttccctccccgtccgtgcgtgtccacttggaggcccctagagctgagactttccttccgccggttgggcccaggggccgaagcgggggacgcgagtggggcgggctggccgagcgagccctggagaggcggacaggagggcggcggagagcgctgggccggttgtctccagcgcgcactatcgcgggcgcgtagtagatgtcgctgttgtccgtgcttacccggccggccggccaggctctggagcacgtgacccgagaggaggctgcggctcaaggccattttcaaatctcattggcttggttgtcatgtggtcggcagaggcatccacaattacacggggaatgttttcctagagatgtcagcctacaaaggacacaatctctcttcttcaaattcttccccaaaatgtcctttcccaacagctctcctgctgctaatacttttttagtagattccttgatcagtgcctgcaggagtgacagtttttattccagcagcgccagcatgtacatgccaccacctagcgcagacatggggacctat

SEQ ID NO: 24955 - DNA, 2300 bp, Homo sapien
ctgaacctggtaagtaagcctataccccaagccactttctcctcaaagcttcccatttgtgtgttttctcctctttggttttggttgtgttgtttttaatgctttcagtggcatcttggtgatttctggctggcgagcaatcatcaggggctaggttgaagctagtcttgcccacctggaagttgccggcctccattacaggagcaaggacaaacagcagtgtagcactgcagcggatccaattctgccccctttccctcagccctacccccatcccaagcgcaagacagccagaccccagagaagccgaggatgggtgagttttcccatcccacttcgccttgatctccttgtggacgggttttatgctcagtcattaccttttagtggcccacatgaaattttgttaaaggaagaaatgaaaagattttccccagtcagtctttcctctatttaattacaaaatgctggtgggaactgctgcatctgggatgcaagaaaatgcagaaagggtgactgaaaattttgcaaatgaacatgacttcccatgaagtctaatgttccattcgctgccatggtccaggggactcccaccagcttccaccggcttcaacaggatctccactagagagcccagacttatctagtcctgtcggggaaaagggagaagaggccttgcaggagaaagctaacagaaaattcgttacctgaggtcctgcctgcagtttcaaatagcttccagcagttttacaaaacacatcctttccatttcttccttttaaatgtttccctaagaacgatccatttaggtgctataagtcctcagccagggagtctctgggacactggcattcaaaattttaaacttccgccccaaaaccaggaacattccaagacagaactcttttagggggccatttcctgggggtgggggagagggcttggaatcaatgctagattgaaaacgttgtaatagctttgccccagacttaacaccggttgggcaggaggagggtaatttttatttagccgtttctccgatcatgtggggaataccattagctgttgatagcgggccatgtatccgaggaaagcctgagctacaaggcaaaggcatcccatctggaacaaaatcagaaagctattggcaaaggtaatcaatcaggccataaatagccatttacccgcttccttttcggggctggaggtgggccgggagccctccaagggtgagctgggcaacttgtagagcaaggaatatgccctccgctgccggcgccccggccgcttttgtctgggctcccagccgggcttccgaggctttgtaccatggatttgggagtgacaatgggcatttccctcagattcaaggctgctcaacctcacctctgtagggggaaaaaaatcagaagggagtgtcccaaggacctagccattcggccgaattttttagacattttgggagtctcctccgaggcctttaagtgcgaaccgcgcgaagcggccctgcccggggagactcgctgaggcagggctgaggcggcgggcgggagcaagctgctctagcatttgggttctgccctgtggcgtgttctcttccagggcctttccagcatcatcggagaagacgaagcaccctggccgccactgtccgtgctgcgccaactcgcccggccgcccgcccttccgagggcaggcagaagcccctctgtgtcctccaccgccgcgccccggctcgcccctcgggccgcggcgtgtgcccagcctcacgtcggggtgtgtgtggccgcgcgggcgtgtgtgagtgtggcagggggagggggccctccgatctgctccatccgtccgttttattagggacacattaatctataatcaaatacacctcataaaatttttattgaaaggcataatatcattacagaggtcttccacctgttttaaacaacacgacaagctgtgagcaagcgtgtgtgtggggatgtgtggggaggggtgggtgtgagtagggagagaggcgaggggagaacagctcccctcgggcgctaggggccgccccgagggcccgcctgcctcgggcgacaccggcctggcgcccccgcggccgctccgtgtgccctggactcgccgcccgcggctcggaagctggagagtcagcgacggggcccgactgcgggaccgagggctgcaagaagaagcgaacaaatagtccccagcgcctcctctggatgcggtcgcgtctgtggtcctggcagccgctgggcgggccaggccaggtcgggccgggccgagccgggcac

SEQ ID NO: 24956 - DNA, 2300 bp, Homo sapien
ctaaatttggcctgaatgtctataaatgaattttctagtgttcatttttcttttattcccccgaggaatcacacagttctacaagatgcctggtattgttgagatccaggctctttcattttccccccccccattccattccaaaatccactcatttatccagggttcaaacacacacacacacacacacacacacacacacacacgccaaactgaaaaaaaggggcacaattacaaaggtagctccaaggctttattgacaataataatcttttaattgggcatttgcaagattgaaggacaaatccttaattgtcagaatcaattcgttcgccttcggatttaaagaaagtcattatacttggcaataaccagcagaaaaaaaaccccacaaaaacaaacagcaacaacaacaaaaaaacccttgctctccaccaccccaagtctgcactccttactaatttaaaaattaaataaagcatgcctctgtcatctccagattcattaacgattcctttacctttcagtcattcccagtagaaataattgagtcggacattatcaccttgctatgtctgtccatctcgatctcattttctccatttgtaaaaatgatatttcagtccacccggacacaagtcaggatcgcgctcgcaggctgggccaacccacaaggagctaggggtagctgaaatcgctcgccagcctgcagcatctctgaggccgtctggggttttcggaaatttgcatttggtgtggaaagccggcgtggtgcgtttagcttgagcaggggcgccttggaggtctatttccaaggctgtgggcctggcgccctcacgacattgtacctatcccgaaggaaacggggctcagtcacccaaagagcccacgagaaaggccgagcaggagaggggaaaacacacacacacaacagagaaccattgcatttattggacattgaaacgggagcagagagggaaaggaagtgtgtggggaggcggttggtagggtaaagccagacagctttggagagagctgctaaaatcgggaatattttgtcgattcacactcgactgggccacatgactcgggcaacttttcttcatctctgctcacaaactaggctgagccttctctttctctgctttgggaaaaattcgtaactttgaggcctgcgcgctctctcggcagtaatttcacaggcttggcggaggaagtaggatcgttagcataagatgggccgcctgcagctgcctggaaccggcgcgatctgaacgccggctgggaggctcctggggggaacttgcggtcgtctgccctccgcactcctccgggaaccgcagccggccctggttcgctgcgcgccggggctgagacccgggagccgcgtcctgcccgaggaaatgtcaccctccccagcgcgagccctttttcccgcctcagaacgtttctgtccgctcttctatttactctctcagcaagcctaatgccccctcctgcattcttcagcctccccctgcgcccagggctgacgtctatcaagggtgaaatgatggaaactatattcatgggcatgatttccattaaatatcaattaacctgagagcctcggccaggcttgcggtgcgtcaagggtaaatgtacatctcatttccacagggcccgctcggctggaaaagaaaggctttgatttgctttgataacgccaggatctggggccacactcgcggcttttaattaaaccacttcgatatgccccaactcaaatgcacggtccggtccgtcaacacctcttgtccacgttccctgggctgcacccgcgtgtccagagctgcaaaagccacgggcaacctctgcttttgcagccaggggctcggggaggcagtcatttgctccgcagcctcctgggagtggcctccttggctcccccaagtctaaggctccgccgcggcccctccctgccggctgcgatccgcattcccgcggccccggggcacacggagcccttggcagtgcgtctttatgggccccctttaaggccggcggaggcatctcgggccgggcgcggcgctccgtccgtcggccgtagcgactgaactgcgcgcggatccctccgcggggctcctcgtccccgtcacgctgactttccgtgcagtgctgtggtgcgaaaatgcctcgccggtgcgcaccgggtcggcagcctcggcggcgggggcgagattggcgggaggggggcgcggggggggcgcggtaagaggtggcggcgggcagagggtgttttttttcttttccctccagag

SEQ ID NO: 24957 - DNA, 2300 bp, Homo sapien
ttataaaaatatagctacaaggtcagtatcaaattacccttccataggacagctcaaggacagcttctatgtgatactagaaacttttttaaacacccaaatccctctcaaagcacagaaaacctcaagagcagtgacatgaaggtagcttgaaacacaggtaaggtcctttccaacaaagaaaataggtggtgtccacagcatatggtgattattagttttaatagtctgtggtaaattttaaaggtagaagttaatttgtcaggccttcggctctgtcttcctccagctcttgggcttcctttttcgtttccccgtccttcacctcctgccgggaaacgggaaatttgtccttgttgttttcctttttccatttcattctcctgttctggaaccagatttttacctgtctctcggtgagggctagggcgtgggaaacctcgattcttcttttcctggtcagataggggttaaaaagaaattccttttccaactctagagtttggaagcgactgtaggtttgtcttcctcttcgtctaccaggagctgctgattaaaacaaaaaaaaagggggggggaataaaagttttaaaaatgttatggtacctctgcatgttgctggaggtttgtggaacgggggtctacggggtgaaatatacacagagctctttagctccgatatatatatatagggtgtgcaggcaagaggagcagagaggtcttcacaattattctgtccccatcatctttacatggttcctacttttttaaaaaaagtctgtattactttatgaataagagccactgtggctacacaagaaggaaaaggagggggagagggaacgggagttttaaagccagaacgtgagatgaaagcagatttctccccctctcccttcttaaaaaaaaaatgcatcccaaccttgtggtctcatccacggaaacatttgagaaggagacgagctctgatttaagtggtctgggtcctcgccaatattaccactggacgatttacagtcaggatattgtaccagctcggcctcttgctgggtcgtaaaaatcggctgtctctgtaagttatcgtatccgtaaaacttcgcgggctccccgtgacaggcaatcccgccgcaggggggaggtggcggcggaggcggaggatgcggaggaggagggggggcggcctggtaggcagcggccgggctgcccccgccggggtggaagtactcctggccccggccttccctaccgccgcacccagtcccggagggcggcggggacgggtgcgggtgcgcgtgcgcctgcgggggcgcgtgcgggaagccggcggcgctgttgccatagagctgcagggctgctgcggcggcggcgtgacggccgccgacctcgggcgcgaagtgacagtcgtagtaagtgggattgatggcctcgcccgccgccgccgccgccgcagccgccgccttgtacttggagtacagcgggttcacgaagtacgaactcattggggcgtcagcggcggcggccccgggcgggcgggcggcgctaagcagccagagagcgagcctcgactcggccgcactgccgcgggggcctgtggggcggctgctctcgccgccgggaccgccgggctacgtcgctgctgccgcccgcccgcgctcgcgcgtcgcttctgaggccaggcagccgcgggcgctcagctactgggcgctcatgcccggctcttgcgcccgccgcctcggcttcgcgccgcctccctcgcgggtcgcggggcctcgcccagcccccgcgcgccgccgccctcccggcctttcccggcgcgccccggctcggccgcaatataatcgccgacgccccaggcgacctgccccgctgcctccactgtttcctctcaggcaccagtgactgagcgcacccggacaagaaaaaagtgcgctcggcccacggggacactctggcctcggtttacaaaccccggctctggagggaaaagaaaaaaaacaccctctgcccgccgccacctcttaccgcgccccccccgcgcccccctcccgccaatctcgcccccgccgccgaggctgccgacccggtgcgcaccggcgaggcattttcgcaccacagcactgcacggaaagtcagcgtgacggggacgaggagccccgcggagggatccgcgcgcagttcagtcgctacggccgacggacggagcgccgcgcccggcccgagatgcctccgccggccttaaagggggcccataaagacgcactgccaagggctccgtgtgccccggggccgcgggaatgcgg

SEQ ID NO: 24958 - DNA, 2300 bp, Homo sapien
gtcagttcaaggatgccattttgtgaggttccacaaagcccaatatatcgcttacctctgcacaaggggagaaaaatgcaaatatggctgcttttcagtgcaaagtgtctttgcggccctcattccccaagttgaaagggagggtcataaagctctgcttttatttgggtaagatggggagaggataatgaggcaaattgactattgagattatttctcagaaaattttggaattaaacaagttatttgctcaattccacatgtatataccagtatactagtgtgaagtcttctgggcttctgagggcccaaaaacttgccccatctgcttgtgtaatttaaaatattgttttattctgtaacacagaaggaagtgctatttcacatccaagcttcttgtgtcctctgcttcccccgtgtttgctgaatccttgggcatctagggatggacatgggaggagagagaacattttaatgggccctggctgctgctgcggttccctccagcaaagttagggcccattggcttttttctagaaagaatatgacttttgctgacagatggcagcaaaagtcctttaatcaaaaacatccaaggtcatcagaactttttcaagggataacaaatggcctgctccagagggtgctgtgctgcttcctgcttcagtccacatccacttaggcacttactgggtgtgcagatgttaatagcagagaacttatacacaggtatctgatgcaaacatttgtaacatagtactggaagtgtaaagacactgtctttaaaaggatggggggtggtgttacctctttcaggaaggttctgaaggctgcatggctatgcccatgaggggaatgctggaggccagccaaggacatttactttcagggggagttcaccagagcagttcctgtgaaaaatataaagggaatgtgacaccggcctttgaggaaaaggaattattcttttttctaggctgatctgaggaagtcactcttttcctgaacaaatgtcttttcagtattgcgttgaacaaatttttcaattgggaaatatttgggggcaaggggagaggggagaactagaattaaactccataaaaatgagaattgctcttagaggaggacgtagagcaaggagtttcagaagggatccagaaaccataaccctgtctgtccagaaagatgtttctgtggagaaagaccaggtggtagagtttcaaacgggtatttcggagaggttgacaagtacctaaaaccatttgaagcctttaagctggttggtgattatcctactgcagaacctcccgggaatgggagggaccccaatttatgttggagtggtgtgttgggggcacattttcttggcctgcagatccctcgttttcttcccaaggtaactggggctggcttgcaagatgagagggaggaggggaaaccgaaagtggttggctgcctctggggacaggccttttcctgaggggagaggaggagaagccaagtgactagcacagggtgagagatgggaggaggtagctgtggggatcgcttccccagagcgtgagcagtacattgagttcatttccctccttcacgatggccaactgcgcagaggttttgagccaaaccaaagaaaagaacacacacacacacacacacacacacacacacacacacgcacacacacaaataaatcctagaaaaagaaacagaggaggcggggagggagggaagaaccacgaagggaagaaaaagggaaaggtgaagagggacagagaaagagaagggaggaaggagagagagaatggagagagagaggaggaggagaaggaagagaggaggcgggggagagagaaagcagaagaggaaaaaacatggcgcttgcgagctgtatgtgcaaaatccgcaaggaattgcagtaaattcctttttgtttgaagaaaatttacaacttggtaatagacctttttatgacctatttgcggtcgtcattggctgcggctggtcatgtgcaggcgccgctcgccttcacggcctttttcctgatttccccggcgaatttccccccgcattctgctttcccagagcctcaccccctctttttctaacctttgtctctgcagaggtgggctccagtcaccggctgcgggattgcggagtccgccgcggcctcggctcccgcccggcgcccggcctggccccaccgccgctcactcggtccgcatcgccgccacctccggagctggtggggagcccggcgagggagggcctggaaggggccctgggcgccgagtcccccg

SEQ ID NO: 24959 - DNA, 2300 bp, Homo sapien
ctgattcagaaaacagaactctggcgaaatttatttgtagaaacatctgacgggaaaatacgctttgttttcagctctcgtgcttggccacatttataatttcgagcttcgtctttctcctggtcctcgccagagatctcaagcccagttcatggcctgacccgtcgtcaccaaggcccggacatgctatcggctccctgatctatgagagaacagaggtttgggccaaggacactgggagttatacttctgggcttctcagctctcagggtcccagcgttttaaaatttcgtttcattttttggttaggttaacagaaacaatggggttatttccggtagtggcaacagcacgaactagttttcttgtggactaatggcccgagagttcctgtgatttgtggattatttcccttagatgcaatcgaccatttcgttccaataagaattaatgctaccacggggcttacaaagaacccctcaagtcttccaaatctgcccatgacatcaacctctgctgcgtaatcggacctgcacccaacccaggtttttagtcactcaagcgcgctgtgctacagaaccagggaaaagcactgaagctctgaacatagagcttggccatcagggccacacccccacacccacccgggtaccatccgacctagggactcttcctgctccgaatctacctggcagggcctagaagccactatccaggtgcctgcttttcaatggggaatgttttttaccccgatcaaagaatgacctcaaaggtcattgtactgtagtagagaaataattacaaaatacaaacactccaaataaaataacaatcactcaagtttcttatttgtaagtgatcagagttagtgatccaggataatttgcaggcatcagctggccacaaatcgtggacctccattttgaaatgagcatgattccatcattaattacgaaaaacacctttccacaaagatgacatgttttgttcagaaactcttttatggcccacgttgttacattggaattttaagggaataataagttaggatttaccactgggtgctttgggaaccatacccttgccttgcgcaggcagtctcatgcgcaatgcggcagactgtccaaaggtttcatttcacaatgttcatgagggaataggcaataggatttgcgaactgcatccgcaagtgccattcaaaatcagtgggagaaaatagctttttttcttctgcaaaggattttcttttatgcatattgtttcagttcagcagttttgaagttgagggaagaatgttgcaatgtaatatttattagcaggtgggaaaaaaaacacaacccatcaatacatttagagagcaaaaagatctactcttttcctactctggcaaataagaaacacacgatgtttcaacacagagatgtcttgtatttctcaaagatctattgggtttttaccaagacctgcaccatatattctgataccattacctcccaaaacatggattcattttgtgatataaaagaatccaaattcacctgacggattatcatatgcgggaagagcctatcttgagttgcttaaaaatttctctaagaactagagaaacatttaaaaatatttaaaattccatctcatacaacacaaggcccaataaaccatcaaccctagaaattaaccagcatcagtcactaaagcctagattcaaacaccaagcacatcctagaaacagagaattcaccccacccccacccaagccccaaccctcaaaaaacacctgttagcctcccaggaacctctggccacggccacaggtaaaccacaaaaaccacagctctatataaaatgcctttagtgacccccagcaaagtggagatgttcagtagtaacccgtctatacactttcctagggtaggattgaggggctctccatctaggcagtgggatcctgtctgtggctacccgtatctcagaatttttgaaataatactgcccccttagacttctgaacccagccggactccaccccaggccccaggggacgccctaggaacgaagtgattgggggaaggggcttagacagcgaccccccacttccccgggaaatgtaggggagcagccggactgagctgcccaagggggtcggcgccccaggcttcttggtggcatgctggggagcggggagggggcgattcttacccgaaggctgccgagctacaggcggcggtcggtccgggcgtctgctgtaatccactaggcgctgcccggctgcgctcactctcggacgcagagacccgctc

SEQ ID NO: 24960 - DNA, 2300 bp, Homo sapien
cccaaaatccctacgaaacaggtaaagtggtggaagcaaaggatggggggatgagcaaagtgccaggcttggagggggagtatccctgccccaccccaccaggcccaggcccaggcttgaaactaaattttgaattatgtgggaggtaggaagggcaatcaagacagttaaaaaaaaatctaacaccttcagcctacagttaggcacccaaaagccccactcgagccagggcatccctgtgcccctgaaatccatcgaggctctgagtgagtctgcgctctccatgccctgaactgagggacaagcactgcacagtgccgaggcgctggggcgggtgaaatttgtgaacttttgtactcttgtgtgctgctgtcggcaaagcaaaaataatgaaagtttgtgatatgtttgtaaatgatttcgaatgacccctcgccctgcccttcaccattagcgcgccggcctcagcccaaggcggctcggtgcctgtgagcagcgcctgcctcggggtctgcagcagcagcggaacggagaggccagcccggatcagggcccatgaaggtaaatgcgcgacttcttggagaagtagctttggcagacaacctggcttggtcgggcagtaggaaaaggagtagacacaggatattcccctctcgcttctttttcttctgccgctgagggcatttgttcctttctggaaaataccacttggtaaggaggagggttatttggatcctggtgggggagggtggttaataaagccgccatccttgggatggattatttttctttctttctttctttttttctttcttaagaagaatattctggttgttcgcctgcttggtaaccctgaccctggcagaagaatgagggaactcattgcttcaaattgtcgccaagcccattaggctacctgaactgtctcagaaagtgcgggtggctgcgtcgaacggtggtggctcagaggaagagattggggccggcagcgacctaggtacctcactctgggtgggacccagaggttgtaacgttgtctatatataccctgtagaaccgaatttgtgtggtatccgtatagtcacagattcgattctaggggaatatatggtcgatgcaaaaacttcacgtttcttcggaatagccagagaccaaagtgcgacatggagactagaagcagccggcgctggtcagccgcctcgttctgttttattaccttggactccaggaggatcagctgcgcctggtgacatagagcagcttttcctctccagaagctcctcacctttaaacagagtatcctctgggtgctgaaaagaaagaaagacagaaagagagaaagagagagagagagagaaagagagaatgcaagcctaattggttgcatggatgcagggccaaagggctaggttttggggtactagggagtgaggtacaaggccagcttgcccagtcccagctctgccctccaggaacatgaggtgcaaaggtacccaaatgggggcttgcttgtatttggggcctgtgggaagaaagcaagcttcaaagaagcccagtggggagctctagggtgcattttgacaaggtggaggtgcccttgccaccatcccagcccacccccagctacatgggcaagggcagcgagggccccctgctattttggcagggcccagctttggctgggaacccccgggcctgggcactggtagaaagcatggcggttactcattgcctaatttgattcaagctggccagattctggtaacttttgggtgaccctgatgaagacaaagccaggacggcggcctttgtatggcagaatccctgctcccgccggctgcaggcagggcgggcaggcaggaaccctcctcgcctggggcactctgcccaactcagaggcgagttcacccacccacctttcattgctctgtaccccaataggaggattcattctcccttgagctgtgcctacttggtgtcggggggcgggggttgcattcagctgggggtgagtggaagggccacggaaggttggcaaaatcagtggcagacaaaagctgggattacctgaggggaatggggtgctggggactggaactacattaatatctggcaggggctctcaaatgtgccatagcaagctacttgattacacgtatgttatttagttaaatttgtgaaaattatgagatgctcaccaacccggtgataaacttgctccctcgccattggctggcctggtcacatggctgcccaactttattcagttgacagcaagtaggagggccctatggaaggag

SEQ ID NO: 24961 - DNA, 2300 bp, Homo sapien
cagtgagtggttccatgctcgtggtaatgccactgggccagacccaaccggacctttatggggaaagaacctcaaaagcaaggagcattcccttagcttaggttgggacaggccctagcaggagaggaaccgacttccaggggcttcgccatcataagagagcagtaaagttgttttgtcaatctcctgcgcttggcttcatcagaactgaaagtcgctggacatttttctttgctagctgccttgaagctgcgcgcctgccagcttagtcagctgaatccaattaccgcgagtagcatttcatttggccccatggagcattcacttataacttcccccgaaaatttcaataatccctaccaaggctccacgctggccctatcctaaagagttttcctagggtgctgctgagggatgaggtgtagggttggggctgcctggactcagctcttccttgacagctcacggacgcagctccttcctgctcttcccgtttttggctccagaaagagcaccagtgctggtggtccaaagccagcccggttaaggctgagaatctgggcaaacaaggagccaaagttggacccgcgtgggatggtgggtgggcagggtagggagcgtgggagaaggtgctgaaggcttttctggtggtccaactttggttaacttggggtcctctttcctttcttcttcccaagcctcttacgccaagagctcaaagcgcaccgcgcaccccggaacccccaggcgcaaacttaccctgttcctccgcggctggaaaaagaaaaatctagctagaggcataagggggtggcggccccgggtgacctcccaacttagctcttcttttgaggggatgctcctacttctaaagaactcttttttaaaaataaataaataaaaaataatcaagcggcgaaagttgacgtccgcccacgtgaatgtattatataaagcagctacaggaccagctggcttgagagccctggtacctcgggcctccaccgcaccaccctcaggtcccggcccagccaagagcgcttgggggaggggggcgggcaagtggcttttccccctgggtccaggccggctgggaagctgaagccgcagcgcgaagttaggagccctaccgggctgggatctcttcgaggcgcttctgttgggtgttcattaaggggtgagttattgcggtgcgagccaaaggtcacttcaaaggcttatggctgcgcgctttagtctttagaagcgccgggaacgctttgtgtgaggctttcccgggtgtagtttagtgctcgcaaactactgagtcgacaaattgcacagggcagatgcaagagggggactctgtctctctcctttcacctgacggggggtggtcacccgctgagcggtgacagtggtgggggagcttggtctgtggctttgggtgggggtggaaaggatgtttgtttcttaggcgatttgcagtctgatcctgacccagaagtgggcagcccagggccaagagtgtggtggatacttaccggaatgaataaactcagggaaagcatctgatatatttaatgtataaatcaggaactagcgcccaggtcctcttcactgaggctctgtagagcagcccctgaccaagatccacccaagcctatttaccttcctttcctggtgcccttttctgcagcctcccctgccaaacccccaccttaattctgcacggtctctctcttctgcccctaggagagtgtttggcttccgggattgggacctggaggagcatttagaatttggtaggggcaggaggagagcagattggcttccctgcacctctgacccacctggctagagggtctggcgcttccctcacgtccgggctctcccctcccccatccagccatggattttggcgttaaaggggccctcgctccccaggagccaactgagtctgtgttttgccggggagaaggcgtctggatggtcacgggtaccatatacaatagtcacattgactatgacgtccttcaagtgggaaaagcccttcaacatgtaagtgtttgtaagcaagaaccggctgctactgagagttttccattttgttccagattcgcctccacagatatcaaaagaaacctgaagagcctacaaaaaaaaaagagataaagacaaaattcaagaaaacacacacatacataattgtggtgagtgggcatcatttaaataataatttccagtacatttccctctgcaactcaaggtggccatctcaaaattcatacatcaagacatagaacaaagggcagctttga

SEQ ID NO: 24962 - DNA, 2300 bp, Homo sapien
tgtctagatgatgtggtacatcatgatgaccaggatggaagccagggagagtttctaggaaggaaagttgcctgaaagacagatcaagaattgagaccagggagctgacctatgagttttctttatcaaacagacaaagtgattgaatggtattagttatactttaactctttaggagcctttcagaagaagtagggaggcagggagagaagggaaacccccataaagaagggaatacaaaaggggtaggatttttcttagcttttttttcttcttctaattctgggtccattcatcatgtcatgaaaggttctctcattggttgtggtttgggtgggaggtagggtagaatagattatccagagcagatgtcaataatatctatttatacaatagatccaaggcaaaaataataaagttataaagcattctccactcacccatgttccatgcatttcaaattctagatctctttgcccatttccagtggtatctgtttaaaagtaggggaggtcaaaagtaaaaggtctagaaaaatgtaaatgaaagagaagaaacattttctagcctcaaaatgagtctggaagtctgcaagtcctcctgttggtgtttatcccctagttttctacattgtagattttacactgctgattcatagagcttactcagctgattttcaccctgtcatcgttaagtggactatctggactttcatgcaagatgctgtgattttgaaaccaggtggggggagaccctttttttttttttttttttttttttttttaagttctggctgttctgagcatgttataggactttcatttcccatcaaaaccttgtgctgacccaatgattgactgattgatccacttattaattcacctattcaacaagcatttattgcactaactacatgcagggcactgtgctggatgttaggaacagtagacaaatgacacagcccctgcctgcaaggagcttacagtttagtgggcgaatcagccaacaaaatgtctgaggctataagtacttttccacacagaagaaaggctaaatggacaatcttgaagaaagtaaattgtatctggaggtagagggaagccctttccctcagctacagttgagctaaaaagaaggaaactcttcttacatttaggaaaaattccttctgatacttccagaggttcaaataagttgaacttcataaaatctgccaggcgcagtggctcatgcctgtaattccagcactttgggaggccaagacgggaggatcacaagagcccaggaactcaagaccagcctgggcaacattgtaagaccctgtctctacaaaaaaaaaaaaaaaaaaactaagagctggcgcagtggctcacacctgtaatcccagcacttagggaggcccaggcgggttgatcacctgaggtcaggagttcaagaccaacctgaccaacatggtgaaaccctgtctctactaaaaatataaaaaattagccaggtgtggtggcaggtgcctgtaatcccagctactcaggaggctgaggcaggagaattgcttgaacccagaggcgtaggttgcagtaagctgagatcatgacactgcactccagccttggcaacaggagcaaaattccatctaaaacaaaacaaaacaaaacactaagacatgtagccaggcatggtgggcacctgtagctactgcagagtagctgggactctgaaatactctgaaatagctattaatactgcagaatagctgggactttgaaatactctgaaatagctattaatactgcagaatagctgggactttgaaatactctgaaatagctattaataccaggctaaagtgggaggatcgcttgagcccagtaaattgaggctgcagtgagccatgttcatgccactgcactccagcctgggcaacaagcaagacactgtattaataaataaatagataagtaaataaactcagatccagcaccttgcccatctccccgccgtgaagtgggtaggaagcagagagcatgggctagtccttctatattgactggtcttgccaatgacactccctctggggcctcttgcttttcttctgacaggtcacctggagcctgggggccggcccagctctctcaggattcagcagacattggaggtggcagtgaaggatacagtggtagtcaatgttatttgagcagggtcagcaggccctggagcttcctgagtgcacaatgcagaaggctgcttactatgaaaacccaggactgtttggaggctatggctacagcaaaactacggac

SEQ ID NO: 24963 - DNA, 2300 bp, Homo sapien
caattgatcactaagtcctgtgaattctacctctaaatgtcttttctcttcactcttgttacattagttcctctctctgctgtgttgttgcggttgcctcctattttgttcttcttgcctcgtgtctctcctttctccaatcagacacagcatccctgagttagcttcaaaatacataacttcacatcccagcttaaaacctgcagtggctccccagtctctagagagtaggtccagactccttcacgtgaaccctgtgcaacctctcttttcagccaggataaccacactccaaagtactctccttgttccaagcccagactttgctttttcctccctctttgcttttgcatgagttgtcctctctacctggtatggcttcccttcttggcctgaaaaacgcttatgtttcaggaacccgaattcacctcctctgaaactattttttttgacattatagtactactagtggctccttttttattagaggaacattttgaccacacctctgttatagcacctgtcatattgttttaagattatttctcttccccactagattgaagagcatacaccatcagtgacttgtctttgtatcccagagcccagcacagtgtgtataggagctgttcactagaaattggtgaaaggcaaggaggaggaacagactgaaccaaggacagcaggaccagtagtttcattgctcagtgagttcaggacactgtgtgaggcttaatgcttcagcttatatctatctgaagcaagatggtagaacatttttccaaagcaagttaattttccacccaagaggatgaagggagagaaggctgaaggaagagggggcaaagctgaggctttctttccttcagggactattttctgtggcctgaggcaacacatttactaacttcagaaacatctcagctgaagtcccgcagcaaaaaagggtaaaaggggaactaggctggaaccttgttaggatttacaaagagaacagcatgaccactccagaagggttataaaaatgcttcaccactaactccaccaaaccctcctgctgtaaacagctctaatgctagtgactaccctcagacacttactgtctatccctttagggtgttcttaaaatacaccggaaagaacggaggtaaaaatactggagtgtttcctccacactggaaagaggtgagtcatatcattgtgattggtgttttaagtatatttttattgttattttaaatggcattcaagtttagcttcaagttcaacagcagtcttagcctacttcctcccacacaaatactcctgccagtaaataggcactcttaaataaaacagtgcctgcaagaaccttctgacccattgaaattagtcttgccctgtcttcagaggtgtattcgtccctctctgggtgtagagcggtatttaagggtgacactcgggcacgcaggaggtgtggcagggggcggggaatgcaaggtcactgtggctcaggggcgggtgtgggtgcaggcgcgttgggaggaccctgggcgccctgggaagtccgagggcaggcggcagggctggcgggcagcagtgctggcttccgacgtgaggtggtgacggcgggccctgcgcccaggccctgtgctgccgaccgctgtcctggctgcgcagctccccagcaggcgccgggctcaggtcgcgccttcagttagcgctcagcctgcgctactgcgtctcctccgcttgcgatttctggtcggatcccagctggcccagacttgctctgaagtaggaggaaccgctgtcgagcgaaaagtgcacaccgggtgattgatgaactcttaatagaactaacctctcctgcccccaaccctagacacacacagagaaaacctccaccccagccccttctccagtcctcctcgcgggcgagaggggacgcggccgccagccggtagggtgattaactcaccgtctgtctttgcaaaagtgttccaggtggatcaggagcgccagcccaccccgcccgcagcctggccgctcgctgaggcgcggagagcgcggaacgagcgcgcgcatcacgtggcggcgcggacgtttgtgccgcgcgcccgccagaccgcccaggaggcggcggctattgttccccgcaggggcccggggcgccctgaaacggggtccacgtcagcccgctcccgagcgtgtcctcaggtctaaggacgggtggggcttcctttgtgtgttctctggaaggggctgggatggcgtcgttgctgccccaaggggtaaccgagggggattgagggaagatg

SEQ ID NO: 24964 - DNA, 2300 bp, Homo sapien
acgtgtctacattttaaggctgagctagctctgaagagctctaacatttcctaactggggtgttagggaagaacttttatttttctcttcttaaaaattatttagggccgggcgcggtggctcacgcctgtaatcccagcactttgggaggccgaggcgggcggatcacgaggtcaggagatcgaaaccatcctggctaacacggtgaaaccccgtctctactaaaaatacaaaaaattagccgggcatagtggtgggcgcctgtagtaccagctactcgggaggccgaggcagaagaatggcgtgaatcggggaggctgagcttgcagtgagccgagatcgcgccactgcacttaaaaaaaaaaattaaataaataaataaataaaaattatttaggaccttatctgactggctatagcacaactgaaatagcaaaatcaagattgaagggctattttcagcacaggtattccatttccaatcaaactcaagaactccagcagtgcaggaaccacagacctctttaactttgtgctgattcctaggcatccaccctctactggctcccctcaacctggggacatccctcccccatcctgcagcaacttcgggtccatcagtagtccacattttggtagggctttgtttattcacaagtccacaaccctggaaggaactggctccctgggctgtgatggcgcctattctaaagacttcctcagagtggaaatttaggcaacaacagctcaatcgctcttttatgacaagtcaatcagtaaaacaatgataaaacctcggttaccataacttagaggctgtaatagattaacttttcaagggcacttgatataagctctgagtagactctttagagtctttattcacacagggttttaggaaaccaccctctttcataactactgtgtgtaaataacctctatttatctaatttgtaattttcctacagtcccctcaaaagggaacattaaaagaaatactaaaggaagttggaaagtttgtcaatgtaaagctggtctttgtaacctttctactcttcatttcctgtggcaattgcacttttatttcccgtctctctacactcagtaaacaaaaccatattatcaagggaaagacgtgagcccattaacattgtgagccctcagatttcactcacaagagacgatgcagcacttatctgatggagcagaagctctaattgcttcgaggtacaagtccatctaaacctctgagatctcacccgtccccggtaagcccttgcgccctccagacaagctcctcagtgaaagcaagcgccgcaccggtgcctgtgccagtctcccagaaaggagcataaggagtgttccaccaccactctggattctttattccaacaacccagccggaggggaaaatctgctaaaccaccccacaaggcagaaactttatcaaaatctggcactacaacactggccctcatcacgccgccacaaattgcgagggatagaagaaagctgcaaagtcacgttaaaaggaagcctagtcaaaaagtgaaaattttgtcccgccctaggcacacagcactcacagcataagatgtagttccatgagtcctaggaaagggggaagaaaggaaaaaaccaaacatctgctctaggtttagaagagggataacatcagcgccaagcaaaccgaaagcgcagaggactcagaagaggggaagaggaataactttatctgtcctggaggtgggcgaagagcagtctccaccggccgcgcgtcacgctcccatttaaccttttccatgccgcgacgcccacactccgccctcgagggactagccccccccacgatccagagcagaagcggctcgccccgctgcatccacgggccctcacccaagcgtccagtcctgcctttctccccccacctcgcccaatacctgtccgagagcaggcgttctgccctctcgccccgcccttgcccaggcagcccccggtcgcgacggctctcctcggggctcgggggcgctgggcggcggccctgggctgctttggctaacttggctgcggggcaggcgcgaggagcggcgcgccgaccgggccgagcggagaggccgcccattggccggccagcgccacgtggccgcccccgccggtatattaggccactatttacctccggctcactcgccatgggttggagagggcagctcgggtagagagggctggcggagcggcgcagacggcggcagtcctgctcagcctctgcccggctccgtactccggccccggcctgcgcc

SEQ ID NO: 24965 - DNA, 2300 bp, Homo sapien
tacagttatacataattctccactgtgaggagaacagacagggcctgaaagcttttcttttgattgataacaaagtatctggaacagctcatttctcttggtcaataatacctatgggatgaggaggaaattggatctcatgtattctttactatcagtgttacctctctctgcacaaacaagaaaaacctattaatattatcttccctgtatttctactattcacagctgcttgtcaactctgaatttcagctatagagaagacactacttcctaagacgctgctgtgtttatgtcaatgtaaattattgggtaaatttaaatgctgtttaagaagcttccttttgctgagggagatgaaaatatgacttaaccttaaaaaaattatggggctgggcacagtggctcacgcctgtaattccagcactttgtgaagccaaggcgggcggatcatgaggtcaggagttcgagaccagcctggccaacatggtgaaacccggtctctactaaaaatacaaaaattagccgggcatggtggcacgcacctgtaatctcagctatttgggaggccaaggcaggagaatcgcttgaacctggaaggtggaggttgcagtgggccgagatcacgccactgcactccagcctaggtgacagagcaagactccatctcaaaaaaaaaaaaaaaaaaaaagaaaagaaaagaaaagaaatcatgttaagatgaggtcctgctggattagggtgggggtccctaacacaatgactggtgttatttctcaagaagagagaaatttgaacacattgacacacagggggaatgccgtgtgatgtggtggcagagattggagtgatgtatctacaagccaaagtacatggaagattgccggcaacccccttctctggagccttgcaagacagcatggccctgctgacaccttgatttcagacttctagcctccagaattgtgagaatgaatttctgttgtttagccaaccagtttgtggtaatctggcagctctaggaaaccaaccacgctagttaaggaggcagaatgaacagtaatagagatctacggatataaagaatggaaatatagctttctaaatgtcatggacagtaattcttagaatacaggtttcctctgcaaaaacctagtaagctgtctgactttttgatttactgtgtgatttaaaatgagttacctcacctctctgaacttgtttctcatcagtgaagggggctttgggttaccagctctgaagcctgtcccacttgtaataccaccaatctgtaatgcatatgatttttctttaattgtgtaatttaagaagctattaggttaagacaaagttactcagggaatttagtttctcctcttcctgccccgttcacccccgaaaggtgagaagtgtgtgaaactaaagtatcttattctccaagctgagcatcatttcgggtgtatggagttgaaggacaaattaccttctggcttaggcgctgctcaagcctcctttctgccaagcatgtttgaataaacaacaacaacaaaaaacactaatgtctatccacggactaatcaacccagcaatataatggaatagagggaattcatgcagccttgaatctggtccttggaggactgcctgggcaggcagtttaaactccttaagcctatattcttatccgtaaaatggcgataatattattactttaatgggttgttgagaagacgaagtcaaatagaatatatgtgtatatatatgtatatatgtgtatatatgtacatgtgtacatatatacgtgtatatattatatatgtgtgtatgtgtgtgtgtatatatgtatatatgtgtgtgtagatataggtatataagtgcctggtatccagtgggcgtttacaaatgttactcggttacaaaattctggcttacagaaaggacgctaaaaatctcccagattcccctgccagtcccctgggtgggagacgagtcgggtacttcgcttccacctgcgggcccccagcgcagagcctggaattggctggacggagctagccgcgccggcgccccgtaggacggcgcgggggcggggccggcggaagcgctcgagtgccgttgtcggctgcgccggaagtccctagccaggcctggcggtaaccttgggggcctcactgcagccgccgctgctgttggagtgggctttgcgagtctgaacgttggcggggctaggctcgttaactgccgagagcctccgggtttgcggtggaggacgctgaggcccgtggggggcaggcacccgg

SEQ ID NO: 24966 - DNA, 2300 bp, Homo sapien
taaaatttgtctgccaagttgttttacaagagaaaaaaacaaactctgaattttcccaatttaattaattcaatgttaaaattctgggaaatactcctcagatttctactctatctttagtagtctgccaggccactcacttatgtcagaggctgggctagtaacactatgaataggagatttgatgtggagcattcattaattcagcaaatgtttattaaacatcctggcaggccatgtgctaggcacggggagtacaacagaaacaagttagagtacttgccctcctgttgtccaacattgacagatgagacgacagacacatgcaacaaagtgttatgactgctctgatgagagccaagagacatcagaaccagtctaagggggcaaagagggctcctggaaggctttacctaaattcacacatacacatacacatacacatacacacatacagatatacacacatgaatgtggttcccatcggagatcatgactaaccaaaatgaaatcaagacttccactggtttgcatggttgggtgagcaagaaaaaaaatcctctgacagatcccacatctcacccggtggggctctaaatgtaggcccctcctactctctccctacatgatgtaaaagaaaccacactgggttgttcaagaaaaacaatctgccttgtaattacatatctttctgtggctttgcaaacgaagacaccaaaatgcacagctaaattagtcagagcctgcagtaggcagaatatggccctccaaagatgttcatgtaccaatccccagaacctttgaatatgttaccttacatggcaagagggactttgcagatgttatgaaggttaaagaccttgagatggaaagattatcctggattatacaggtggtcccaatctaattacaagggtccttaaaagtgacagagaaaatcagagagtcagagggagacatgacaatggaaaaagtgtcagagagatgcaacctatctgtctttgaaaacggagaaaggggtggggtgtgaaccaagaaatatggacagtttctagaagctgaaaaaggcagagattctccccaaactctgccaacacctgattttagaccagtgagacccgcattgaacttctgacctgcagaactataaggtaatatatttatgctgtataagcaactaactctgtggtaacttgttacaacagtgataagaaactagtagagagtgggtgatatctcactagaatgagttaaaagtgtggttgggcagtggtttccagaatttgactggtgtccttataagaagcaaggattgagacacagacagtttatgacatataaataggctaatgtctaagatggcatccaaactattttctttgtgtgtgtatatgtttgtgtgtgtttaaatctgaattttagttattaaacaaatgtgatttcataggcagtaggggttccttgagagagaagtgtaacgttctacagatgaggatggttggctgcagagtgtaggagaaatacacaatgaatatcatgtacctcttttcccactgggaaaacagagatgatgcccagcagtgtattgtgggccctgagaagccacagggagcaatggcctggaggcaggcctgagcacaagaacctatgcatttattctcttttcagttatctgtgccactgagaacatacctgaggagacagataggttaccgaggctataaaaacccgagatatgtggtgtgagactcattacttgcttttactgtccaaacaatgaggaagagtaatttgtaagtattctttttacagtggtgttggaaaggaattcttcttcctcattcttagtggtaaaaaggcacccatgaggataagtgggaattgcatcatgaatttttcctttgtcctcagcaggatcctgcttctgcatttgctaaaagtgcgatttatgtgaaatggactcctatgctctctaaaagttcacctactggcacagatcaaacaataatagctgtgtgataaaatacttctgcccttatgatgtaatggaactgctctaaatgtaaatgcttcaaagttcttttccatctttgctttccccaaagtacaaacaatttgcccttttattttattttcctgcagacttgctctttgtacccctccttggtttatgttcctggtgatcgggtgttgggtttgaagaactttatatagtatcacaaatacctagaactgatgaggtctttaagagttcattgaatcctttgttcatctaatttggggcttcacccaagatagct

SEQ ID NO: 24967 - DNA, 2300 bp, Homo sapien
gtttattacaccaacaagacacatgttcaaatttatcccctgtatataaaaagattagtataaaatatttctcaattgtttatgcagaaagtagtagggaacaaattccaataatttttatcacatagctgatatagctaaatatttggaacctttaaaagaaaagtgctaattaaaatacatataaatttttcaaagtttaaaaagcagttggaaaaatacttctaccacttagaacacaattacctgcacagcttaatagtcttatggatttcagtagtaaaatatgtttagaaacatcttgtcttttccattccctcaaacacacagtgggctgagaatataactcttcataatatattaaaaagtatccaccatcttgagaaaactatatattatggtaataatttttacatctgattatgccatttttagactatggaatatagtttctgaattcttttggggggagggaaatggtgtggaaaaactacttttaaaacgtgcttctatcttcatttaaaatgtataaattctcaagtttcttaacaaaaaactttgatcccactattttatatagactgcatttataggcttggaaatcctgttctctctattaaactccttagacaggattatattaatcttacttaaaagaaaaaactacttacagcaaacatggcactcaaaagaattaaaaataatacttgcaatattttaatatttatgaaaatctgttttttgaaagacagatgaacttagaaatgtgaacacacaaaaaaatacaagtataaagtttcctttcgaaacttttcctttcaaagaaatatttatcccacatttctacatgcaaaacttttagtgtaaactattgagaaaatcctaaatagtaaaacatttgtttctgtaagtccataagcacttgctgtacatactcagaggcagccctggcccactgtatccgcaaatgcatctgcagggggaatggttccaagccagtcactgagtgtcatctgtcccttctccaggggcagggacattgagtcacaatgaaattttattatttatatacattattttaaattctgtttttcttagagctcaaagctttgacagtaaatgtcaaaccacactgaagttgacttgttagcttttgtagctagccttactgctgtcggctatttcaaattgcaaatgacaataaacaggtggttttttcttttaatcactaaagaacatcccttttcatatagctaatataacaaaaaagtctaaaacatgggcatataattcccactgtaaattaattataattatttcaggcttaagtattaatagtaagtgaattcttttcaagagatccttggcggttccatttgcccttgaacattaaccctgccacctcaaaactcaatgcctttgcacttagtctagaaaattaaaaatacaactcgtcctcatcctagtaacctgcgcaagtctctacaagagactggaggatctacgtggtaactaactttaacttacctcttctaggctttattaacgagtttatcaaaaaatattaactttcaggcaagatgtggctaattcttaaatgcagcttaaaactttcgacatccccttgtaaaaatgatgccacgaaatgtgccactgtccatttatttcccatttcacttaacgcattaatattgacccttcggacagcagcgctggcatcattttggagctgcaaagcaagacgtggcgcgttgatgagctaaaaaggacccgtctttctctgggccccttaccaacatctctctccctagaagacaaatacttttcagatctcgcacccctctttacaaacctgagcggggctttcggggtaaggggaggcaagactttggtgggagctgctcgtcttcagcaaagcgagggccggctgcaaaggcgcaggctggcagttcgggtcatttcctgccgattccccattcccctcggagcagcttggagaggaagtcggacttcttttccaggcggagcctccacgatgggcgtgggcgcctcgtgcgtgggccgggggcctcgtgcgtgggcggggatcggggcctgggaaaaacgggaacccggtacccgcccgcgccctcgcgcgtcggccaggaacctcggccccatgcgggcgggccagcgcggccaggagggccgggaagaggggtccccggggccccggatgcgctgaactccggggaggggatgggcaggagagagagcacactcctggagccgcgacgtccaaacccggacgcacttgaacc

SEQ ID NO: 24968 - DNA, 2300 bp, Homo sapien
gaagactattagaccaggtgctaaattttgtccatggttagcaaacgacatacaaaaaactaaactgcttccttgaagttgaaatcaaagagcatcatgagcagccttatgtatttctgaatgggagagaacacacgtgtgatggaggcaatccagagagaggcgcgcttcccagaggctgttttaaacagtgacagattacaaaatcctaatgtgatatgttggaacatgaaacacacacacacacttgcttgtgaaaaaccctgctgaaatccttaaaagccaaagtttagaagaacacgtgctatggatacaccaacagtaatttcaaaatcactctgtttatgagtccattcctcacctcttttatcactttgacacactctttaggaaataacagagaaagagaaatatgaagctgaagacagaaaatttaattataaaacaaagccacccaccttgctttcagggtcaggaggtacaatggccttcttttgcagcaagaatgaacttaacacccgtgtgttaaatgatcacgtatctatttaaaagaaaaggaaatgttttttaaaagaaatgaaagctatattctcagtccttcctatagccaagtcttaccaaaaaataaaaataaaagcagtgtactgtggctctctggcacaaggcagaaagccgagtccttaagtcactattccccggtttcgcaaaacaaaataaaaccaaaaagcaacagcaaaaggtgtttggcaggtgggaaagggccttaaaacaccttgtgccctcctgggtccctcccaatgccttcagtgtgggctgtggaaacaacaccgctcaacaccaaagtcaccatcggcagtttaaatgccacaaaagtacacttagaaatgagaagaaagtggggccgggcgcggtgactgacatggatatgtacagccaaccccactgccactagaacagtcttaaatgcccacacaaggagtataaaaagaaaagcacattttgcaatagaataaattctttttttttttttttttttttttttttattgagaccgcggaaagtcacatgaccctgcatgtagccttttaggaaagcaaccgaaatggtaaagccaggagccggggctgcctgcttcctcctgcagcctttcagcccgtcctgtcgcgcgtccacattcttctgggcgcatctgtggagctattaagtgggataatccctctggcctttgatacatttctggacatgattatttcattactcgcagtatatcagtaggatcataataaaaaggacttctgacaacctgccaagagttttgtggccttgtaaacacaaaagtgctctaataaaattttattaagtgttaaaaagtcataaaaagtgaaataacataaactacaaaatttactgtcctcagcaaatcctgaaaatatcttccacagtaaaattaaattagcatgtaatagacagagaagcagtgtggagtggatttaaaagaggatccagggaaaatgacactgtaacccaatcagggtcacggggatttaattcggattttcccccttaaatgtggataaatgtgctgattacagacgagagctccggggttactggagtctcacacattgtcaatacttcggaagaaataatatattgcagattgtaacgagcacggggagccagcgaaaggcagggcgtccactagggcgcgctgagagaccgggaatccccgcaagggcgcccgcgccgcccgccacccgccgccgcgcgcacgccgcgccctcgcccacctccaaataatatttacagttagggtttttttttttttttttttttttttttttgctctcgcccgtgacattttctccaaatcggaagaaaatcaagtgtatgtcgagctttgccgcaggcagcccttggtctccgctttcagattcggggtccgggagcggagcgccctgcccgcggcggtgctaaactctggggccagggtgtggccctcagcgagcgccctgggactggccgccccgccgaaggatgccgaggatcgggcaaggccggcgtccggtctgcgcggggcgcgggtgctctccgaaggccgcgagccacgggcctcgctgcgggttcaagtgcgtccgggtttggacgtcgcggctccaggagtgtgctctctctcctgcccatcccctccccggagttcagcgcatccggggccccggggacccctcttcccggccctcctggccgcgctggcccgcccgcatggggccgaggttcctggccgacgcgcgagggcgcgg

SEQ ID NO: 24969 - DNA, 2300 bp, Homo sapien
tattatgagttcagagaaaatataaagtataaggaaacctgaaaacttccaggtccttctagacttttgtcccattaacactttgggggaaaaagcaatctccatgtaaaatctccattaaaataaccttgtgggcttatctgaaattagcaccttcacagtttttgttctgactgttggtttagtttgcctactgtgccttgatcttatacttgatatgcctctctaatcagataagaaaatagttgaagcatttttggactgtagaccaacattaatgttattcaaaaataggagttaggcatggggctcagatttttaccttttttatttgtgtatgatttagtgttcatcctgcactagacactaaaatgcattgtttaattatctgagctcaacacaccattttataattcattagtcagttgctctttgcaaaagcttatttcttatgaaacaaaagtgggaatcatgcaactggactatttatctctctttaggggttgggggttaatatctgatagctcataacatctttattataatgcatttataatgatttactggaatcattctatggctaagtatctaatgtcaaagctgggatctggcatgaaataaaatgctgtatccttgggtagctctagggaaaaaaaggccccagccaatattttctgtgtaattctacaaactgtaataagggtaggggtaattgccttaatgtcaattaagctattaataatgttcatcttgtcattcctaaatatagcagtgtctcaatcatacattactgtcccctgttaaggctacacagaaatgagatcacagcctctgtggatcaagaagtctgtctagcagccagtcttatttcctttacataagggaaggtttgggggtttatttggtgttaatgaaaaatttctacttagacacacatatgtatttgtgaggacaagctctggtgattcttgtgagcaggacaaattcagtcttagaagctaaactgttccctgttcctattctgctcctgatgaccatgaaaggtgctcctgatcaggactcgtgttccagggtcccgataaggtctgaggacccagacagttcagtagcaatcatacatgcattttagcaaagtgtgtgggaactaacaaagttagggagcacttgttcaagctacacatagtgctgcgttgtgtgcgtgttgttcccaggccacgtggatgcacgcaagttcctcaaggacagagaaactacaggacaaagaaaatgaggctgagacattgtcactgagacaagaggtcagtgtttcatcagcaaatttcagcaaagtcaagggtaaagtcatatttggaagaaggaatagaagatgagctataggattttggcgaacagggagaatattgccaaatctccccattcagctctaaatcaggaccacttatcgtgcagtgaagaaacaggacaagacccttctttagttggcacttatcgttctcctgggccatgagattctgagcagccacttccttccgacccccctccttgttgcctgtcttgaagtgaacttctacttgatgatatttagagctcattaatttgtcccaaggaagcttattgtatggcagtttaatgacagaaaactgttttaatgcaaatggacatgtaatcccactaagccactctgagggtgtaaatttaaaacaattgctaggaactgacaccggagtttaataagatggagggctagtttctagatcccggtacgcccaggggaccctgcttggacacccagccctggcggttttagtgcagccctcagttaccatggcaattaaaaatgtcagggagcttactggagctcctttcaggtggtggggatctgagctctggaggagtgggggaatgcagggaggaaataagtttcagcacagagaggaaatgaagggtgagtgggtgtcttctgctcattactcctcaggggacaaggttggacaagatatgactgagaccccaggaggtcactttctgtcctggcttagtataaatgcctgatccaggcaaactcccacagacagagcacaaagccttacccaggaccccacttctcccagcaggtaaagggggaagcctgcttctgaggggttggttggaaatgaggcggaggcgggaattgtgtttgaatatttactagattataatgctgttggatactacatcattcatcagagggccctgaataaggttattatgggtgaagtcatttttgtaataaagttggctgtaactctgggtcataaatc

SEQ ID NO: 24970 - DNA, 2300 bp, Homo sapien
acgtgtgcctccatgcccggctaatttttgtattttttttaaaagtagagacagggtttaaccgtgttggtcaagctggtctcaaactctccacctcaggtgacctgcctacctcggcctcccaaaggcctgggattacaggtgtgagccatggcgcccggccagagcttgtttagacaaaagcataaaaaataactaatgtctaaaaacagcatacagtcaggatgaacaacaaatctggaccaatacaatagggaggacaaaaagatgtgaataaatgggctgacatttcatgttcctggagagaacttagtatcccatcccacattgtttcgcgatttaacattaacatttatacaaaagttactaattagaacaaaagttattgattagaattaacttattagaaaaacctggacaaacataccctaaagtgcagccaggtgatcactcttcttgatcacctatgtaatgtctcatagagtactctggtgtgaatagcaatttccaaaggtctttcactttgcatttttctttgtatccagaatcgataaagttaccaggactatttcacagtaattagacttacaaaatcttaacactaaatagacgctaaggctatacattcttccaatgtctcaagtctattgctggccatcaggagcacctggatacgtagaacataagaaagtttgcgaaaaaggaatcaaagcaacaggaggagtctggtttgaacggttatttcaaccaaattacattaaggactgctaactgttttctgccccacaaaaataccctttgtaaatgtttccaaactataacacaggtcctcctggagcaacggctagataaattaacaaacttttagactttacgctccccttttccaaactccaagtcgaccactccccatttgttaacagaaacttactataactgattagatttctaacctttcctagggagagccagttcaattctaaaagggttggtcacatgggttgctaaattaaaatataaagcatttcctaacagggaagggaggctggtcaattgtggttatttttatcagtaactttaaatatggatccatagattatcaatttatggctgtcgtgggtgttagaagatgacctaatcccatccccattttcatttaaaaaactgaaactaaagctctgtaaaatcaaatgatttaaaatcatctgactaggccgagaaaggattagctctctagagcattacggtaacaatcattcgcaaacaggtagcattatctggcgaccctgcttttctggaaatcttgtcaattattcagttccttaaattccgtcagctacaacagatgcatcagctctttccacactaacttgaaagaagcacattagaaaatagtcctgacttgtttcttgagatcagtaactaatgaactgacctccaccagtcctgcctcaggtcgttaatggtaaaaattctgtatgtcagccgcgttttgaggcctgtccaaggtgcttgtgagtcccacatgttggagtcgcagggcttttcagtacatgccctcaggcaggcggcgcagtcacagacactggtccccggcatttggaaacaggaaagatggtccgaggggccgaggagtttttcttgcaacctttaaattacaagcaagaaaaacgtgggttttatttcgggcacaggaatagaatgaattctgaaatggagaactagaggcctgcgtggggaatgagggacaagcgcgagaagaaagggaaaggcctttctctctggtgacgcgcgatcacaaggcgttccctctacgtggacgctcaccattggcggagaccgcactgacgtcccggaactcgccctgacgcgaacggcggcaaaggccctcttcccctgaaagctggcgaggcgcgcgcgctcccgcggcacgccgcgcctccgccctccgcccgccaacccgctggtccagtccctcttcgcgcccgcttggctccgcccccttcccaattcgctcctcccccaacagactggcggcgcgcggaaaacgcgtcacgtgacgactggccccgcctcttcctctcggtcccatattgaactcgagttggaagaggcgagtccggtctcaaaatggaggtaaaaccgccgcccggtcgcccccagcccgactccggccgtcgccgtcgccgccggggggaggaggtattagggggagagcggggggttggtggggaatggccggcgttgggggcctggttcggtgggagcggggaggccgggtggaccgggtcggccgtccc

SEQ ID NO: 24971 - DNA, 2300 bp, Homo sapien
gttttaaattaatttgcttgaaagcagtgagtttctgtaagtttgacattcagaacttttagattgttcttcatcacagttttgagtttaaatgtatgggccgggcgctgtggctcacgcctgtaattctagcactttgggaggccgaggcgggcggatcacgaggtcaggagatcgagaccattctggctaacacggtgaaaccccgtctctactaaaaatacaaaaagttagctgggcgcggtggcgggcgcccgtagtcccagctactcgggaggctgaggcaggaaaatggcgtgaacccgggaggcggaggttgcagtgagccgagatcgcgccactgcactctagcctgggcgacagagcgagactcagtctcaaaaacaaaacaaacaaaaaaattaaatgcatgttgggttgtagactgagaagagttgaaatgggatagatgcaacactgcttctccaacagtttagtgccttagaaaatgacttactagcaacttctaaagtaaaggttctcagacagttgtagcttttaaaaaatgaagcgattttttgattctggaattgtcttggatttcaatttagttgaagtgatgctggcatttgaaaggctggttataggtttccttgacataagttagcccctttaacagttgaagtcttatttctggtcaaagtttttgttgttttgtttttttgagacggagttttcgctcctatggcccaggctggagtgtaatgacatgatcttggctcaccgcaacctccgcctcctgggtttaagcgattttcctttctcgagtagctgggattacagacgcccgccaccacgcccagctaatttttgtgtttttagtagagatggggtttcgccgtgttggccaggctggtctcgaactcctgacctcaggtaatccatctgcctcggcctcccaaagtgttgggattacaggcatgagacatcgcgccggtgtctggtcaaagttttaactggacaaagtgttaactgtcacaggaatttgatgttgattttattacttaccgtacattaaaggctcttcgtgcatcttaattcatctactgtaaggtaacttaagagtattggttctttctctcagggccatgatccaaaggaaccagagcagttgagaaaactgtttattggtggtctgagctttgaaactacagatgatagtttacgagaacattttgagaaatggggcacactcacagattgtgtggtaagttactaagagaacagaagggttctaaggggtgtagagaaccggtggaggtgttttcaacgttataaaactttttattttgtaggtaatgagagacccccaaacaaaacgttccaggggctttggttttgtgacttattcttgtgttgaagaggtggatgcagcaatgtgtgctcgaccacacaaggttgatgggcgtgtagtggaaccaaagagagctgtttctagagaggtattttaataatacattgtgtaatatgtgaaattgttgtgaaagtttgtttcttgacttaatatattactttatttgtaggattctgtaaagcctggtgcccatctaacagtgaagaaaatttttgttggtggtattaaagaagatacagaagaatataatttgagagactactttgaaaagtatggcaagattgaaaccatagaagttatggaagacaggcagagtggaaaaaagagaggatttgcttttgtaacttttgatgatcatgatacagttgataaaattgttggtaagtagcaatttatggtaacttgaatgagaaagtagaactggtttttctgttttgaactaaatttgctaaattgtaattttctgttgcgtgtaatggcatttatagtgtatagtcaattttcatagtgtctgcctgtgtaatcagtatccagatcaagaaataaacataaacatctcagaatgctccttcattaccagagtcactacctgattatgtcttaatgggttacataatgacagagggtatctcatatatgtgcttttccaaacataaaataactttttgttttgtttgattgaaaaaaaatttagttcagaaataccacactattaatgggcataattgtgaagtgaaaaaggccctttctaaacaagagatgcagtctgctggatcacagagaggtgagtaggaccatacacatgtatacagtggatatgagtggtgtttgtaaggttcttaaaaatctcccttgcctgtattaaaggtcgtggaggtggatctggcaattttatgggtcgcggagg

SEQ ID NO: 24972 - DNA, 2300 bp, Homo sapien
gaacattttgagaaatggggcacactcacagattgtgtggtaagttactaagagaacagaagggttctaaggggtgtagagaaccggtggaggtgttttcaacgttataaaactttttattttgtaggtaatgagagacccccaaacaaaacgttccaggggctttggttttgtgacttattcttgtgttgaagaggtggatgcagcaatgtgtgctcgaccacacaaggttgatgggcgtgtagtggaaccaaagagagctgtttctagagaggtattttaataatacattgtgtaatatgtgaaattgttgtgaaagtttgtttcttgacttaatatattactttatttgtaggattctgtaaagcctggtgcccatctaacagtgaagaaaatttttgttggtggtattaaagaagatacagaagaatataatttgagagactactttgaaaagtatggcaagattgaaaccatagaagttatggaagacaggcagagtggaaaaaagagaggatttgcttttgtaacttttgatgatcatgatacagttgataaaattgttggtaagtagcaatttatggtaacttgaatgagaaagtagaactggtttttctgttttgaactaaatttgctaaattgtaattttctgttgcgtgtaatggcatttatagtgtatagtcaattttcatagtgtctgcctgtgtaatcagtatccagatcaagaaataaacataaacatctcagaatgctccttcattaccagagtcactacctgattatgtcttaatgggttacataatgacagagggtatctcatatatgtgcttttccaaacataaaataactttttgttttgtttgattgaaaaaaaatttagttcagaaataccacactattaatgggcataattgtgaagtgaaaaaggccctttctaaacaagagatgcagtctgctggatcacagagaggtgagtaggaccatacacatgtatacagtggatatgagtggtgtttgtaaggttcttaaaaatctcccttgcctgtattaaaggtcgtggaggtggatctggcaattttatgggtcgcggagggaactttggaggtggtggaggtaattttggccgtggtggaaactttggtggaagaggtaggctgtttatcttctaagtacatggatacctgacattttggtaagttgaatatattattttaattcatttcttgtttttcctcaggaggctatggtggtggaggtggtggcagcagaggtagttatggaggaggtgatggtggatataatggatttggaggtgatggtaggtggcttattttcattgatgtttgatattttaactttctttacttattgaaaattatttattacacttttctaattttagttaaaacttcagtggctaaatggttaaggtgtatttccaaactgtacatggaagaacaggaaccctttttcccctggagagacattagctgctctttttcagcaagtagtaggggttgagctagaattgttctattaagtctgagactatatttttcttagtgaaattttgtaaaatgaaaactgattttcttttttactatcagaagatgggttacacatttatttttcattcttactagtgcagatacttgatactctattattattaggtattaccaggcttcagagtgctaaatcaattcattggcttatttgccagtggcttaaatgtaatataaaaccagagttgagtaattctagctattcaggaggctgaggcagaggggttgcttgaggtgaggattttgagactagtctgagcaacataaggagaccgtatatctagaaaaataaaataggggaacatggtggcacatgcccatagtctagctactcaggagactgaggtgggagaatggcttgagcccaggagttcaaggctgcattgctgtggttgcaccactgtacttgagcccgggcaacagagcaagacccagtctcttacacacacaccagaattgaataacgtgactatacacttaagtttttgtgtggtcttgttatttgttgtttttttaggtggcaactatggcggtggtcctggttatagtagtagagggggctatggtggtggtggaccaggatatggaaaccaaggtggtggatatggtggaggtggaggatatgatggttacaatgaaggaggaaattttggcggtggtaagcattcacttgttttatttaaatgttaaatattcagtgttgctaacagttcccatgacacatatttggaaagt

SEQ ID NO: 24973 - DNA, 2300 bp, Homo sapien
tgatggtaggtggcttattttcattgatgtttgatattttaactttctttacttattgaaaattatttattacacttttctaattttagttaaaacttcagtggctaaatggttaaggtgtatttccaaactgtacatggaagaacaggaaccctttttcccctggagagacattagctgctctttttcagcaagtagtaggggttgagctagaattgttctattaagtctgagactatatttttcttagtgaaattttgtaaaatgaaaactgattttcttttttactatcagaagatgggttacacatttatttttcattcttactagtgcagatacttgatactctattattattaggtattaccaggcttcagagtgctaaatcaattcattggcttatttgccagtggcttaaatgtaatataaaaccagagttgagtaattctagctattcaggaggctgaggcagaggggttgcttgaggtgaggattttgagactagtctgagcaacataaggagaccgtatatctagaaaaataaaataggggaacatggtggcacatgcccatagtctagctactcaggagactgaggtgggagaatggcttgagcccaggagttcaaggctgcattgctgtggttgcaccactgtacttgagcccgggcaacagagcaagacccagtctcttacacacacaccagaattgaataacgtgactatacacttaagtttttgtgtggtcttgttatttgttgtttttttaggtggcaactatggcggtggtcctggttatagtagtagagggggctatggtggtggtggaccaggatatggaaaccaaggtggtggatatggtggaggtggaggatatgatggttacaatgaaggaggaaattttggcggtggtaagcattcacttgttttatttaaatgttaaatattcagtgttgctaacagttcccatgacacatatttggaaagtgttaaaagcgtttgatcaaattttatgttctataagaaaaatactaaaatggttggtagttcaaaccaaattttcttgactttgctggttatttagtaaaatgtacaaatgtactcagctctcttttttctttttttttttttttttttttttttttgagatggagtcttgctctgttgcccaggctggagtgcagtggcgtgatctcagctcattgcaatctccgcctcccgggttcatgcgattctcctgcctcagcctccctagtagctgggactacaggcgtatgccagcacgcccggttaatttttttgcatttttagtagagatggggtttcaccatgttagccaggatggtctcgatctcctgaccttgtgatctgcccgcttctgcctcccaaagtactgggattacaggcatgagccactgcactcagccaaatgtactgaatttttagttgagtagtaaaaaatggacatttaccagtattcagtacatgttttacgtgtaaaagattgggagtttatttattgccaaaattttacttaactccttggtacttttaaactggacaaccgggaataaattgtttgaatactccagacgtgttgaagtgagcaggttgccatctagggcccaggttaacaaagtactttgggtcttaatataatatgtcacaggtagttgaagcgtttaagcaagctagtgtatgtaggtcattaagccacaatactgttaaaagctttcttaggaatgcactgttttattggacctaattaacatgtcaatgacagatgagtggaagttttaacaagttagaatgccttctcattgttttaaatgttatactgcttcagaatcatagtgaatggaacactggcaattttaatggtgttaatggtagagagaacatgcgcctagaggacagcatttaatataaacaaaatgttgatggtcttttaatatcctgacatcagttaccccaagtggtgctaccacagtgatgtgtataagcatgctaccataattctcaaaagataatagttacatacgttaaaaggggaaaatgatgattgtgtaggtaaaccacacataaaacctttctgatttcaggtaactatggtggtggtgggaactataatgattttggaaattatagtggacaacagcaatcaaattatggacccatgaaagggggcagttttggtggaagaagctcgggcagtccctatggtggtaagtactttcttaaatcaattctttagagcctttttaatttaaaaaatgtgcatacttcttttaaaatactatg

SEQ ID NO: 24974 - DNA, 2300 bp, Homo sapien
gtaatgctggaggctgggcaggggacatgatctgcctgaaagggctgagaactgggaggctcttattcctatagtattgagagcaaaggcacagtcttacagaaccacacaatattcagagcttgtgggttggagaaggaaagtcctctgaaaaataaaaaaaagagtacagaggccagaggcggtggctcatgcctgtaatgccagcactttgggaggcccaggcaggcggatcacctaaggtgaggagatcgagaccagcctgaccaacatggagaaaccctgtctctactaaaaatgcaaaattggccaggcatggtggcgcatgcctgtaatccaagctacttgggaggctgaggcaagagaatcgcttgaacccgggaggcggcggttgcggtgagctgagatcacgccattgcactccagcctgggcaacaagagtgaaactctgtctcaaaaaaaaaagaaacagagtacaggtcagacattgggcaattttctcataacaatttcataggccattaatttggttacagacttgaatagcacacaacagttctctaagggtcagtttccaaagtaattcctaatatttaatgaatttttaagtgatagaaattgcagtaggaaagtctagcttgaaatctaatttgtgttaggttgaccaggtgacaaccacccacccctggattctgctcagttaggtcagacctggggccagttgcccatttagcatctcaggcctcaggatcctcatttataaacctggggtttgaactgcggtctccacgatcactgtcagctctccttagtcagttggttgttctaaatgtagtttagtggccagtaaacacctgttcctgagtgatacatctttaaggagccggtagatgggtcaacctggctggacttgctttttcaagtctgccttgtctattagaaaggctgagcttactgattttgcctgtcacgtttgagtgttcctgagactttgcccagcctcggtcttatctgcgggtaccccagcctctgcattccttgcccctacaaaatgtgctgccagttccaaaggcacaaatgaaaattagcttggctggagcatggctaggcacacaccagtggttaaagaaatgctgtttgctggctgacacttctggagtggaagtttattcttttttcttttttttttttttttttgcggggtggggcagagttttgctcttgttgcccaggttggagtgcaatggcacgatctcggcttggagcgatcttgggtcaccataacctccgcctcctgggttcaagcgattctcttgcctcagcctctggagtagctgagattataggctcccgctaccacgcccggctaattttttgtatttttagtagagacagggtttcaccatgttggccaggctggtcttgaactcctgaccttacgatccacctgcctcggcctcccaaagtgctgggattacaggcttgagccacggcgcccggcctttattcctttctttggcctcaattttattgttaagagatagtgggaagggcccaattttgaaatgatcctggaattaatgtaggaggccttgtataagcagttaatgtgtatttattgagtgggtaccctgtgccaatatgatacaaggtgtgaaggacacatgagttgggaaaggcatggggaaatgcacgctcacactgctggtgcgagtgtaaaaggtacagtctctatgtagggctatttggcagtatatactctttgacccagcaactccacttttaagtatttatcttagggataccctcacacatttatgaaatgatttatatacaaggatattcattatagcaatatttgtaatggcaaaaagaaacaaaagtcagatgggggactgattaaataattatgttattaagtaatactgtttcagtacatctgtgtaatgaaataatgtccagtcattaaaaatagtgaggcaaagtctgggtgcagtggctcacgcctgtaatcccagcaccttgggaggctgaagccggaggattgcttgagaccagcctgggcaacatagtgagaccctgtctgtacaaaaaaaaaaaaaaaaaagtaaaatattagccaggcatagtggcacatgcctgtaatctcagctattcaggaggctgaggtgggaagattgcttgagcccaggaggttgaggctgcagtgagctgtgattctgccactgcactccagcctgggcaacagaacaagaccctatcttagaaaaaaagaaaaaaaagaaaaagggacaacttac

SEQ ID NO: 24975 - DNA, 2300 bp, Homo sapien
ccaatactatacaaacgtttttgtaactttttttaatttgtactattttgtgagtacgtgaaaaagaaatttgtaaagagtaaacgattacagcatgttgtggtattacacactgttgaagggcgccatctgtggcgtggtggctgcgctttggtgggaagaggttctcttggggttcccgtttttctcccagctctgggtgggcaatactgaccactctccgacctaaaggggcttctccgtttgcctttgacgacctgagcttaggagaatggagacacgtgggagttcagaggagggcgttcagggtgactgcgaacacgagctgccggagctgtccacatctcccctaggcagggcccactggccccagcccgggaagggagcaagggcgggagggcagttggcagtggcacggtctgggtccaaatctttagccccccccaccccggctggcgccattctcgggcggtaaagtgagataaaagcagggcaaggttctgcaactccaaatcagggaggcgcagctcctacaccaacgcctttccggggctccgggtgtgtttgttccaactgtttaaactgtttcaaagcgtccgaactccagcgaccttcgcaaacaactctttatctcgcgggcgagagcgctgcccttatttgcgggggagggcaaactgaacgccggcaccggggagctaacggagacctcctctaggtcccccgcctgctgggaccccagctggcagtcccttcccgcccccggaccgcgagcttcttgcgtcagccccggcgcgggtgggggattttcggaagctcagcccgcgcggccggcgggggaaggaagggcccggactcttgccccgcccttgtggggcgggaggcggagcggggcaggggcccgccggcgtgtagccgattaccgagtgccggggagcccggaggagccgccgacgcagccgccaccgccgccgccgccgccaccagagccgccctgtccgcgccgcgcctcggcagccggaacagggccgccgtcggggagccccaacacacggtccacagctcatcatgatggacttggagctgccgccgccgggactcccgtcccagcaggtgctgcctcggccctctgggccctgcggtggtgccgggacgggggcgggggagctagggaaccgcggcccgggagggacagccgcaaccggcttcccccacgtctggccagagccaggaccgcggcgctgggtagagccgccgcgcttgcgccggggcagggcggggaggggcagcggggacgcggccgggtgatccgaccgaccacgagcccgagggcgaacgggtgggaagttgcgggaaggtctggggactgagcccgctcgcgtgggccttgggggagaatccagccgcgtccccgggcccgagagctgggactccggagcccctaagtttgagcggcccggtgggcggcggggcaagagggggcggacgctggccgtctgagccggcgcggcccggcccttccggggctgcgcggctcccccgcctcggtgccggcaaaaatgtgcctagtcacggggccgctctcgggggaactgaggtcgccttcgggctgggacccggagccccttcgccgcgccccaagacctccttgagtgcgggctgcgacgcgctcaccccgctgggccgtctgtgggcgcggctttgcgaagtcatccatctctcggatcactctctggcagccttgagctctcttgaaagcccagccccgggacgagggaggagcgccttaagtgcccagcgggctcagaagccccgacgtgtggcggctgagccgggccccgcgcactttctcggccggggaggggttcgggctcgggcacccggagttggcccctcgtaacgccgcgggaaagtgcgggcgagggcagtggactctgaggccggagtcggcggcacccggggcttctagttcggacgcggtgccccctggtggcgctcaccgcgcgcgtggccttggcttccgtgacagcgctcggttggccgtcacagcagccctcggttggccctttcctgctttatagcgtgcaaacctcgccgcgccagggccaagggacaggttggagctgttgatctgttgcgcaattgctattttccccagagcggctttgtctttggatttagcgtttcagaattgcaattccaaaatgtgtaagacgggatattctcttctgtgctgtcaagggtaagagttgcgagtgtagattagaatttctgttgcttttagtctgttagtaattttttgc

SEQ ID NO: 24976 - DNA, 2300 bp, Homo sapien
acaatcacattccagagtctgccaagattgggcacctccttgacgtgggtggtcttgagaatggggttccctttatttggctaaaccaaatgccaaacagcttttccttagtgtttgtttttcttaaacaagttcaaactcttatcatattgctcccctccctttgaaaatatgtactctgcagatgcctgaaataacacactctcagcaaattgcagcattggaaaagtgaaggttatttcattcagtctaaactcaatggaaattttgtggcttaacaaggaaataccaaatactttataaactcctttagagcagtaaccatgtcatatgactctggtatctcctacctactaggctcattgtctaccttctctgatgtcgtaattttaataagtaacttgaattgttaacaatttactcttgtctttttcttggactcagaaatgttattttattattatgtctctgcatctttcatgtgaggtcctttgcaaacagttttctcctaacttgttttcattgtgcagatcatgttgcagggttttcacataacagctgaaaggaattaataggagttaaagaagcttgcttcaattacaagtaattaatttaggcttcacttatctcaaggaatatctgaatatacaaatttacacataaatcctgggagtgtcaaattatgcaacctagagaaagtaagctctgcagctttttgggcgttgattgctatagtcaggggtgtgtgtgtggtttttgaatgaaatagcaaaaccactgccagtattatctacttcacctggttttgaataattccaggaagctagaaactgaaaaccagtcttgtatagagttagaaagattgtaaatgcagaagaggaagaaaaaaacaaaactaaaccatttatctatcctctttgaacccttataagagttcacaatattcctcgtttcaaatacttgaagtcttctctgggcaatgattaatttttaaataattgtttttaatgtaagacataaaacatacgcactgcagatttaaagcatacttggaagtaacaaggagaaacataaaaatcgttgattccacagcatttaatatattggtaaccttcaatttttttctaggcacgtttttataaaatgagccaatactatacaaacgtttttgtaactttttttaatttgtactattttgtgagtacgtgaaaaagaaatttgtaaagagtaaacgattacagcatgttgtggtattacacactgttgaagggcgccatctgtggcgtggtggctgcgctttggtgggaagaggttctcttggggttcccgtttttctcccagctctgggtgggcaatactgaccactctccgacctaaaggggcttctccgtttgcctttgacgacctgagcttaggagaatggagacacgtgggagttcagaggagggcgttcagggtgactgcgaacacgagctgccggagctgtccacatctcccctaggcagggcccactggccccagcccgggaagggagcaagggcgggagggcagttggcagtggcacggtctgggtccaaatctttagccccccccaccccggctggcgccattctcgggcggtaaagtgagataaaagcagggcaaggttctgcaactccaaatcagggaggcgcagctcctacaccaacgcctttccggggctccgggtgtgtttgttccaactgtttaaactgtttcaaagcgtccgaactccagcgaccttcgcaaacaactctttatctcgcgggcgagagcgctgcccttatttgcgggggagggcaaactgaacgccggcaccggggagctaacggagacctcctctaggtcccccgcctgctgggaccccagctggcagtcccttcccgcccccggaccgcgagcttcttgcgtcagccccggcgcgggtgggggattttcggaagctcagcccgcgcggccggcgggggaaggaagggcccggactcttgccccgcccttgtggggcgggaggcggagcggggcaggggcccgccggcgtgtagccgattaccgagtgccggggagcccggaggagccgccgacgcagccgccaccgccgccgccgccgccaccagagccgccctgtccgcgccgcgcctcggcagccggaacagggccgccgtcggggagccccaacacacggtccacagctcatcatgatggacttggagctgccgccgccgggactcccgtcccagcaggtgctgcctcggccctctgggccctgcggtggtgccgggacg

SEQ ID NO: 24977 - DNA, 2300 bp, Homo sapien
atagcacttatcatattctaactattttgtttgttttcccacttgactattaatgcttttaagacaagaatatctgtctcgatcagtgttcactctccagcactagcacgtatctgacacctgataggtactcaataaatatcgttaaataataaatgaatgaatgactgaagaataaattgaatgtgcaagccaggtgctggcttcatgtgccctgtcttatagcaggacttagtactttattgtgtttccccaaaagcaaataaactccacagagtagaggtgagtaatgtggatttgaccaacaattttatgaggagacataaaaggaggtttaaatggagacatttctattctcccctcagtgttcctctttggtttccagatattgggtcttcctctcttttgaccctcccttcctcccattctctcacccccaactcagcctctacttcccttttctaggcagtatcactctgagaggactatggaggatgaatcggagagaagtgaggctagtatcagggagttccatttaatagacaatttaatgaggccaggcagagatgatgaaggcctgagttaagaaaatgacaaaatggcctgaatcccaggactttggagccccaggtgggaggattgcttgaaaccaggagttcaagaccagcttgggcaacatagtgagaccctgtctctacaaaatagaaatttttaaaaagggaaaagaaaatgacaaaatgaagaggagggggtgggtttaggagatgtttgggagggaagatcaataggatgtgagaactgattggattggagtagaagagaaagaggaatatagggcatgtgtcaaggtttggtgaatgcaaaaggagaaataaagaaaagaagagaagagtaaaaagggtaggggttgagagttccataggattagagttattaccaagggacgtataaaagagaattaagtggagaaggaccagtataaggattataatcacctgagaatctaacaggttagagaccaaaactggtatgggcactagtatttaaattgtgtaatgtagagcctgggtccctctcagtgtcagacgatctccacaattgttaatttgctttccactctactgacaaaagagtcaggtggggtgtgcgtgtgtttgtctgggtatgtgtgtgttgatgggggtaaaggggcaggttggcaacccaggtagaagggaaataattgtgtgattttctttaataacttgggctgccaatggtaagagctgagaaaatgggtggtaggttgatccaagacttgggatttctgagacgatggggcagaaggatcaaggggcgaaatgatggatgattttatgaaaacaatgttcaaagtgatggacaatggcatctaggctcaacagggatagaaatgagccaggatggggctgacagattgaggggggagggtggggataaaagagcaggggccatgcctggtgcaatgtttacaggaaataggagtccataggatgcaggacccaaaaggaaaacaaattgtggaaaggagaagttactcttccttctctgaaatgaaacagaaaaagagatatcatctttaagtatttctcagtagagaaaaagcaatgagaggatacccacattggagaatcttgatttcttctattaagcaaaaggagaaagttgcatacagtgggactggggcttgaaggaaacaggaaggatttagaaaaggaaaagtgaggactgtggaaggaaggaaattttgaaaaatcagagaattacctgggagtagtaaaggctcagctgggaccagtcagctgatattggcttgggtcagatttttacatttttaatttaattttcagcaatatcttttgcttgggagcagaaacagaaagtacatgatggacttcattgaaggatggagatttggaagacatgaatggatgaagaaccaagtgcgtgagggcacctatcaggattattgctgaaatccttatggagttaactggctgagaggaaggcaagcaagcgaggactgatgggcccttggcactgtgagaacagtggaggaggagggagcagggttcataaggaggagcacaaacagaaagttcagtggccccaataaaaataacaccagaatcttccagatactttctccataaggcgaaaaggtaaatgcccctttaaatcattaactaaactggcacttagatctgggcaggctctcccagattgggctgttccgttttgccaggaattgataaacttctgtgacccctccagggtgagtg

SEQ ID NO: 24978 - DNA, 2300 bp, Homo sapien
tgtacatgacactggaaggcaaagtgggttttaaaattttaaaataagagacaattcctctaattgacaacaaaatcaagtaaaggaaaggaagctaggatttttcttctgttatcaaacatgtaggagcatatagccacttttctggtcatcagttgaatactgaaaatgtcaatcaggtgcaacttctttgttgtgagggtaggcaacaaagtatgcaaaagccagaaactagtggcttgcaggctttgatatttaattttacaagatcaactaaagattctcttttttcagtcataaatacctaggaaagtgctatatgtgtttcatgttcttgcacctcatgaatgaggtcgtgatagctgtggtggcaatctctgaaattcttcccagaactcaatccttaagaaccaggagtatagtttataattaaagtgaaaatttattttagaaagttcaattttagaatctataaaataaaaaacaaaaaccccaagcctacgtaagtaattttaacgtaaaatgttaatggccccaaactctaatggtggaataaggacaataacatgaagtatatgatatttgagataaaatatagctatttaagaaaagcttcttactctccttgagccttcatctataaaataaggataataaaactgtgtcattgtgttactgcaaagattgattaaatagatacgtataagatgcctaggttatggccattttttatatttaacaaattcctaattctttcttgtttctacaactgtactaaattattttaatagctgcaaaagtattttaacatattgactaaccatttctctgttgctagacatttggactgttttcaatggtttggtatctcttcgtatataaatttcagaagacattcggacctcctgtaaaggccaggtaatacatattttggggcttctgggaccacataaggtctctgttgcatattcttttaaaaaatttcttgttttcttttaacaacccttctcaaatacaaaaaccattagcatgagggctgtgtaaaaacaggccacagactagagctggccctccaacagcaatttgcttagcccttaattgagagtttttaaccagtctgggcctctttggaagttcactctaaaggcataatctcaattttagaagctggcaacacccaagagagcaattgttagtctctagtcccatggatgtggtgttcttcagattcctctgccaatatttttcttgttaggaaagcatgatgtgaaagtggtgacaggatggagaatgacaatggccagtgtatgtgagtttttgtctaagctaattcttatgcaagacaccggctgaaacaggtgaggagcacttttcacgtgctatcttccagaaatgaattcaatctgtaaataactgagatgtcttcacagctcttgggtaatttttgtctgtagcaataagaaactttatctctattaaagttaggaaggggttaggatccagtaatgaatgaaatgagaacttaagttgcaactcagtttctgtacttacttgtgatctagcattaaacacagtgccaggcacgaaataggtggtgagaaataagaaaatgatagagctatttgctctaatggttagaggcaatgatggtcagctttgagttactttggtgaccccgcagggaggaagagcacaggtggaacattagaatctctttcaggaaaaggatgccgctggatccatcaggtccagtagcactgcccatttctcctgctccaaggcatctgccctcgaaagcccccaggccacacccgaggacaccacccagggttctaggacacctcgagggcggacgtggtttggctctcggtccagctggaccgggctgggccaaccgggagtcagctcgaactcacctgcttggcaggtgcgcgcttcccgaggcgtgacaagggagcgccggcgcggtgggtggggggcagagaatgtgaagctccagacgcatggcacccgccgccaagtcgccgcggtggctgccgggatgcgccgcagcgaatggtcgcgccgggcgccgctctgagtgacctttcacccgcgcccagcggttccgggcggcagcacaaggcggtagccatggcggaggcggcggctgcagcgggtgggactggcttgggcgcgggcgcgagctacgggtctgcagcggaccgggaccgggacccggacccggaccgcgccgggcggaggctgcgggttctctctggccatctgctgggccggccccgggaggctctgagtaccaa

SEQ ID NO: 24979 - DNA, 2300 bp, Homo sapien
tatttttttcaattctcacagcaacactgcaaaacaggattactgttcccgtttttacaaatgacggtgactgaaactctcagaggttaagtgatttgcccaagatcatagagctgtaacggtgtagtggaaattgaaatccaggtctatgttcccagccattatactgccaaaatgctcaactgtcttcaatttgctcccagtgtgacctttatcaaaggtaaatctaatcatgtattgccccacgtaaaatcctgtaaacaagattcacctctccagtcttcgtcccctgtcattctcaccctctcctactacacttgagtctcagcagttccctaatttgtctctcacttctttacctgtgaacatactgtttgtatgccaagaacaatttccccctttggcaaactattagtaatgcaaacatccaaaatttactcagacaatctttactttggaacatctttgcactaacaaacacaaacccaaaactgggttaaatgaccaggtggtatagttcccagttaagtttcttataacgctgtattataattttacctactaagctattccttccttaagagtaaataccgtatttttaaatttctgtattgctggtacagtgtgtattttgtaaagactcatgtatgttgaattaattcatcagaagcaagtatagcttaggaacttggccatgaagtcaatttgatgtgctttcaaattctaacctgtcacacagcatatctgctaagactccagcagacttaatttattcatctgtaaaatgggagaaaaccgcacatacctcatagcttgggaagaaacaaaggatttagcacactttggcacacttaaaagtacactttaaacattagctacttatttttttcactctcggtttatccatttatccacggtgacaaagccacacgtcagaaagtagcttctcctaatagccttcatcagagattgaggagatcgagaccatcctggctaacacggtgaaaccctgtctctactaaaaatacaaaaaaaaaaaaaaagatttctccaaaaacatcgaaagtcaagatctcttacaaacatccctcatcggttagactcttgtcttttagcttctggttacacagagctcagtagctataccaccacaccttaaaccactagctagtgtttgcagtttatggcttcttaccattcatcggtttcctccctcaaagtcaatacatcttgatcctaagcaagtggaacttaccccacagaaaccagtcagcacctttttccagggcaccaccagtttcccccacagcaggctttcgcgaatgagagagattcctatgatctatcatctagtacaaatttatatctcctcggagaaaaatagaacctctgctacccattccaagacctcagcaccaaaagtattaattcaagataaaaaatgaattcctggcactaaaagctcaggaaaaaggaatcctttaaacccttctccaacgagagttcttcaagcctgttaccctcacatagtgaccaaaatccaccatcccatcccgcccccttcctgacagaatccagggtctagtccactctctcgaaagagaggtgggtccctactttcagggaccgggatgccttccgcccacccgtgtcacttcccttcccacctcgcctgtgccctcctgcagcacaggcccggcctggtccctcgacgctaactccttccacataccgctactcaccgcttctttgggatggtgcccgactcctgcgcggcgggagtggccgtgggcgctgccgtggccgccgacgcggctctccgcgctttgcactcattggtactcagagcctcccggggccggcccagcagatggccagagagaacccgcagcctccgcccggcgcggtccgggtccgggtcccggtcccggtccgctgcagacccgtagctcgcgcccgcgcccaagccagtcccacccgctgcagccgccgcctccgccatggctaccgccttgtgctgccgcccggaaccgctgggcgcgggtgaaaggtcactcagagcggcgcccggcgcgaccattcgctgcggcgcatcccggcagccaccgcggcgacttggcggcgggtgccatgcgtctggagcttcacattctctgccccccacccaccgcgccggcgctcccttgtcacgcctcgggaagcgcgcacctgccaagcaggtgagttcgagctgactcccggttggcccagcccggtccagctggaccgagagccaaaccacgtccgccctcgaggtgtcc

SEQ ID NO: 24980 - DNA, 2300 bp, Homo sapien
atcattaatgaacatttgtagaaaatgaccgtttgaattcaattagtatgataataggttttttggagaagtacaagtacaaataatcctaactgtaaattaaaagatttatccattttgccacagataagttagcatattgcttgctttttaataccagagcaaactgacatttcagaattcttttacagattaagtacatattctttcttacaaaagttctacttacaaaaggttatgtttttcattgagtaccttttgaaatataatttatgctgctaaccattatgttacttcactattctcagaacaaattagcaagacctagaaacaaaaaaagggaactttgtacagtatgtaaaagcaaaagattaagtttacgatggattaggtatttgatttatttaatgccttaggaaaaaaattctaaatctggaaaaacagtaggaagaaagtaaccattatttgggaacatgcaaatttatttaaaagtactgtgaaaagaaaatgtaaatagaagcttaatagccagaattttttcttgagcctattaaagtttcaaattttcttattatttgaagcctttatgttcgttaaaatattttaaggatatatatcctgtcatttttgctgaatttacccaacaaattcgtctcaatgtgatgtttttctttagttaacttcattttctctaaaacttgggtgtgttttggtagttaaggcagaggtgggttctttcgaaatgcacgtttttctcattttgttatttgtaaaatgggctataatctctgtccaagcttccttcaatctccatttcatagtttacagagaaaggagacactgtggagcacagacttcccctgggaatacattgggcttaatgagcttgatagtctggtgggctcaataaatcaaataaagcaaaacatttctcatttttgaataaaagcatttatcacacagtgtttgttcactcatggtcacaagattgattggttcccagtatcatagcatatattgaagcatttttgattttgtttttccagtgggcaagttacggaagcaatggctaaaggaaagtatctctgatgtcggctttgggatgctgaagtctgtcaaggaatatgtggaccccaataacatctttggaaacagaaaccttttataaatccattagtaccattacaaaaaaatgtcaattttttttttaagttttcaactgtggttatactagtaatcaaatatatcatggactatattttggatacatttgtttctttggtttaaaataagtttgttttcattctgtagtttgttttgtttctacatctatggattgacagatagtattcctaaatctctctcattgtaggtacatcattttacattcagcggttgtcatttcaaattttagtcaggcagcacaaagctgtcaattattccagaggaagctgctgccagctgttttgtattgttgcttcctcttggggaacaaagacagatttggtatcattgattgctcagctagcctctttttaaaagaacgtttctgggaatcagatgtctagggaaggattccactgaggagtgatacacgtgtacattgtttaagagcatagtctagtgtgagtaggccattaaggggaaggatattcatgaaagaatttaggcaacctgttatttagaaagccttcacgtctgtaaggtgcttggcctacttttttttttaaattagtatacatgcataaaaccttgtatcatcaatatacaaattattctgttaggggacatgtttttgttctccatgtttctgtttctattgtggtatgagttgtatttgtatcactgagataacctattgttatattctaattcattgataatatgttttgtaagaaaagctgacatccttcattgcaagtgaagaacaggtttaccatgaaatgaatgcctttattcaacttagagtcctaatgtttctgatttcacattcttgttgctgaaatgcagaagaaacagctacagcaagagcagaaggaaaactcttagacttaatgtctccaattgcaagaattgtttcactaaagaaacagtcatcattcaactactgaatttgaaagcctcagcagtttcaatgacaaaaatcatttttgattttttaaaattaatcccaatggcatgataaattttcatataaaaagtaaagtttcaatttagtttttaataatggtttaatgccttttttgaataactggtttaacctaattttttttaaatgtaatgtattaatgcatatacca

SEQ ID NO: 24981 - DNA, 2300 bp, Homo sapien
cctactgaagttcctttttaggtataacaggtgaccattcccaactaatcactttctaatacttgctcacagttacgacttaggccaagaagttcaaatttccactggccaacccaaggtggctggttgctttaacaggaaaataacaatataaaaaaagcaagacactaatattcccctataactgggcccatacatgatagatagagttaattcatcagtgactattacctactgaacttagctttggaatttcatgattcagctgcttcttatctagctgtgtcatctcaggcaagttgcctaatctttctgattcacatgttcttcatcagtaatatgcagaatacagggtggttattatgattagaaataatatatataggtggtctaatagaatgtgatgcaatatggttggtgttggctccaaaatttatatgtagaaaagatttatgaacagcaatactgttgaagaggcagtaaggtacctgcattgaagtatttaattatatagcaaagacatgctctgacttggactgtttatcatgggtggtagtgaggccaatggacatcatggaagactacaaaagacaatgctctgtcccaggccaccatatgatagatgttaatgaattacaactattattgttaccttgaaaactacactatttacaagtacctcactgggataagccaaattcatattttgctatcttgtctatgtccctaattcttgattgaaaaattgtatttattctcccttaaagtctatggtctccaggtcagtttatctaggggtattttttaaattggtgattaaatataattttatggaataattaagcccctagtttttcacagccccatcatggccactaataaactgaaaaaaaattatacaaaaatagccccaggataataacatggaatctacagcatctattccaaatatataacaaagaatgaaagaaaacccagaatgatatcttgtacagtctagcaaacctgcatagaaatcttcaaactaagaatctggaaaaaaaattaaagtgtaggcaatcttttcttattttaacagaagaaaatccatatttatcagttcaatatccaaaatccctagaaggctgaaaagtacaaactgagcatgtgtgtctctcacacacccacacatcactggctgactaatttagtagttaagagagaagagtaaaaatgcatagggaaaggagcacattttaatgtcttggattttcccctcttggaaaaaactgaagtcatgcatttctccaacgtttctacctagtagtgaaagttggaactccagcgcaatggggatggccaagggtaaacgccaatatatactcagtaatatttgttgttacgggaaaaaagagcgggagatacttggacctaaaaccgaaactctcccagtaccaatcaagattcacagtcctttttcctcattaacctctggaaaccaccaaattaaggattcctgctcgccgctctattccgttcttacaaactgtgccctcggggtagtgcaaaaaagaacgtgctctaattccagggtaattccaagagataactcgccttttgccatcccggttcttttactgaaactaaaccaaaagccagcattattatcgaccacaccgtgtaccaggctcaaaatcgccaggaacatggggccggaaaccttcctccgccgcgccagagaccacggtgccataacagacacagtgagcgcccctcatctttaagaggcagggaaggagagttaccctgcacccccacgggccgccggttcggtaggtacagccgggactacgtctcccagcatgcagcgcggctacgacccgcgccgcggaaccactggaacggtgcatgccgggacgagtagattcagtctctgaacggcccggagtagtctttcccctcctgaatgccgccactccgcagtccagagtatttgaagatcaagctgaaattgagagactgacgagagtggtccctttttgttcctaacagatttcttgcgacaaggaaaccggcagtcttccgcttccggttgctctgttgccatagtaaccgcacccataacagccgtggtggttatggctggcctgagcggcgcgcagatccccgacggggagttcaccgcggtcgtgtaccgcctcatccgcaatgcacgctacgccgaggcggtgcagctgctgggcggagaactgcagcggagccctaggagccgcgccggcctgtcgctgctaggctactgctactaccgcctgcaggagttc

SEQ ID NO: 24982 - DNA, 2300 bp, Homo sapien
aaaacagagagaaagactaatgaagggcaatttcccattcccatgttgtcatctcaccttaatttaatagcaaattacctaaggtaacagtacatatataagaattttaaaatactgagccttgcgaggcacagtggctcacacctgtaatcccagcactttggaaggccaaagtgggagggttgcttgaggccaggagttcgagatgagcctgggcaacatggtgagaccctatctccattaaaacattttttaaaaaagattagccaggcatggttgtgcacctgtagtcccagctactcaggaggctgaagcatgaggatcacttaagcccaggagttcaaggctgcagtgaactatgatcatgccactgcatgtcagcctgagcaacagaacaaagccctgtctctaaaaaataaataaataaaatactgagcctaaattcccaagggagaaccatcaggcagcctgctgtaaagaagtcgatgcaccccttcccccaatttattactgagcagtatcctctacccatgtacctccttgggcttaagactctaaaagggtgcaccaagagatcagattgaaagaagcctcagaatagagttatagtaatattccacagttgctttctgtggggtcttaggtgagccaaagtcccattcaatcctgaaatgggtgcagtttccctttcttggaattgatgcactgggaagctccttgtctagttccagccaaaaagacccaactctgccaattcctggcaagggagaagactgagtaagtacataaagtcagtcatatgatgatatgagcaatcacacacctactaaaaatctccttccagtgatactgggtaaatacgaactacacaactccagtagtcacatctgctcacagctggaatcaaggcctagaagttcaaagtttactaactacacaaagttagttcattgttttaatggagaaacaaagacaataatattccttatacacacttagcaccaaacaatgggcccttacaaactcacgtacatgagatacatggattgggttattcatcagtcactatttcctattgaaattggttattggatatcatggttcagcccctacctacctagatgtggctttaaacaaactattaatttaatagtttgatttaattaatgtaatacttaaatctttaaacctttctagcccacagacttcttaaactacaatatgcagaatgcaggctgcttattcaaattagaaatactatatgtaaacagtctctaatagaggtgctatatgatatggttgacatcgttatcaaccgtatgatagctgtgaagtttatatacagaaaagatttatgggcagtaacactattatggatgcatacaaaggatttgcagtaattatgtagcaaacaacacacttttacttggattaggtttatattaggtgctagagagaccaatggatatcatgggagatgacaaaagatactgatttcttattggcagagacagttggaggaccacagcaatggatacaaccaagtgtaaacgccaacatatactcagtaattttttttttgtcatggaaaaggagagatactgcgatcaaaaacagatcctctcccagtaccaattaagattcacagcactttttccttattaacctctggaaaccaccaaaataagaaggatttctgtttgctgctgtattctgttcttacaaactgtgccctcggggtagcataagaacctgctctaattccaagggaattcaaggagttaactcccttttgccatcccgctccttttattaaaaggtccttttattgtactgacgatctctactttattaaaagtaagccaaacgccagcattagtatagaccacaccaatgcacaaggctcaaaatcgccagaacatggtgccggaaatcttcctccgattcgctagagaccgaggtggcacaacagacacagagagtgcccctcatctttagggggcagggaaggcgagtgaccgtgcgtccacacgggccgcgagtcgggtcggtgcaacagggactacgcctcccagcatgcagtgcggccacgcctgcgcagcggcgccacaggaacgatgcatgccgggaccgggaagattcagtctctgaacggcccggagtagtcgtctttccccttctgactgccgccacgctgcagtccagaatatttgaagatcaaaccgaacttgagagactaacgagaacggtccctttttattcctaacagattccttccgtggcaaagtaacccgtcgtct

SEQ ID NO: 24983 - DNA, 2300 bp, Homo sapien
acagggcggggaacatcacacaccgggatctgtcgtggggtgtggggagggaggaaggatagcattaggagatatacctaatgtaaatgacgagttaatgggtgcaacacaccaacgtggcacatgtatacatgtgtaacaaacctgcacgttgtgcacatgtaccctagaacttaaagtataataaataaatttttaaaaaagatttaaagtgacaacaaaaaatcaaaatgcagagggggatggaattaagtatcttttttccctctgtttctttttttgcaatcaaaattaagatgtcatcttaataatttattatagctaatgataagcctttaaaataatttactacagctaaagctaagcctcatggtaactacaaagcaaaaacctgtaatagatacactggaaaaaaaaagggggaaaaaagaaaagggcttacaaagtgcctaggataatgaatgaaaataaactcacaccaaggcacatttgtatgacatttcagaactcttgaagcaaaaagattctacaaaaactcagttggaggggggagttattttcaaagtataatagcacagaatagcttctgacttctcaaaagtaacatcgaaagctcaaagagcaatgcctttaacattctaatggaatgatttccaacctagaaatcttacctaggcaaactattaatgaaatgtgacagtaatacaaaaacatttcagactgcacagcctcacaaatctaccccacaccttttcttgggaatctgttagaggatgtgtctcaccaaaatgagaggagaaagcaagaaagagaaagatgtgggctagagaaacaaaagaaagagagaaaggcatccccacaattatggtgaaggaatatcctaggatgaaaactacacatcagacttataagatagttggtctagactggagaaatgcgggaagttccaggagtgatttattcgtgaaactgacggaatgcccaaagcatatgaacattttgagaagagacttagacaactgatagagagtttaggggttgaattaattgcaagtacatggaaaaactaagctccacctatggaggagcatagagttgggaagcaaggattaattatgtggtttctggaatgcttagagcagccagagttggattgaatctcttagccaaagtaagtagctccagggcataaattactgtcagggtaatttaaacccagtgaatagataggaatatgaatacagaatggtctctgataacctgaaaatataaaagtgactcccttaccaagagtgatccaaagaatatggtaaacccaatgaaatcaccatacaaatgatttccaaagattttttttctcctctttaggctcgtttgtgggcagctgattgacagttgcctaacatgggtgttttgaaaaccttgaatatgtatgaccagtattgtaattatgttgtgatgtttatatagaatgaagctaaacaagaaagcaaaattgatctcctcagtgaaacataggcttatgctaaaccttcagatatctctattttattaaggcaacatatttcccaccagagatgtgctgtctgatcctttcgatcattctgaatatacagaacacgtgtgtaacaaagaacacgtgcaagctacaggatataaggatataagaaacaaggcaaagtggtgtattcccttctccttctcctgaatagcatcaattaaaattcacagctgctggctgcccagatgtttcttgcatttagtgctctgtaatatgcatcagaatatattgtatgaccacagtttccataaacttgacagttctgtattataaattctgcaggctagatccagtgcgtgtattttatcttcagattagtttccctccccccgcccccaaccctgcccccaccttcatttgcttggggcatttgcagttcagaaacaaaagacatttacagctcagagtttagctgtatcagggtgtaagtgcaggtcaggcctgatttatgtggcacttctgataagcaggggaggagagcaggatgggggtttgggaaagctggtgaacttggcttgacttatgtcttttgcttttctaggcagccaacatccctctggtgtcagaacttgccatcgatgacattcattttgatgacttttctctcgacgttgatgccatgatcacagctgctctccggatgttcatggagctggggatggtacagaaatttaaaattgactatgaggtaagatgtctgtcttgggtgatccaagcagttcacctgggacaacgtgtt

SEQ ID NO: 24984 - DNA, 2300 bp, Homo sapien
cacaactattaaattgacagagctttgaattttctccttttgagtcatattttcttgtatcttctcttccagaaggagtcatgagtttatcatctcatggaaggaaagggcaggtagtcaacctcttagcaagagaacaaacttaaaagtcagggtgtcaggagagaggatttgctaaatggatttatcttttagcaattaaagaccaatctggacccaggacaagacatgcagactccataatccacaaaagaagttctcataaccccatgccacaagtcatcactccacttccaccccatataaggttgggagggctacttaattcagtagaaattagataagatgaagtatttaataaaaggctgagtgaggttacttcccttcagccatcttgggtagagcacaatgttcaccaaaataagtcatgtatacttgcttgaaacagtaagagcaggtgcctgggcaggctcggggatgtttcttgagtcctccttgctgccatagattggcagaaggtgtggccagggtgagtggaacaaggaaagttgcagacaagtcatcctggaaacaaggctgttgatgtatcaggataaataggaacacaaatggcaagtcaccctgcagctgcttatcttggccagatgaagatatttgaaggctaattcattacacaaaaatatctatgtcatattggactttacagtaagcacaggagacttctcaccaggcagaagctgaaatggctgctcagagcagtgttggtgagaacacactcaaagacaataaactgaaattcaaatgcagccaccctaaatcattcccctgacttcaccctccccatccattattcatttaaacactaacacacaacaaagagccactagcaggggctcatgcaaagatactccaaaaaaagaagtaggaagggatgtgaaaacaaaagccaagtgaaaaacacacaccagaaaaatgcttaaagttttccatgaaatgagataaaaaataataagatctctcaggaaaaataaagttgttcaagaaagagatacaaaagcttaaggaataaatgataagcagtataaaagataagaaactgggttggtagaacttgaaaaaaagtagaagaaaaatatgtagctgcacagaaaggaatactagattaaaaacaagaagaaataatacttctaaaatacttttaggcacacaaataataaaattgaaaataaaatggataataataaagcattaaaaaaggagaatgataaaaatggaatcagaataacagaggtccaaactaagtattctgggcaactctaaagagaacatggcaaatggaacaggaaaaaaaaaacattcaaaattataacactaggacattttactgaaataaaggcaatcttggatttacagactgaaggaacacaccatttcaggcaaaactgataccgactgcttagcactgaaacacatttggtgttaatagacttcaaagatgttgaaaaaagcatatgggcatttacacacaaaaaaatcaaagcatctattgcaggaaaattcattctgatgttagactacctagttgcagtctcctgtgctggaggacaatgggcaatatctacaaagtcctcagggaaagaaaatgtgaccctataattttaaatccaaaatttaaagccaaactcatagacaattacacaagttgcagagagatattttcaaatatacaaagaagagcacagcaaatgtagttctaagaagcccttcctgaaaagtatgagagtttgaaatctagccaagcaggtgatgagtggggaagttgggataagtaagatgggtattgagtattgaatgtatttaaatatcgaagtaaggctaaaaacagtggagcatatacttgtagatacaaatgtaaaccttatattgtaaaccataacaatggtgctggttccccatgttctccaagttccacaggtgcaacaggtgggtatgggcatgcacatgcactgggtcatattacagaagaggtcgtattacaacactgtgcttgggaaatatatcccttttctgtggagtggtatcaagcctgatgtttgtctgtggaaagatgttacttcatctcccaggtttgctcactgcaaatacaatcctgagaactgaactagggccttaaagtcctgacatgcatggcttggttttgtggattgcctctctcaacaggtatatttgtggaatattttaattttaatgtgtcaaatttattaacctccttttttgatttttgctttaagggttttgtt

SEQ ID NO: 24985 - DNA, 2300 bp, Homo sapien
gtggtggggtagggggaggggggagggatagcattgggagatatacctaatgctagatgacgagttagtgggtgcagcacaccagcatggcacatgtatacatatgtaactaacctgcacaatgtgcacatgtaccctaaaacttaaagtataataaaaaaaaaaaaagaaagcttaacagccggcagaatgtgaatcaacatataaagccataaagatatatatttgtgtgtatgtgtgtatgtcaactcaagaattatttcttgagaagcattgtaccagagattgtgccctgttttagaaggagagaaaaataaataaaatattgactctgatatcaaggagttcactttctcttcatgatttgacactggatcttataaattccttgagtgatggccttctctagctctcgtggccatgaataagtgttagagaagtcatggaatcaaactaacttgcaagagttagtctgccagagatattcgtaaggaaaatttctgccctttaagaccaatacaaacaggcatcattgcttttggctcaggcaaaactctacttggtagtcagcatttctgtagtgtcagcttaggtcaggctctgatttgatcatggccatggatgctataatatatcaatataaatccaaagtacaatttgggttcatatgtgatcatattacatttatttgagtaagtgaagacaagaatttaaagccatggctcatattctgaactatttcttttaaaggaaaaataaaaaaggaggtggcgaaaatctacagatgtttctttaagccaacacaagctgtgtccgacttgcttactcattaaataataaattacactttagagtaaagcagatatctgggtttcttgacctggtgaatatatgtctttatatatgacatttttatacattatcttagacctcttacagactgtgttatttattaattgattcttttatttatttaacacatattgcttgagccaccactctgtgctaggtattgcgctggatgttcagaaacatcagcctaacattcttaagaattccggaatatttttagaagtagatttcaaattttatgaaatctaaataagtgaggtaacactgagaattctgcctgaaatgaaggttaattataactttctcaaataactttatatttgtgtacatttattatcttggacattcagcatcttgataggaggatttgattttcctctggagaactatcttgtccccacctcttagcccaaagctctactcaaagctcaatcatgggcatatggctaagttctggctaagtctactagaggattggttttctttggcctcagagattgggtcaacaatgaccacgtgacccaatttaggtcaatgagagtgagggacagctgagataaaaggaggatgggtcagaattttaatgacctcattcaaggtcttattcatcacttactgaagctagccctacccctgtacttactttcttttcttttctttctcctttttttttttgctgggggagagacagagcctcgctctttcatccaggctaaagtgcagtggcacaatcatagcccattgcaacctgaaactcctaggctcaagtgatcctctcacctcaagtctgccatgaactgtgactgtgccactgcactccagccttggcagcagagcaagaccctgtattttttaaaaaaattaaatgaaaataaataataaattaataaattaaaaatatttaatataaaagtactgcattagaggtatgtacaaagagctataaaagcattagagctataaaagcatataaagtgccatttctttggtggaatgaggagaatgcagagagacaatggtagagcaaatcgaaaagtccagaaagattttattgagatatttgaactggtccttgtaaaataagtagagtctgacagatgcacaaagtaggcaagaaggttctagaatgagggaattatgatgaacaaagacagaggtatacaacttagttgtacatgggcatggataatctattgtgactggaatacaagaaatgtagagggagaagagtgctggaagatgagtcaagaaaagtccactgtgtgttgggaatagattatgaagggctttgagtgtaggccctgtaagcaataggaagccatggaacagccagaaaggtagcttggattggagtgggggtgagggagtgggaagtgatgattaaaggaagcagacaatgttgagacataactaacaggtaaaattagccggactcagtgatgtcaggt

SEQ ID NO: 24986 - DNA, 2300 bp, Homo sapien
aagttggctaggcttgtctggatttttcgcctgtgcaacactcaagttcccctgcaaactccagcaagtcttttgaagaaaaaagatttcattttttttaatcatccccccatgtcgacctaaaagagcacagtttactttttcaaggttctcaaacaccttcactttaaggaacataaatattgaaaacctaacttcaagattatgtatagactattctgttatttttatgtatttatttttttttgagacagggtctttctctgtaacccaggctacagtgcagtggcacaatcatggctgactgcaaccttgacctcccacacccaagcgatcctcccacctcaggcttccaagtagctgggaccacaggcatgtgccaccacccccagataattaaaaaaagaatttttttaagcagtcctcctgcctcagctttccaaagtgctgagattataggcatgagccattgtgcctggctattctgttattttaaacaaagttaattcttcagtttcagtcagaatcagaacttatataggaactggagatactgcacttatattagttttctacagttctctctctctctgtctctctttctcgtatttagagacaaggtcaccatctgctacccaggctagaaggcagtggcaagaccatagttcactgcagctttgaacacctgggctcaagtggtccacctgcttcagactcctgaatagctgagactacaggtgtgcaccaccatgcctgactaattctttaattttttttatagagatggggtctcactttgtggcccaggctgttctcaaactcctggcttcaagtgatcctcctacttcagcctaccaaagtgtacagtttattcttagaatcacataagtaaaatctttacattctgtcaagtgattgtcataaagctttgtgagtattcattagatgagatttaccaattgatgtttcctctatctcatggcttttttttttttttttttttttgagatggagtttcgctcttgttgcccaggctggagtgcaatggcgcgatctcggctcaccacaacctccacttcccaggttcaagcgattctcttgcctcagcctcccgagtagctgggattacaggcatgcaccaccacatctggctaattttgtatttttagtagagacggggtttctccatgttggtcaggctgatctcgaagtcccaacctcaggtgatctgcccatctcggcctcccaaagtgctgggattacaggcatgagccaccgtatccggactatgttcttttaaaatccactgtaataatatatgatgaacttggcattattgtattttaaataataagtcagagatttgagatactcttttgctttatgaaagcagttaatgttagtatttctttctcaaaggtagacaaactaatgcaaagattgggttactaaaacagttattttattgtcccattttaccaatgatttgatatattgtcagcaaaggtttatggaaaatgtgtttttctggaactcctgtgttaaacactttactcttaactctttcattaccaggcacctaatggaagagtttcacctttgacaatgtgaaccaacagtctggtatcctggagtgtaatgagagttttgttctcttataatctcaacagttaagaaatgaatgtctttcctcttcacatttccatagaacaaaatcggtgctggatattcatattggatattggacatttaggaagtatttgctaatttgacataagtacgacaagtggcaggtttacattaaggcaaattttttgaaatttaatgctaaataaccaagaaagagaatatatttcaaatgcaaaggttgacctgaaaagtttgactagctgtcatggcaataattgatttttaaaaattaatgattgaaaggaagagagctattgtttggttttatatttcacttcataggtgtgggtcagggtcacttgtgcgaaggccaagagaaaatgagagtggaatatatgttggagtcagattgtgaaggtccaggaatgccctgacctgaaggcagtagggagttgctggggacatttaagcagagactacatgatcagatctggggagtaaatggtggcagagagaagaggagatctcagcagggagacactggaggcagaaagaccagtgaagagatttttctcatggtgcaggtaatcattgattaggatttgcagatgtggagtaaaaaaattaccagaatgatccaggccttcgggtcctcagaatgagccaggatt

SEQ ID NO: 24987 - DNA, 2300 bp, Homo sapien
cttactattgtttgattaaaatagtcatctggggatatacattcacacttgagtaataaagctgtcagagagctacaagtccctggattctataggattgagaagctgcataacaagaaaaccctacctcttcatgttccaacaaacattgctgtatagaaaaaccactcattagcaaggccttaggcaactcacaagacagcagctatgcatgtgaaccttgagccggctatttcataacaatacaaaaatagttaccagccacctacagtatatttacttttccttttcttttcatattgattttctcccacacaaactgcccatgaagtaggaaggagaagtcagtaggtttacatatgtggatattagaactcatgagggctaagtgacttgcccaggtccccacagctagcctgtcaggctaggaaggctcaaaagtccctagcaattatcctacctccacagatactttcagttttaggaagcttttcacaaagtcatggatgtcatcctgctaccttagctgactaaactaatactaaactaaactgaaataactgactaaaacatagatctgttccaagttgaagaacaccaaatagggacatcctttattgactggtcatccactgtctagacagagagaaggagatgggggaaggaagaggaagagagaggggatggaggaggctgatatttataataagtcccgttatgtaaggtcaccagggtatttctcttcctgcccattaatataatagcagaaaagggacaataataccagtcactcaacttattacagagctggtgggaacatccagacaattcaaaaagaaaattctagaaaatagcaacctctaagtaattcagaaaaaaaaaaggcagttataaaagacataatgtgattacccagtagtgactttccattgtggacttctgggcataataagaactggatatagaaccatctagacaccaatagagtctcataagaaagtaagaaatacatatcactttcttatttgtcttcctcacttagatgaaagtgataccagcagtaggatacaaaagctaaatccatcaagctaagtttgtataataggtgagcagagctacaaagagcaatttagaaatctcaaggtaaaagtggtagacaatgtcatgaaaaggaaaaagaccacttaaaaaatgtagaccatttgtagaagaggattacataaagaaccctgacactgaagggcatgcaggaaagagaagcctgagaaggaatggtccaagagacaggaagagaacagtgacagaaggccagagagatttcaaacagtatcagttattgctctaagatcaagaggagctgatgactcaaaatacaccctgggatttgtctggcaggtaatactcaacctcagtgaagcatccagtgaagtggtggggagaaagccaaattaaactagagtgaagaataaatgaaaatggatggagtggccacatcaggtgtaaaatcctccctcaagatgtttatccttcaaggaaagcagagagagagagatgtggaaagaatggctgaattgcaaaaaggatgttttatgataggggagaggttagcaagggggaatgagttagaggagaagaaaaagctgaaagaaaaaaaagctataaagaagatgggtgggcaaagggtcctatgtatatgaggaggagttggccctagacagaagaagggacatcggtgggacagaggctaagaagttagaacaagcatcccaactggtcagtttacaggtaaggctcctaccagacgcccttctctgtaaccaatgagccagttaccaaataaatgggactagggtagaggttggtaggcacttaggtggggaagaaaagctttggatctgctaaactgagagaagggaagttgtgcctatgataacagctctgatgagagatggggaaagcttcatgagatagggccagagtggataaggcagtttgggagttctgtggcacagcaggcaagatctgatagcccattagatatatgtggctgtgactcagaatactcaagaaaatggctgagggaggaggagtcaagatggccgaataggaacagctccggtctacagctcccagcgtgagcgacgcagaagacgggtgatttctgcatttccatctgaggtaccgggttcatctcactagggagtgccagacagtgggcgcaggccagtgtgtgtgcgcaccgtgcgcgagccgaagcagggcgaggcattgcctcacctgggaagcgcaaggggtcaggg

SEQ ID NO: 24988 - DNA, 2300 bp, Homo sapien
tcctttagtgacctcacacaccaagcagggaacatggctacagccgattcaaaacgcagctcgaaatgttgcattcagtttttcggatttctcttctattgctttccccatccttcccagtattcttctccactctcacttctcttggtgctgtagacggagatctttagtcaaaagcacagcttttgtcttggtcttcttttgtccccagagcctggaacatgataaatgccaaacaactgcttgtataatgaatacatggaagatggaattaaggaagtgtctttattaaactttctgtttctaggaagcccagggttggtctacttctctcacttccctgagaagctcattgcttcattttcatcagatctctactcagtgcttttcttgtctccgtgcacaacactgctgctgtattatcaccagtctcagggtagtaaatgttttttgttcttatcttgtaacagctttattgaaatataacttacataccatacgattcattcaattaaatgtacaattcaatgaatttcagcatattcagattgtgcaactatcaccacaatcaatttagaacatttttattaccccccacaccccccaaaaaactcatacacattagcgtcacccacttcctctccatctagaaagtaatctactttctgtctgtatggatttgcctattctggacatttcttacaaatgaaattttacactatgtggtcatttgtgagtggcttctttcattttgcatgatgtttttaagcttcattcgagtactagcacgtgtcagtgctttattccattttatgattgaataatattccattgtatggagttatcacattttatttgtctgttcctcagctgatggacatttggattatttccactgcatatccgtaaatgtttaacaattagcagtccattaaaaaaaaaaaaaccctgacacataacatttgctgatttccatggtgtaaacattcccgttgtgactgattgcaaactccatgatgtgactgaatacagaattggaaagagattttaaaataggcacttgtgagtccttacaagccagtttcaacatatcactaaccatctttactgatagatcactcaagtgaccagagacatagctacattcagtaaagtttccatacatcgtcaccttagaataataataataacaaaagtaatacaacagctaacatttactgagcactttttatgtgccaggcactatgctaaacgttgttttttttctttttaaatcttgatcaccactcaccttcttggaaaccagcagctccaaattaccaggattctatgcttggtttactgtctcctagctggtctccctgctgttaattaaatactccagactcttcagcacttacttcctctacctggtaaactctttttctgtactgtgttttacaccctttctctgtgtaatctgtctctgccccaggtacatgaatttggttaaagtcatgaattgctcacatcggaaactttatttgctattttcggggaaatgccattccattaatatttactgagcacccacaaggcgctgggcagtgttagtgagcaagtcccaggaatcctgggaaccaacaatccacagtcacatcccagaaaaataaccctgcctgtctctgagggtgaacgacactctcgattcctcggagtccgcttctgtgttcagatccctgcaaaacatcaacacttgtatctcggactcccactgggctcccgctgggcctcctcgaaacgctaacggattaaggggcgcggtgagtagggagggttggggaggtaagggagcaagaagcggggaaggaacaaggtgcgtttccctcttctaatcgtgttccaatcaggagtcctgtacccaggcgccgattccggccgtccagagactcttccaggaaccgcctggcagcctgggccgtggactttggctggtctggcgtccgcggctccctcctcttctctcctccctccaggctccgtgcctcactcaggggcgtgtcctgccctacctccctgtcacagcggtccactcatccggttacagcagcagttccagcagcagcggcggcagccagaacaggagcagcgatagctcgggtttccggaacaggagccggggcagcggcggcagctcagtgctgggcacctgtgcggagcaggagtagcaggaccacggggtggggtcggcgccagccactctgagccagagaaggaaggggcatctcccagattccactgctgggaataatctccagggg

SEQ ID NO: 24989 - DNA, 2300 bp, Homo sapien
gccttatatagttatgctcatataagataatatatatggagttcatagtttagagatcaaatgagataatatttgtataatggtataattgagattaattttcttgttccctttgactatggtatccactcccccaccactgatattatacagttgtgtgatgactactgagagtcagggattgtgggttgtcaccctggatttagcactaagatttttataatttctccttgtattacattccatatctgtagtgagggttctgtttaccctgaggctgaacaactctaggaagtatcttttcttgactttccatttctctttttcctacccacaacaatcaaggtaaatgaaaataatttgatagtgtgagttttgttgatgagaggaactgcaaagcaatattatttgcaaaccagtgccatctagtggaaaatgtgtaattttcttaaattgtcctgactgggcaatctctattctttgtgaaataagactactgattggtgtcctgaaaattttaggctgttattgagaacagttaattcttttctcaaaaaaagataaaagattgcataaaacaaaaccaggaacgcaaatattggaaaatgccagaaaagcaaaatttctttactatccaattatgtgaaatatgacatattcaaggaaaattagaaatttacttataaattaaaaaaagtaagtacattttcttcatgacatgtatttattttaaacagatttattgagatataattcttcttcttatcttattttttcttttcttttttttttttttttttaagggattggtgtctcactatgttgcctagggcaatctcgaactggccttaagtgattctcttgcctacgcctcctaagtagctgggattacaggtgagacccaccacacccagtgagttctaattcttacatcatacaattcactcatttgatgtattcaattaaatcgtttttagtgccttcacagcattgtgcaagcatcatcgcaatcaattttagaacatttcatcactcaatgaccaaattgttatatttcaaatcataaaacctttgaacatgaattacatgtaactaaaacacctaaaaatgtctgaggtttaaaagaatgatttttagttagtctgcttaatagaagaaaccaggtgctgggcatttgcagattaaatttttttcaaggctttagaacatgtagcctataaagcactgttattagaatgtgcacacatgtttgtttcacatgaaattcagatttttttgaaactttttctccctcaaatcttttctttttaaaaatgagaggtgatattgtgactaatttttgaaatgccaggagcaaatagtaaatttttgtcattattttccaaactgaagtacaatgaggcttacttagttggtgatattagtcttcatatgttacatcaattaactaaaaatatttcgccctatttgcaaattttttataggttttaaaactaagacttattggtgatcaattagtagctttcagattgttgtatatgaatatgatccagagtttccatttgacccatctgtaaggctactgtctactgataacgtaggcaattacttagtctgacctgtggcaggcactcaagaaatggtagtctccttcttgagtttgcatgcctttgagtttgagaataatatctaacacctgattttttttttcacagtatgcctgctccttttgattcaacttgatgacatacatcttttaaatgtgtagatcacaggacaaaattcatagataccacttagaatagtttcattaaagcatctggtgactgtggctatttaaattaaaattacttaaaattacctaaaattaaaatgaattataatgaaaataattaaaaattcatttcttcagttgaattagccagtttccgacagctcaagagctatccacagctactggacagcgggcacgcagagccaagcactgcacagcaagtacaaggctttaagcctctgcgagaggtgagatcccacgggatctgggggccaatcagcagtgggaccgggtcccggcttgccattggctggcgatcactggtcgcgcgcgtccggctgcgcttgcagcccagggcgtgaggtgctctttctggatcgccagcctcgaagttgaggcgtggactctggccaggtggctgttccaggtgactgctgggagcgggggcaaagggaggaaccgctggccgtttttaatgccaatattaaaaagtgtttcattagcatttctctttttatgaaaaata

SEQ ID NO: 24990 - DNA, 2300 bp, Homo sapien
gagtggataccatagtcaaagggaacaagaaaattaatctcaattataccattatacaaatattatctcatttgatctctaaactatgaactccatatatattatcttatatgagcataactatataaggctaaatgattaactctgtgggggaagaagagtaattattttgttcaatactacatcccttcagtataacacagtgcctaacacatagtagatagtcaaaaatacttattaagtgaatgggtgaattaattaaacttgatagtcatgctcctgcgtagctattaggcggctatcaagcttaactaatccaaccacaaaataatatgtattacctatttagtaggtaatattattcctactttacagttaatgaaaccgaagctgcaagtattaagtaacttgtccaggctcacacaattcagtagcaaaaccatgtaacataatctgatattactttgcattatatatttacatgtaagatttccacagtgggggaaaacaagccctcgggacatgtctttcctgttcctcattatatatctagctcctggcatagagcctggcacacagttggagtacaataagtatttatctggttgacttcatagcaacctaggtcttagcatccagaacttgttcatttgaagaactccgccctcggtctacttaggggtttattcctttcacttcattccaatgccactgctaaatccaggccttgtttctggatttctactgggtttctgacctctcctctaaggcttgttaacaagaaggcatttcccactttgcttgcactctatgatttctcttagttccacagctgagcagtccaccctcactgccctccaaccccagggttgcttgtagaagttgagtaaatcaacagatggagttagttctgggttttttgttgttgttgttgttgtttgaggtggagtctcgctctatcccccaggctggagtgcagtggtgcaaactctgctcactgcaagctgtgcctcctgggttcacaccattctcctgcctcagcctcctgagtagctgggactacaggtgcccgccaccacgccaaactaatttttttgtatttttttggtagagacggggtttcaccgtgttagccaggatggtctcgatctcctgacctcgtgatccgcccgcctcggcctcccaaagtgctgggatcacagacgtgagccactgcgcctggccaagttagttctggttttagtcgtactttttatctctattactttggctatgctataggcctcagtttcctcatctctaacaaatgacgctgaaattgaatgatctcaaagcttccttccaactctaatgctatatagtttgaactctgtcctatattgatcatctattgagcttatgaccaagatggtgacaactctccactttgaccaaaacttagttaggctcctttgagtcctctgcttgactaggcttgatcttgggctttctgtccttgtagaatccaatttgagcaagaatcctgctgaatcagtgtagtgaaaatcctcattcttggtgtctgactaccatggatatcaatcaccctggcctgccttcagcaactatcctgtcaagttggtttagccagaatcctccttaacactgatgttccctctttgtaattttccatccactgacctcccaccaagcttcttggttagaaatttgtccttattagagtcaaaattcagtccaatctctctctcccactgcaagaccccattgcagctgtccctggacctatctccatggctccctttgtcaaagtcggccttcctgtaccatctctaacgagtgtcatgaataattttttctttaacactggaaagaatccttggccttaggggtggggtaaagccagcgttgggaaagcctgtgcattaggcagcgctgttctgcctgcagggaacgattgcacaactgataacttgggcctaggctcagctggatttgaggatttgagacttagactgggtcagggtcccccgcgtcgccagggggcgctgcaggccgctccccggaaggcctcatcctgcgcggctggacagcgcctggcgccggactcctctttctcccggaagcggagcaccgagccggcaaaggcttgggtgtgagacagcagcggtggcagacaccgcagaagcaaagagcagtgaggctcctgcattcgggtggagcaccatggacgaagctggcagctctgcgagcggcgggggcttccgcccgggcgtggacagcctggacgaaccgcccaacag

SEQ ID NO: 24991 - DNA, 2300 bp, Homo sapien
gatgcaccaatagggtggagaaactgccttgatctctagttccgcacagcccgctgtgtttaatccacccatttccccagatggatgcgtgtagtaccgttacctcttatttgaccattaatcaatgagatggggggagacttttttcccctgatgtttaaagccattttttaaaactattaaaacacacatagatactatggaatagagtgaaaagcgtgagaacattcttacactaaaacgtgagatttaggttgtggtagtcccctctctttccccatagtttatggttctctgctattaggggttcagagaaaaaattagataacctcttctttttctttctttttttttttttttgagagtctcactttgtagcccaggctggagtgcagtggcacgatctcagctcactgcatcctttgcctcccaggaagttgagatttcaggaagttcaagcgattcttgtgcctcagcctcccgggaagttgagatttcaggtgcctgccaccacaccctgctagtttttgtatttttagtagagacggggtttcaccatgttggtcaggctggtctccaactcctgacctcaagtgatccgcccgccttggcctcccaaagtgcgggaattaaaggcgtgagccaccgcgccgggcctagagaacttctttaggtaaagattctgtgtgctgtgtgtactctcatttccgttcacacttttgtatttctttttaaatacatgggttttagctttttttcttttaagggagaaagccatttcagtagagtttctgttaatggaactcagaaggagtaagtagaaagggtggctgtgatgaagcagaggtcagcatcccagctgctcccttgaggagcctgtcttcacagcaaaggaatgaaggacaaactgccattgtcgcagggtcccgcatctattattttgtgaccagaggacatgagaacattgctagtctagatggaaaaagctaatccaacaggtgagattggagattcaagagaaactgcatgtgggaaggagtgcataaagtcgactatgtttcatagcaaatcattttgtcagcacagggcacaatgaaatgccatcacagttgcctcattagtaagcaatatcttccatttttgaaggcaccccagcatgttctgtaatagctcccattaagtccagtcgatgtcctctggactccccctccgcctcccacccccagatgatgatgacacaaatgtcttgaaatattgacatgtccgcagtcactcgtttacagaatgtctgtacaaatatttacattaccccgtccctcccagcaaatttgcctttagattaatctgcacaccgaacgcaggccgggagtggcttggagtgtggaagggtttaagggtgtggaagggttgtagtgaggcgggactgactgactttgatcggctttgccaggggcttgaaggaaccggctcttcctttcgcagaacccaggtgtttctctgggcccgggaagtttttgctcccgagcgagtcagggacgggagcaggcacgcacagtcgcgtaagtgtatgaaatgacgacctcagaagggcgcccagggacatgggtttggcagccccgagcggaggccgccaggcagccgttcctttcggaattcggtctcccgcagtgctcccggctgcggcgctcctgggccgagcgctggagccgttctgggcaaccctcccgagcgcggccggctcacctccgccggactgcgcggggcgagggctccgctactgcgcgcaggcccgcggatggcaactcggggtttccactgcgggtgatctcgggacaccacgggttcccacggaggccgggccaggggagagccctggctgtgggaccccgcgtgaccagggcgcagggcgccgggtccttagcccatctggcggcgcagggaggggcgcccggtagggcgggtgcgcagcatgagccccagccgcttgccgctccactccagccgggcggacgggcgggagccgggggcggggaacccggagcgccgccccgccagcgcgccccgcccgtgggagaggaggggctgcagcgcagcggaccactggaggcgcagcacggtcgccgccgccgctgtcggtgctggagatcgcggctcggtgcaggcggcgcccatgcctcctctcctccactagcccgcgcgccagtccgcctgccggggccggctctccgcctcctgcctcccgtcgcagccgcgcagccgccgcagagtccgcggcgccaccgctcgccctccaggtaggt

SEQ ID NO: 24992 - DNA, 2300 bp, Homo sapien
tctttcatagtcaatattgctgaactactctttgctatcaatggaccacttgatgggtccacatggtatttcttacaatacagggtgtcttaaaacaggccagttcaatggtgaggctatagtggttgattcataattctgtgcaggaagggatgggactgtgctcactttgcttttctcccttcagaatttcccaggtgtgctgtgtagacttttttcagccactgtttctaaaattttctactttcattcattttaagggtgcttatatagagacctactgttaatgcacttctgcatctttcagtgaaggccagataatggagaaagtagtataattgctacttcttcagccatggccttttggctttggtgattttaatattttatgctagtgcaaagaaaaaactgttttgaaggaaaatccacatgcatcttctgctgcaggcattcagaaggatgcaatctatgccgccatcactgctgttgccttcccattagagaatatctaggccatctctctcaactcacgttgacagctctctcaccaaattttgatgtcctgatcatgaggtgatgctgaccatggttactgggtttgctgggtaacgtgatggtcatggaaggcacggcttcctcacttccaaaagggctcccaggtgtcagacaccagcaaagtgtttgaaagtcatctttctgtggcatgggaatgcgtaagattcctagatatttattcctgtaatgtttataactgagatgatagctgctatttattgggtgcctactgtgtgccagcctttgggcagcactgtgcatacactggatgcctaccctgtgacttgcagtgtcttgtaaggtagatattattatcctcattttacagatagaggacactgaggttgaaagaggttaatggtttgtctacgtgtcatagtaaatagcagatgagggttggtatgctggtctgtagagctgcaaaatttatgttcttttgtctgcaccatacaccatacccccaaagtaaaagctagctgacttgctctcagttctggaaaattacaaattgtctggtttgagtgtgtttttgaaaataaaataaaattagaaattggaaattaacttgagtgtgctgtaagggtaacaaagaaattatccctaagattgtaccatatttaagagtgctataattttttcttttttatttcactcatttctacttctctatatccacagaagattgtggtaaagaatgctttgtgatatgttcatttatcaatttgaaatttctgttatttttgtcatttgacattagctttcatgttaattcagaaggccatatatacaagcttgactcgagtaaaatcttgtcaccttccaactccaacccttagtgactgtgtgcctctcttaatctctatatccctttatctggtcagtcaggcagatcattaaatagtcattattcaaaggcttgtgaagatggaatgcaataattcatgtaaagcatagagataggaatgtaaaaaccagtaactattaactgccattgtcatcattatcatcaacactatcctacagaagttactagtaccactgaaatagtgttgctacgttcaaagtagcagctataactagaagagatacatgcgagatagctgaaagcttgaagaacgtactttagaaattcctaaattattttggatatttttctttgaaaatattttgggtaatctgtgaatataaaaatagcttagctaagatagttaggtgaacaatttcaatggagttaacattcagagagcagtggaccaattctctttactactgtcctaaatttatagaaaaagtgagtctgtaaagaaatttgtagcctcagtctaaaacatttccagcaatgtctttatatctttgtaatgaaatttaagtaagtaaatgacaagatccctattcaacagatctcctggactctcattttgagaatcacgtttctctccgcgtgagttgcaccaaaccattcagctattattaagtgtctcattgtctgtctgtttacctatgtctttgataccaagtaaactagactacagtcatgttggcacatttccacttgctgctcaggaggtattgagatcaatgaacactaacctgaggagcatatttttaccaaattaaagagctacagtgaaatatgtgttccaggttcctggttttaagctaaatatgcatcagttatctctgatcaggggaaacagagggcgggtaagtacttccaccttctctgtgtgttctaagttccttaa

SEQ ID NO: 24993 - DNA, 2300 bp, Homo sapien
aaaaagggcaaatccattcagactgtactaggattatcttggaggagaaaaaattgccaaaaacccctctctttttttacccttagtgtagttcagaaataattttcaacctctttgattaatggtagaatgcaaacatttgctaactagagatgcaagcatattactaagcccacttaaattttccagataattcattattcatagattcagtccactggcttctgtaatggacatgaacattttcaggaattgtctgtggtatccagggaaaattcagaagtttatattcacggtgaaaaattccctgtagacctgtatagagctccttacagagtcactgtgatcatttctcactttgaaaaacatcccaatgtggttcattcaggggattgtagcttcaggtcctcagattcctcccctgttaagaaaaatcatggtgaaaagactccatccccattggattatgtataaaagaatcttggtaggttaacagtatggaactagagctcttatctccttaccatttaatgtgactgactgtggccaaatgcactgaatccagatacattaaaatgatcaaacatattgattaataaatgccaagcaacattagacccacatttgtgaatgttttatgtaattcaaaatacagacagtaactgggggtgtttggttcttgcagcgtttttttgtcctggataatggaatgttaaagtattcaaaggcaccactcgatgtaagtagcacacaggacatgtttcaaaggttgatttcgaattctgcttgaagtgagtaaacactgtaattgtacaagccttgtgccatagttaccagctttgtgcatgtctgggcctgtaagatttcacaagctcccaaacctccatgttctaaagtgtgtcaacctagtgcatgaagatttaactattttgatgtgtgttattaaaaacagaagcttaaaccttaaaagtgacgcatgagtaaaatcaccttctgtcacttggatagaaaacgcaaatgggcttttttcctccatcttccaataaactctgctttatgtgtgctgctctgttcttgtcaatgtccttttaaaaactatcttacaaattttatttctacgtcatacatctttttatcttggagatcccaattcacaaaaattatttcaaattgtttttgtttagtatacaaaggagtagtttgcatgtaacactggaaaattccttccttcatcattgtggtgtaggggaagtaactgaaggcttaggtttcagttttgtccccatccctgccattgaatcagccatgtccttgatcagtggagcagccagaaggaagagctggctgctccttgctttctggtcccagctgccctgttctgccccagcagctgtctgccagctgattactcagggatgttctgggttatacgtcaaagattgaccgcagttattttaggaccgctaaagatgtccttttgggagaatataagctgtgcaatctagaattatgaagaattagtattacattctatgccaaaacaggaataagatgaatagtcttatttataaaaattgacgtgaagtcactgcaacatcaactgtcctagaacctaatccatagaaccttaactattttctgtttgttaaggaggtatatgtagtattccacttcccatagataagttaaagattactttgagttcacttaaatacagtacagaaacatcaaatcatatatcctttcagcctatttactagtcttttgatttcagattcagaaaggaaaggtccatgggagcatagatgtgggactctcagtcatgtcaattaaaaagaaagctcgaagaatagaccttgacaccgaagagcacatctatcatttgaaggtgaaatcagttttcaacagtttctctgccattatcaggggaaacgatttgcctacaccagtggtaggcaggagagttattttacaattactttctcctctcgttcattgttttaggtgaaatcccaggactggtttgatgcatgggtctccaaactgcgacatcatcggttgtatcgtcagaatgaaattgtgagatcaccaagagatgctagttttcacatatttccttcaacgtccacagctgaatcctcaccagctgctaatgtttctgtaatggatggaaaggtatgactttgttctataaaaaccagcctgaaaattgcttagaaaattatgcaaattttggccaggcactgtggctcacgtgtgtaatcccagcactttgggaggccaaggcgggtggatcgcct

SEQ ID NO: 24994 - DNA, 2300 bp, Homo sapien
tcctgagtagctgggactataggtgagcaccaccatgcccagctaatttttgtatttttagtagagatggggtttcaccatgttggtcaggctggtctcgaactcctgacctcatgatctgcccccaccttggcctcctaaattgctgggattacaggcatgagccaccatgcccagcctaggatggtaaattttatgttatgtgtactttaccacaagtaaaatttttaaataaaaaaatgacatctatatccatgttgtaccattgttaatttccttgttttgatattgcactatatttatgtaagatgtaaccactgaaggacttggtgaaaggtacagggacatctccatactacctttgcaacttcccgtgaatctttaattagtttagagcaaaaagtgttaatttcatgtttgtgttaaaaaaaaaaaaaaggaagttatagactgccaatctcttggaccaggataatagaactttatgaacacagagattaaagcctatttaaccacagtttgcccatgatggtaactttgatcagaaagaatctcacaagctgggacccaacaggaccaagtaatccatgtcatgattattacacgttatcagccttccagggaagtggaatttacaagctttccctttggcatggggcccaggtgatggcctcctattgagcagagtccccagcaataattaccctgcatgtcaaaggcctcatttccccaaaacagtaaaccataaaatgtagcccatattctctccatgtatatcactcaatatcacaccgtagaggcatataactgataatattgcctctggcccatgccaaattgcaagtggtagattttttttttccttccgaattaagaaacacaagatttaccccttttcttggaaaagtgttaagagtctagcacccccaataactagggtctacaaatgtctaaaagttattaatcttggtctgtcttaactaccaattctcttaatttgggtaacctcaattttgttgttgtttttttttttttgagacagagtctcgcgctgtcgcccaggctggagtgcagtggcgccatctgggctcactgcaatccccgcctcccgggttcaagcaattctcctgcctcagcctccctagtagctgggattacatgtgtgcaccatcacacccagctagtttttgtatttttattagagacggggtttcatcatgttggccaggctggtctcgaactcctaacctcaggtgatccacctgcctctgcttcccaaagtgctgagattacaggcgtgagacactgcacctggcctgggtgacctcaaatttttaaatgaagggattggaggtaacatctaggattttatctagttctgtcttctatgattcaaaccccaaattctccactgcaatgactgcttctggaataaatattcctggttgcctgtctctgaaaaaaagctctcacataaggctaatgagaggcgaaactaaggcaggatctctcctttcaagaccacatagtcagggttgtttaataagcacacaaagtagagacatatttacccattcaccatgaaaaaacacccctataaaaggcccaatacctgggcttaatagcttcatttcttgtgtgatcttgcagtgtacatcaaaaaattaacaaataacatccagtgacatgatcttggctcactacaacctccgcctcccgggttcaagcgattctcctgtctcagcctccctagtagctgggattacaggcatgcaccaccacacccggctaattttgtatttttagtggagatggggtttctttctccatattggtcaggatggtctctctcgaactaccgacctcaggtgatcagcccgccttacgcctcccaaagtgctgggattacaggcgtgagccaccgcccctggctcccccaccggcaatttctaaaatgtatcggtctcctcccaagcccttgttccttcatcccccacccggggcagattcagacaagcatttattttagttcctaagccgcgcggtgctcccagcttccgcgcctctgggcggcccacacccctccccatcctctcctccgcgccgccgtcttcgttgctcttgggtggccgcggcgcccgctccctctgaattcgccgggcagggatacagccgcccggggcctcttgctcgtgcttggttttccggaccttgcttcctaaagggtctttaggggttcccggactcctccgcctgggagcctctatccgcctgggagcctctatgcgccccgcaaagcc

SEQ ID NO: 24995 - DNA, 2300 bp, Homo sapien
gggaggcggagattgcagtaagctaagattgtgcccctgcactccagcctgtgaaaccctgcctcaaagaaaaacaaggccaggcatggtggctcacacctgtaatcccagcactttgggaggccaaggtgggcagatcacttgagtcaggagttcgagaccagcctggccaacatggtgaaacctcgtctctactaaaaatacaaaaaattagccgagtgtggtggcacgctcctgtaatcccagctgcttgggaggctgagacacgagaattccttggacccagtaggcagtggttgcagtgagctgggatcgcgccattgcactccagcctgggcgacagagcaagactctgtctccaaacaaacaaaaaaaagacatgccaaatgacatggcaggtattgggttctcccccactggtgatggccatgctgtttctgtatagcctgaaggtgaacccaaccattaagtacatttgtagaaatgaggggtatggagtgtcctttctgcatcttggcactttgtcagcaaaaaaagctaacaaactttactatatttgtgcttcttgacagataaaatgggaattactaagctgtaatcaggcctaaagtggcctgacttaatacagagactttctcacttctccatcacaattatttgggtagcttcggcatgcagcattgtaagtgaatactcatatctcatcagcctatgtaaagcttgaaattctcacagttggaaaaaaaaaaccttgaggaagtggcaataactaaacctcatttgtcatggaaaaatgactccagttgcctaggtggtactaaccttgaaatgccgcttattcagttttaagtactgacctgctaagtaactagtaattccagactccctagaagaggttgttctctttttccctaatcataatccccacttgctaaaaccaaattcatctaagccatctattttctgcaggatacatgtaaatcttagaggattatcccagcactgagcagatgatagatcaaacagatctctcttcatagttctgtggatgaaaaaacagtatttacacataatctgtattattcacattgccaggctaaattttctggatcattgttactcttctgttttttgtatagttgtaacagagtattctttaaatacatttttatggcatgcctattatgtacaaaacaccacaaagcttatgtaggtaagtgatacataggccctacctcaaggagcttactgtctgaacaggggagaggtgtggtgaaggatggacaaattatatgtatttgtaagagtatataatttatggtaaaacaatttcaagaaaggattaaaccatgtgttataatgtttcaaagaagggagagattataaaccactggggtaaaaggataggcttcttggaggaagtgacatttgagatatatcttggatgaccgatcagattcccatagaagaggtctgagaaaagggcattccatgtagaaggaatgacaagagcaaagacatagagagttaattagaaaatgcttgtcatttatttcataattcgggggaaattattttgttttataacacttttaaaaaatatttagctttgcagttcctgaccccttaatgcctgacccttccaagcaaccaaagaaccagcttaatcctattggttcattacaggtaagttgtacagttctttgcctactgatgaaatatataataagtttgtaatgtcagaggggctaacacaaggaattaatattttaaagacaagatagtgatatattttgttttccaacttacgatcattagattaacagagctaacttgaaattattttcctatttatgttctgggttttctttcatatacagtatttgcctttggcttatagaattctcatttaagatcaacaggccctcagtgcacatgggtaaagtgttttatactttaagaatagttcttgctactcttgtgacaaatctctttctacttctgttgagacagaagactttatagagagcctaaatcaaatcagtgaacctaactgaagaaaaggagtctatttgcttattctaccaaaaaaaaaaaattttatctatacacacacaaacacacacacatatattcagctttgaatttctatatgcagaatatccttcttgcagattatccatgtgctctgttaggccatttccctccccattattcagccagtcctttggtctccttttcctgcacagtgagcttttctatagttttcttcaccttctgtcccccactttatgcaagtc

SEQ ID NO: 24996 - DNA, 2300 bp, Homo sapien
tcttactctgaagttgggcacacagactctctctctttgaaatggagtcctgctgcatctttttgtttcattattatcccagctacttaacctttaacaagagctatataaagttctggcctgtttttaagtaattttgtggcaaaaaatgaattttacctgagtgctgaaatgttttgccataggtgttatgcggagttcatatattgtgaaatactgactatgtagcccttccaataagatatccattaaaacagtgatggatagtaatctatatacatacatatatagacggagaggaagagagaataggctctaattaaagcatcagatgatataatttgattagattctgaacatctttcacttgtttcaagcatccagggcttacatgctaacaaaacaacaaatcgcttttttttttttttttttttttgagagggagtctgactctgtcgcccaggctggagtgcagtggcgcgatctcggctcactgcaacatttgcctcccgggttcaagcgattctcctgctttagcctcccgagtagctgggattacaggcgcatgccaccacgcccggctaatttttgtatttttagtagagacagggtttcaccatgttggccaggctggtctcgaactgcttacttcaggcgatccgccagcctcggcctcctaaagtgctgggattacaggcgtgagccaccgcgcccgcccataaatcacttttaataatatcctttcgtacgaatagcattgtgcaagcaatcttccataacaccgagtaagcacaggggagcatttctgctagtgcctagcaagcccctggagaagcgacacgtcatctaatggcccaccaaaggtgctgcatcccaggcaaacgccattacaaccgactacccaggtccccggaaaggccttcgtttactcctaacgtgttttgctgggatgcactgacccagcgttccatctcgcgacgaaagcccagaagacaaaggagcccgcccggcgggagaggagcgggtgtttggacgtccccgcgtgttcctaaacacagggctcggggacccgaagagcgcaccgcagccccctggagcgtatatatccggggtctcaagcttcaggaccaggcccgggagactccctggaattctgccttcgtaattttagaatctttttcttaaagtgacccagcccccaatccgtcctccccacaaaggcttaactttaggcctcaacgaccctagacccacgccggacaatccctctaatccctctctcccggcaagaaacggcctcctgctaaggacaaagaactgcggcctaggggccagttactacaggctggtcagggccggcaggggcgggcgcggagaacccccgggagcccaatgcctgtgcccacgcgggagcggggcggagccgggcgggaagggggcggaccctggaagggacaggggcggagttgggccgggacggaggcccgcagaggagcagcgagggggcgtagccggagctacggcaccaaggctccgcccccaccctgcctgccccctcgctggagcaacgcaagcaggaggcgggggagtcggaggaggtggcggcgctggagctcctcccggggaccagcgacccggggagcgagcacgtcgctccgcaccgctcttcctccagccgctgagccgtcccttctcgccatgtcccagagcaggcaccgcgccgaggccccgccgctggagcgcgaggacagtgggaccttcaggtcagcgtgcgggcagtcagggccccagggccgggagcgttgggcggcagggccggggcgcggggagccggccctccagaggcattctgggtaaagccgtgcccggcgcccacgcctccgcggctgtgggtgctcggccccgccctctcggcggcgagggttggggtctgcggccgggccccgcccctctcgtggtccctggcggcgcgcggggcgggcggaggtgacgctcggtcggcgcgcccgggaagggatcgtcaggttttccctgagaggctgcggcgctgctgccagccctgttctgttgagaatctctcctacccgcattcaagtgctctctctaaagacctcgctcaccccgcctgctcctgcggagtgactgccgcagcggggccggaagacaggtgcgccccagcctcgccagctctggccctggcctccggggaactcggcgcctccctcgtcaccgtcggtggcggttaaaactggcctctacgcttctgcttcaatctccaatttggcatgcaaagcacacct

SEQ ID NO: 24997 - DNA, 2300 bp, Homo sapien
ccctgcctctgctcatgtgctcaggtaatgaattatagatcaacggtgtaaaatgatatgctaagagcatgtttaacttggaatggcaggctatagcactaaaatatacacagaaaactaataacgtaaaaatatgaccaatgtctatgataaggatcacagtagatagtgatttgccactggcaatgggccaattttaagggaagcatatagtgctgtgggaagcaatgcaatttaggcactaacgatagtcccggatacaatctacagtggacctagtccaaagggaattccttcacaagtccaccaccggaattttggcaacaccaaagtgctgttttgaatcctcatggcatacagctcattgattgagcatttcattcattttccatcttatatgcttacaaaactgtgtttaatattaaatataaattcacagatataaacaattatatgcaaatctttatttaaaaaataaagccacattacatataagtaactatataaactattacctagtggtttcttactctgaagttgggcacacagactctctctctttgaaatggagtcctgctgcatctttttgtttcattattatcccagctacttaacctttaacaagagctatataaagttctggcctgtttttaagtaattttgtggcaaaaaatgaattttacctgagtgctgaaatgttttgccataggtgttatgcggagttcatatattgtgaaatactgactatgtagcccttccaataagatatccattaaaacagtgatggatagtaatctatatacatacatatatagacggagaggaagagagaataggctctaattaaagcatcagatgatataatttgattagattctgaacatctttcacttgtttcaagcatccagggcttacatgctaacaaaacaacaaatcgcttttttttttttttttttttttgagagggagtctgactctgtcgcccaggctggagtgcagtggcgcgatctcggctcactgcaacatttgcctcccgggttcaagcgattctcctgctttagcctcccgagtagctgggattacaggcgcatgccaccacgcccggctaatttttgtatttttagtagagacagggtttcaccatgttggccaggctggtctcgaactgcttacttcaggcgatccgccagcctcggcctcctaaagtgctgggattacaggcgtgagccaccgcgcccgcccataaatcacttttaataatatcctttcgtacgaatagcattgtgcaagcaatcttccataacaccgagtaagcacaggggagcatttctgctagtgcctagcaagcccctggagaagcgacacgtcatctaatggcccaccaaaggtgctgcatcccaggcaaacgccattacaaccgactacccaggtccccggaaaggccttcgtttactcctaacgtgttttgctgggatgcactgacccagcgttccatctcgcgacgaaagcccagaagacaaaggagcccgcccggcgggagaggagcgggtgtttggacgtccccgcgtgttcctaaacacagggctcggggacccgaagagcgcaccgcagccccctggagcgtatatatccggggtctcaagcttcaggaccaggcccgggagactccctggaattctgccttcgtaattttagaatctttttcttaaagtgacccagcccccaatccgtcctccccacaaaggcttaactttaggcctcaacgaccctagacccacgccggacaatccctctaatccctctctcccggcaagaaacggcctcctgctaaggacaaagaactgcggcctaggggccagttactacaggctggtcagggccggcaggggcgggcgcggagaacccccgggagcccaatgcctgtgcccacgcgggagcggggcggagccgggcgggaagggggcggaccctggaagggacaggggcggagttgggccgggacggaggcccgcagaggagcagcgagggggcgtagccggagctacggcaccaaggctccgcccccaccctgcctgccccctcgctggagcaacgcaagcaggaggcgggggagtcggaggaggtggcggcgctggagctcctcccggggaccagcgacccggggagcgagcacgtcgctccgcaccgctcttcctccagccgctgagccgtcccttctcgccatgtcccagagcaggcaccgcgccgaggccccgccgctggagcgcgaggacagtgggaccttcaggtcagcgtgcggg

SEQ ID NO: 24998 - DNA, 2300 bp, Homo sapien
cctgcttgcgttgctccagcgagggggcaggcagggtgggggcggagccttggtgccgtagctccggctacgccccctcgctgctcctctgcgggcctccgtcccggcccaactccgcccctgtcccttccagggtccgcccccttcccgcccggctccgccccgctcccgcgtgggcacaggcattgggctcccgggggttctccgcgcccgcccctgccggccctgaccagcctgtagtaactggcccctaggccgcagttctttgtccttagcaggaggccgtttcttgccgggagagagggattagagggattgtccggcgtgggtctagggtcgttgaggcctaaagttaagcctttgtggggaggacggattgggggctgggtcactttaagaaaaagattctaaaattacgaaggcagaattccagggagtctcccgggcctggtcctgaagcttgagaccccggatatatacgctccagggggctgcggtgcgctcttcgggtccccgagccctgtgtttaggaacacgcggggacgtccaaacacccgctcctctcccgccgggcgggctcctttgtcttctgggctttcgtcgcgagatggaacgctgggtcagtgcatcccagcaaaacacgttaggagtaaacgaaggcctttccggggacctgggtagtcggttgtaatggcgtttgcctgggatgcagcacctttggtgggccattagatgacgtgtcgcttctccaggggcttgctaggcactagcagaaatgctcccctgtgcttactcggtgttatggaagattgcttgcacaatgctattcgtacgaaaggatattattaaaagtgatttatgggcgggcgcggtggctcacgcctgtaatcccagcactttaggaggccgaggctggcggatcgcctgaagtaagcagttcgagaccagcctggccaacatggtgaaaccctgtctctactaaaaatacaaaaattagccgggcgtggtggcatgcgcctgtaatcccagctactcgggaggctaaagcaggagaatcgcttgaacccgggaggcaaatgttgcagtgagccgagatcgcgccactgcactccagcctgggcgacagagtcagactccctctcaaaaaaaaaaaaaaaaaaaaaagcgatttgttgttttgttagcatgtaagccctggatgcttgaaacaagtgaaagatgttcagaatctaatcaaattatatcatctgatgctttaattagagcctattctctcttcctctccgtctatatatgtatgtatatagattactatccatcactgttttaatggatatcttattggaagggctacatagtcagtatttcacaatatatgaactccgcataacacctatggcaaaacatttcagcactcaggtaaaattcattttttgccacaaaattacttaaaaacaggccagaactttatatagctcttgttaaaggttaagtagctgggataataatgaaacaaaaagatgcagcaggactccatttcaaagagagagagtctgtgtgcccaacttcagagtaagaaaccactaggtaatagtttatatagttacttatatgtaatgtggctttattttttaaataaagatttgcatataattgtttatatctgtgaatttatatttaatattaaacacagttttgtaagcatataagatggaaaatgaatgaaatgctcaatcaatgagctgtatgccatgaggattcaaaacagcactttggtgttgccaaaattccggtggtggacttgtgaaggaattccctttggactaggtccactgtagattgtatccgggactatcgttagtgcctaaattgcattgcttcccacagcactatatgcttcccttaaaattggcccattgccagtggcaaatcactatctactgtgatccttatcatagacattggtcatatttttacgttattagttttctgtgtatattttagtgctatagcctgccattccaagttaaacatgctcttagcatatcattttacaccgttgatctataattcattacctgagcacatgagcagaggcagggaattatacagtggtaaactacttggtgaaaccatgctttgtatttttaagatgtataattatatttaaaaacaagcaatgcttaattttgtgcctgattttcctctttaaaaatggatttatctgggggttgcagttgatgacgttttgattttaatatgtttgctgctgctaccaagagctttgtcaagcaagttgg

SEQ ID NO: 24999 - DNA, 2300 bp, Homo sapien
ggacgatgcaaaacttctattttcacttcttcggtgctctcctctttcttttgtctctgagcagtaaaaaggccccacagataaaagaaaacaatgaatctgaataagaaatgcatggtttttggcatcggctccagcagaacactgctctccctcccgcgtgtcactcgcgccccgtggatgtcccgcggccgagttccgacgcgtggcaggcgttgtcctgcgtcacaaagggccggggcggggccatagatgcggccccgccctctcatggccccaacccctccgcctcccgcagcgggctcagcgcggttaacgctgtttctaggccctcgggctggctgtcctcagtctttaagatcgcaacgcacactcgctccgcttcttctcgctaaacccgcgtattttacagcaggtttcctcagggttcggtgacaacattcgcattttctaaaatgaaactggcataagacgaaataaacagcctgggatgtcgtagagtcagggaatatggttgtcatttctggaagcaaaaggcttctaagacccctagggaacgagcagatagatactggggggagggagaggcatgctggaaaaggagcgtaaaaaataggctggcggtggctttctgggtgcttcggaggtgtccttgaagcgcattctcaggtcggaatcttgcattcagaggttccaggctgagtcgcacaacctgaaggccagcccgatgcaacgaaactgcggtaccgcaactcctctgcctggctgcaggcgtttccgagagccgacctccacaattcagcatcctccgctggcttgcatttcttttccccgccactcggggccgcccttgattcgagggcctctggtagtgcggggaatgttcttttgacttttttgtaccatcccatgggatacgtaattgtccacatcagtcaagaaaacttgagtattgggcatgttgtcccaatctcacagctaatacgcagcagggatttggtcaaatctgtgtgacaacaccacttcaccaccaattttagtatgaaaacctttaaaatacacagaaagttgaattctacagtaaactctcctacacccaccatctggatcctgtcattgaactatattatatttattacatatccatccatcactctatccatccatcaattcgccttgtttccaagtgaatacccaaagactacccaaaccagaaaaccagcaaaggccttctgcattcgcctggattaagttctgggagtagaggtgctattctacctcggtgatgcgaagaaaagccgcagcactgagcctgattgatgtgctttgcttaaagtttgcaaaattccataaacctgaaaattactgtcgattatgcaagatgacaattgcgtccaagcaggagtttcaaaaatcataaaagctagggggaagtccccatttctagactaaaattccgaagtcgagttccatgttttatattctaaataaaattgtggctatccaaggttatcggcgtgatgacagttccttgggggccctcgccattccttgtcagaggaccccgtctgctgcacattgccttcctaggagataatttcagaccccttgaatatgaggaaaatacgaagcaaacagaaataggaaggcttttatgtatttttgaagaaaaaacaggattttatgtaaaataaaaacaggatttcatgaagaaacaggatattatgtatttctgaagaaaacccaggaaaacccgagagaactaagtgcccgcgggatgagtgtgcgggcagctcctccttaggtaggcaccggggctgcgcgcgcagcggagctcgaaggtcttgtcccccgggggcggtcagcctgggccttggcggccaaggggaaacttgggagcctcgggactgttggccaccggcccgtgggaggagtaaaggcggccctggctggcaggccgagggtgtgacgcgccggcccgccctcctcgcgcagcctccggctaggcggcgaggccgcaggccgcgcccgctccttcagccccgccgccggggaggggtttcccgggacgatccggcccctttcatccaggaagtgaaatcgacgtcggggtcaatgaaaacaaacggggagcccagggggaaggaaggcaggcgaggaagaggcagcgccggggcgccggagggagcagccgggctgcggaagcgcgagcaggaggccggtcgcgggcgcatttttgccgttgtcgcggccgccgccgccgaggcttacccgggaatgtctgggcccgcgcctcgcgg

SEQ ID NO: 25000 - DNA, 2300 bp, Homo sapien
cgggcgcagcgtggagcttgggggccgcgaggcgcgggcccagacattcccgggtaagcctcggcggcggcggccgcgacaacggcaaaaatgcgcccgcgaccggcctcctgctcgcgcttccgcagcccggctgctccctccggcgccccggcgctgcctcttcctcgcctgccttccttccccctgggctccccgtttgttttcattgaccccgacgtcgatttcacttcctggatgaaaggggccggatcgtcccgggaaacccctccccggcggcggggctgaaggagcgggcgcggcctgcggcctcgccgcctagccggaggctgcgcgaggagggcgggccggcgcgtcacaccctcggcctgccagccagggccgcctttactcctcccacgggccggtggccaacagtcccgaggctcccaagtttccccttggccgccaaggcccaggctgaccgcccccgggggacaagaccttcgagctccgctgcgcgcgcagccccggtgcctacctaaggaggagctgcccgcacactcatcccgcgggcacttagttctctcgggttttcctgggttttcttcagaaatacataatatcctgtttcttcatgaaatcctgtttttattttacataaaatcctgttttttcttcaaaaatacataaaagccttcctatttctgtttgcttcgtattttcctcatattcaaggggtctgaaattatctcctaggaaggcaatgtgcagcagacggggtcctctgacaaggaatggcgagggcccccaaggaactgtcatcacgccgataaccttggatagccacaattttatttagaatataaaacatggaactcgacttcggaattttagtctagaaatggggacttccccctagcttttatgatttttgaaactcctgcttggacgcaattgtcatcttgcataatcgacagtaattttcaggtttatggaattttgcaaactttaagcaaagcacatcaatcaggctcagtgctgcggcttttcttcgcatcaccgaggtagaatagcacctctactcccagaacttaatccaggcgaatgcagaaggcctttgctggttttctggtttgggtagtctttgggtattcacttggaaacaaggcgaattgatggatggatagagtgatggatggatatgtaataaatataatatagttcaatgacaggatccagatggtgggtgtaggagagtttactgtagaattcaactttctgtgtattttaaaggttttcatactaaaattggtggtgaagtggtgttgtcacacagatttgaccaaatccctgctgcgtattagctgtgagattgggacaacatgcccaatactcaagttttcttgactgatgtggacaattacgtatcccatgggatggtacaaaaaagtcaaaagaacattccccgcactaccagaggccctcgaatcaagggcggccccgagtggcggggaaaagaaatgcaagccagcggaggatgctgaattgtggaggtcggctctcggaaacgcctgcagccaggcagaggagttgcggtaccgcagtttcgttgcatcgggctggccttcaggttgtgcgactcagcctggaacctctgaatgcaagattccgacctgagaatgcgcttcaaggacacctccgaagcacccagaaagccaccgccagcctattttttacgctccttttccagcatgcctctccctccccccagtatctatctgctcgttccctaggggtcttagaagccttttgcttccagaaatgacaaccatattccctgactctacgacatcccaggctgtttatttcgtcttatgccagtttcattttagaaaatgcgaatgttgtcaccgaaccctgaggaaacctgctgtaaaatacgcgggtttagcgagaagaagcggagcgagtgtgcgttgcgatcttaaagactgaggacagccagcccgagggcctagaaacagcgttaaccgcgctgagcccgctgcgggaggcggaggggttggggccatgagagggcggggccgcatctatggccccgccccggccctttgtgacgcaggacaacgcctgccacgcgtcggaactcggccgcgggacatccacggggcgcgagtgacacgcgggagggagagcagtgttctgctggagccgatgccaaaaaccatgcatttcttattcagattcattgttttcttttatctgtggggcctttttactgctcagagacaaaagaaagaggagagcaccgaagaagt

SEQ ID NO: 25001 - DNA, 2300 bp, Homo sapien
tgcccaatatttgttttaaagagatattgaattgcagtactgcaggcttgcaaaatcataatttgtcctataggcacactagacctgggtggaggaatgtattttcaccaccccctgcttataatttgtttggcaaggtaaattagtgtttggaaagataatgtttttatcatttccatgcatgatcaatacaatatactctcaaagatatattgtatgtctatactctcatggttaataggaaatatctgcagggtgtgatggcccacatctgtaatcctagcactttgggaggccaagatggcaggattacttgagtccaggaatttgagaccagcctgggcaacatgatgagacttcgtctctataaaaaattaaaaaattagccaggcatggtggcacttctgtagtcctaactacttgggaggctgaggtgggagcaccttttgagcctaggaggttgaggctgtggtgagccatgttcatgccactgcacttcagcctgggcagcagagtgagatcctgtctcaaaaaaccaaacaaaacaacagcaacaatccctgaaatatctcacttttggggtattcattcattcatttatttattcagtcacttgagaaatagatttttttggtacctcttatgtgccaggcaccattctagttgctgggaatgcagtgatgaacaagataaagtccatgtaccaaaataacttaccttctaatttgtttaggtctcactagggaatactctgttgtttcataaaaaggaatcttccaggaacctgaaagttgctggtttttagttgctttagatatctctctttctgaactgtattactgcattccctgccttcctaaacagggttacaaagtaaaatttaatctttttgatgactcagtgttgtcatttcaaaagtgttacagataaatccttttggggaattaagtcctggatctgtattaaagtgtaaggatgactgacccatctcccctctcggcactatctgaccctggaaagatcaaattgatcatgtggcaggctatggcaaaagtgaccgggatacgaacatccatggtttaaaatgtacattttagccatgaatatttgtgctgaattgttatttaatagtcatggaaagaacaaggacagtcacactgctcccagcatggtcaccatgttaatagtcagtgaactgttgtaaattagtagcatgcttgataagactccggggaacaccaagtttggcttcaaagaggagtgggaattgggtgccaaggaaagtcatcatccttgtcgtcagctttggcatggagccaagtctgtgatagatgtgagctctagtcactgaataaatatcaatcgaacaattgcagtttctaggatttcaaccctagctgtgcaactgcagacaagggaagagggggtcatatggggaatctgtgttctcaccatagggtatgtagcttctatttaagagactggaattcatttagcactcattgtgtttaagggagtttgcttagaaatatgtattttataagaggcacattgcagaattagagggctaggtggcacctgagaggtcatcttgttcaacctacacattttagggactgggaattttagagatttattgaaatgaaaagatttgtccccagggtatgattatccattaaagaatgatactataggtaaggctagaacccttgtcttctgtggcttttcccataatatcgtaaccccaactctgttcctttttaggaaaagagggcagttatgctatacccggtttagggctattactgaggatgggccttatgggttgttaatgagaacactgtgagctagaattagaagtattactccccgtgtttttgctgctctggagcttgctccagaaacctctcccaataaagtggagactgatgcaaaaacatttttggtaaggcttggtgattgaaaatttcattatcggaatgttatttgagagccaagaaataatgtggatggcaggttttgaaatcacagttttctatgtggtgaaagtaatgtgtttccaattgaccttttgttatttatggtctttttaggctggcagcctcgttggtttgttttagataatggaatcttatcctactatgattcacaagatgatgtttgcaaagggagcaaaggaagcataaagatggcagtttgtgaaattaaaggtaagtgaatatacagaattagaggaattggaggttagatagtcaagggttcttcagcatactccagacgaggaaaaaaagcatttctaa

SEQ ID NO: 25002 - DNA, 2300 bp, Homo sapien
cagatattacattgtgttaatttctttagctttattctctttgtatctgatagccaaagtctcctaactttagttctttttcagtactgtcttggctattgtaagccctttgcatttccttacagattttagaacttgcttataaatttccacagctatctgctggaatgtttggaattgtgttgaatctacagatcaatttgaggagaattatattcttgatgatattgagtcttctgttccattaactctgtttaattagatatttaatttctctcagtaatgttttgtagttttgtgtttagaggtcttgtccatcttttctgatgttttggaagcatcatttttaagtttgttgccttttcaggtgacaactttggaggggaccacccttgattggatgcataaattctggtatgtttaaaaatgagtcatcttattttagtttcatcttgtagcaacatcattagaaattagagcattgctttcttttaaagtaggtattggtgctttcactagtattggcaagtagcaaggaagagttactcttatagctttaggagttcagtagttttaccctagcctagaaatcttttgcattcataattgattgttgcatggttgtatgtttcagtgtctgcaactaagaatgacccatataagtagaataataagatagcaacatttctgtggcacttacttgccataatacactaaacatctggtcaatatttatagcaattaattatttaagttggggcttctgccagattttgctgggaccctcataatttggctcctcccagcttgtccattcatgaatatgaatttgttttcttttcttttccttcttttttttttttttttttttttttgagacagggtcttgctctgttgcccagtctggagtgcagtggtatgattgtagctcactgcagcctgtactgggctccagcgatcctcttgcctcagccttccgcctcccaagttgctgggtctacaggtgctgggagtacatgcttgcaccactatactggctaaacgagtatgaatattactttgcattacaatggaagcctctatttatgcttgtttcctaatattctcagtacattctgtgtttattttctcatttaagcttcttctcattcattttcttaaccaaatcccgctttcatcaaacccttcttcttgaagcctttttaaattactttctctcataattacacaagaaatctctgcaccaaagagttaaacatatgtgtattctgattgtttttggtgtgtcagtttgtttcttggttaaattgtcaactgtatagaagcaaagacaccttttttcttcccctctatcttctcttctactagcactgctctgagctgagtaaatatttgttgatgaatgacagcttaacacaaattttgttttacaacaaagacttgggattggctcatcataattcctgattagctctcttttctcagagcatcaaaggaggtgtgtgtgtgcaggagaagaggtagaaagaggggaagagatgaatgtcttcaaaatatacatgccttccatgtgttatgctatgatccataattaagggcatatcatagagttacttttctgacagaaggtggctgtagttgtcatttattacattccttctatgtgtcaggcactatatatgaaaacaaagactttgttttcaaggaaatcagtaaaaaatatgtgatagtgtaacattcattgcagttgtatttaataggataagtggccccaaggtgggggagggctgtcacttctcagtagttagtatgtccctgttttctttttcatactctgtcatcgctttggcaccattgttaccccgggtctatatgagaatgttgatttggggagtgccactgggtggcccctcagggagcagcactgcctgcatcatgaatgatagttcaatgtttttggtatatgaagcatctgatactgtgtgattagatgattatttgattacccttaaattacttaagtctataactgtatttcccctttgtttatcatcatagttcattcagcagacaacacaagaatggaattaatcattcctggagagcagcatttctacatgaaggcagtgaatgcagctgaaagacagaggtggctggtcgctctggggagctccaaagcatgtttgactgatacaaggactaaaaaagaaaaaggtaactataaacttttcccttgtggtgagagtactttcttaaatataaatataaatgtaactaaattagcctgtccacttttagta

SEQ ID NO: 25003 - DNA, 2300 bp, Homo sapien
cataaaatttactattttaaccacttttaagtattcacttcaaaatgtgccattaagtacattcgtatttgtaaaatcatcaccaccatccatctccagaacgtcttcatcttccccagctgaaggtctgtacccactaaacactaaccctgtttccacctccccctgggccctggaaaccaacattctattttctgtctgtataagtatgactgccctgggtatttcatataagtggaatcatagactatatgtccttctgtgattagcttttttttttttttaatcattattatactttaagttttagggtacatgtgcacaatgtgcaggttagttacatatgtatacatgtgccatgctggtgcgctgcacctactaacttgtcatctagcattaggtatatctaccaatgctatccctcccccctccccccaccccacatgattagctttttttacttattgtaatgtctataaggttcatccacagtgtagcatgtgtcacaatttgctttttaaagctgagtaatattctattgtatattttgtttatccattcctctaccaatgaacatttgggttatttccatcttttagctattgtgaatattcattccttcttatcctacctgtagctatattctgtaatgttttcatatatttcaaaattgttataaattcaatcctcagccttcatttctcaatacctataatttacttgctttcactaatgtaattaatttgcatttaattatataagtaatacatacttaataaaaaattttgaaaaatagaaaaaatatagaaaagaaaaatcaaataactgtactatggtttgaatatcgtttgtttccagcaaaactcatgttgagtctgggtccccagtgtggcagtgttaggaaagtagtacttttaacaagtgattaggtcgtcaaaggagtgagtgagttctcaacctcttgggactagattagttactatgagagcgggttgttataaatcgaggctgcctcttgggtttgatctctttccgcacacacccgctttcccttgcttcctccgccatgctatgatgcagcatgaggccctcaccagaagccaactagatacagctgcccaatcttgaacttccagcctctagggccatgagtcatacctcttttctttataaattacagtctcaagtattgtgtcaaagcaacagaaaatgaactaagacaaactataatctcactatcaagaaattgtcattttcacattatatctgtatatagttgaactaataacataaatcatttgctttgctttcagtttctaaaaatctttttgaattggcaatatgcgtacatggtaaagtcaaaagataccaaagggtatatacagtgacaactgagtctccttcccacaaattccacttccaaaggtaacaatctgaccaattcttacatacctttcctaagccagccaatgaatactaacaatacacataattctgaatcctgcttttttcaatgatcatttaaccctgggcattttctcacattgaaattccttttcaacatcttactgtctatatatcagccagtgaaagcacgagtttaggctgggcgcagtggctcatgcctgtaatcccagcactttgggaggccgaggcgagcggattacctgaggtcgggaattcgagaccagcttggccagcatggtgaaaccccgtctctactaaaaatacaaaaattagccaggcatggtagcaggcacctgtaatcccagctactcgggaagctgaggctggagaatcgcttgaacccaggaggcagaggttgcagtaagccgagatcgcgccattgcactccagcctgggcaacagagtgagactccatctcaaaaaaaaaaaaaaaaaagaaagaaagagtttattgagccattcccctaaatttatagcttttacaaaatgtttactatgataaagatatacgtaaatctacatttctaattatttccttgggatagatactaaaagtggacaggctaatttagttacatttatatttatatttaagaaagtactctcaccacaagggaaaagtttatagttacctttttcttttttagtccttgtatcagtcaaacatgctttggagctccccagagcgaccagccacctctgtctttcagctgcattcactgccttcatgtagaaatgctgctctccaggaatgattaattccattcttgtgttgtctgctgaatgaactatgatgataaacaaaggggaaatacagttatagacttaagtaa

SEQ ID NO: 25004 - DNA, 2300 bp, Homo sapien
catcttgaagagcagagtttgggaaacattgacccagaggtaccaaaatgcataaaggcaagttttcatattttataaccttagaataaaaacccatgggccagtctattttcaaaagtcctacttaagtagcagtcactattttctcctattacaaggaaatgactttctctacctgaatttctcaaaattacgtttggggcagagtaaacaaaactgaaaattactttttctttctggagcacgatcataaaacaatcttcttgaatcagtcaccatggagatatcaatttaacctgttattttatgggctgtttctggtttaacaacctctatggttcatcgtttctggtttaacaacctctatggttcatctacataatcagctactattggatagagaaaaaatctgtcttttcagaaattccctcagaacacttactataaagaggtgctgttccatgtccgccacatctagggtgacaggttggattatgtccctccctaagagatgttggactcataacctcaagtacctcaggatgcgaacttatttggtgataggctttatagaggtaattaagttgaagtggagtaactaggatgagcctcagtagtatgactggtatcctaaaatggagaaatttggacacagacatgcaggaaaaatgtcgtgtgaacatgaaaatagccatctacagaaaaggagagaggcttaggagagattcttccctcagagttctcagaaggaaccaaccctgccaacaccctgattttggacttccaacctccagagctgcgagacaatacatttctgttgtgtctgccactcgatttatggtactttgttccagcagtgctagaaaatgaatacactagtcccctctgatctgtggtttcactttctgctgtttctgttacccatagtacagtacaataagatatatagagacagagagatcacattcataaaacttttattatagtacattgttatattctattattgttgttaatctcttactgtgcctaatttgcctaatttataaattaaactttttcataggtatgcgtattagtccattttcacgctgctgataaagacatacctgagactgtgtcatttataaagaaaagaggtttaattgactcacagttccacgtggctgggaaggcctcacaatcatggcgaaggcaaggaggagcaagtcacatcttacgtggtgtcagggaagagagaaatgagaaccaaacaaaaggggtttccccttataaaaccgtcagatcttgtaagacttattcactaccatgataacagtatgggggaaacggctcccatgattcaattatctcctaccaggtccctctcacaaggtggaaattatgcgagctacaattcaagatgagatttgagtgaggacacagccaaaccgtatcagcatgtacgtataagaaaaatcatggccaggcgtggtggctcacgcctgtaatcccaacactttgggaggccgaggtgggcagatcacgaggtcaggagatccagaccatcctggctaacaaggtgaaactctgtctctactaaaaacaaaaaattagcctggcgtggtggcaggcgcctgtagtcccagctacttgggaggctgaggccagagaatggcgtgaacccgggaggcggagcttgcagtgagccgagattgcgccactgcactccagcctgggtgacgagtgagactccgtctcaaaaaaaaaaaaaaaaaaaaaaaaggaaaaatcatagtatttgtaggattcagtactatccacagtttcaggattccactgggggatcttgggacaggttgcccaagaataaaggtggcctgccgtacatctaatgagtaccagtgagacctaggctaggtcccctctaaagtgctgcttctctagtccctagcttcaatattctgtactgtggtccctaacagaataatgattgctggtatttattgggtgctctgctaagcgctgttctgagttttacaagtagtaacttgtctaatcgtcacaataatactgtgaggttgctgctgttattctcattttatggacgagaatgtcaaagaatggagaagttgggtaacctgccccaggtgaagtaagttagtaaacagcagttcctagatttgagcggggccctcagggttttgaatgcagacatgtaattgcaacatgattcggctgatcatgtagccagggtgtggggtttataaaatagacgtgaataaaaaaaaggggcaggatgacagtgaagcttgctcatg

SEQ ID NO: 25005 - DNA, 2300 bp, Homo sapien
ttgtatttttagtagggacggagtttcaccatgttggccaggcaggtctcaacctcctgacctcaggtgatccacccacctcggcctcccaaagtgttgggattacaggtgtgagccaccatgcctggtctaaacacagactttgatgatgatagtattagcagcagctaacatttattgaggaattttcatgaattctttcccttagttctcacagccctcatattagccatcttatagaagggaaactgaggctgagagtgcttttgtaacttccccgttagggatggagtgggaattcagacagacagacttcagagccctctctatcatggttagtccaaaatgcgtattcttcaccattctggaaaataagtggcacattcaactcaacaatgttttgaaaattaaaacgtcatgagagtcaggtatcctgtgacactttacctaaaagatctccatttgctaagagaaaattgagccactgtagtgtctgggcaaaagtatccacttccatcttcatgctgagaatctcagggctgttcattatttatgaatcaggctttgtggatactgaatcagtgtttatgagagtataaagcaagtcgaatttagttatctttcttgataattccaaacagcatggcagaaaatctgtccagtaattatgtagctctgtgggtagagaattcagactttaagtgtctgacatgaaccatccacacttggatatcagtgaactgggatgggaaaagaaaaagaataggaggtgcgtagaagaaaaggaaagaaaagctaaagtgaaaggaaatgttttaacagcttcttccatgatgttctcactaccatatcccatttcttcactggaataaagcaactaatggactttaaaacacatgtaaaaggtgcttaagtccctgcacaactcacagtctttctaccccatctgagatagaagagtggcctataaatttttaatttttaaataataattgcatagaattataatgatggtgtgtgtgtataatttaataatggccaatgaccttactttaaggttggtgcaactatttttttttccatccttataatattttaaatatttctcatctgtttttcttgcaggtggtcctgtaattgatttgcctctagaatatacagaagttgtcaaatacagagcaggtacatctgtgaagctcagagctggcatttctggcaaacctgcgcctactattgagtggtataaagatgataaagaattacaaaccaatgcactggtgtgtgttgaaaataccacggacctcgcatctatactcatcaaagatgccgatcgccttaatagtggatgctatgaattaaaactaaggaatgccatgggctcagcctcagccaccatcagagtacagatccttggtaggtgctgaatacagaccactgtcatattacatttgcctaaagcttagtaattttgaacaagtaggctttaaagaagtactaacatcgtgttttgtcctttcactgatagacaaaccaggcccacctggtggaccaattgaatttaagactgtaactgctgagaagatcacccttctctggcggcctccagctgatgatggtggtgcaaaaatcactcactacattgtggaaaagcgtgagacaagccgcgttgtgtggtctatggtgtctgaacatttggaagagtgcatcattacaaccaccaaaattatcaaaggaaatgaatacatcttccgggtccgagccgtgaacaaatatggaattggcgagccactggaatctgattccgttgtagccaagaacgcatttggtgagacatgatttcattagaaaactgaaacgtgaaaaatttaaaaataaactacgctaacctgtgcatatgctttaattttcttttatataacacctgtctcattaccatccttttcacaaggtgaaaaatataaaaaataaaaccaatgttcttggaaagaatgcgaacatcaaaggtataatttatcagtaatgtggattcttgtaccttgttttcccttcctttctaaatagttacacctgggccaccaggcataccagaagtgacaaagattaccaagaattcgatgactgttgtatggagcaggccaattgcagatggcggtagtgatataagtggctatttccttgaaaaacgagacaagaagagcctaggatggtttaaagtactaaaagagactatccgtgacaccagacaaaaagtaacaggactcacagaaaacagtgactatcaatacagagtttgtgctgta

SEQ ID NO: 25006 - DNA, 2300 bp, Homo sapien
cgcaggcttttcttttctctcctttctacatgatatcctgtaatttcgctgccaccatcatccactggccttttccagctgacagtggcagtgttcttagtgacatttgatacctctggtttttcaggagggccagggggacctgaaaaggaagcaaatttattagaaatccatgatttcctaaactctgctataaatgtttccatgtcaattccctcacatgctctacataccaaatctgtctaccattttgacaggttcagactgtacaggttctcctttgccatagtggtttacagctgagacccggaagatgtactcatttccttggataagtttggttgccacatgcctgcaagactgaatatcttcagaaaccactgtccacaaaagtcggctggtttctctcttttcaagtatataggacttaattggtgagccgccatcttccaagggaggtgtccatgtaagtgttgctttttcagcagaaacattactgatttcaacaggacctgggggaccaggtacatcaaggactgttaccttcacatgttccaccttcgtgccaaaaggattggtagcagtgatggtatattcacccgcatcttttctagtggcatacttgatagtaagcatggaagatgttggggttgaagttatctgagtgatatctgatggtctaatgtcttttcctgccttggaccaacttgattttggaaggggtttgccaagaatgctaatggcattcaaaacaatggtatcccctgctttaattgttagcccatcttttattgtgggatcaaggacaattgttggtgcctctgcaaagaaaaaaatacattttaatcagaaaaggaaggaggcttaatttgctttaaaaaaaaaagtacataaaaagtaaaatggacctaccgtattcatccttgcaaataatggtttctgtactttctgatggagcactgatagcacctgctgtattctttgctctaattctgaattcatattttccaccctcaacaaggtcagttacagtaaaggcacattctgggacattaacatggttggctttcatccaagacttcgaaggtagatctcgcttctccactatatatccagttaacttatgaccaccgtcatatttaggttcagtccaaatgagagtcactgaattccttgttatgttaataacctcaggttttccaggaggatctaaaacataaaagcaaaaccagtcaaacaaataccagttttcttcatgtaaaacatgcacctgggtttttcttcatataatgacttaccaattgggtccagtgccacaacaggctctgatggtaggcttggcttgcccacacctgctaaattgattgccataactcggaattcatattcaagaccttcagttaatcctgtcactttaaagtctctcatccttatcggagtcttgttagctctcttccacaaaaggctgtttctttccttgaactcgagatgataccctacaaaagacccagggatgtatcaagtataaatgcagcttgattttacaatatatatgtgttgcccaaattatttatacatatccatatatattgaacaagtagtcattcttgctagtatctatacttttattacccaagcatagtgccattttttttttcctcttggaatatgcatagttgttgtcttttttggtgaacaattttaacttacaaaaatagatattataattaagaaatactttattaactattacattaggatattttcaataaaattaaacattaaccatatgtactgaaataaaaacacatttctgtataagcagataatgttatcgataagcacatgttcaactgttctcagggaaatatttgtgaggaatcttgatgtaaaagctgtaggataagaacaaacaaaatacctgtaattggagaaccaccagttttcttggggtcagtccaagttagagatactgaatcgtgtctgacatccacaatattgggaggtgggggagcatcaggcacatctagaaaaaagtagataatgcaagatttataataagaagcctcctcaaaaccgtgttttgctttacgtcttctgaatttaagacacttaccaaatggatgtctcgcaacaattggctccgatttcaggccttcccctacaccatatttattttcggcactgaccctgaaggtatattccatgccctcatgaagtctggttactctaaaggtggttttctggacagctgaggcgcacgtcacccacttgttgttcacagaatccctcttctctag

SEQ ID NO: 25007 - DNA, 2300 bp, Homo sapien
agtgcatactagttggacggttattaaaatgggataattgtcttcctgttgagcttgttacttagcagcagggatgataatgtgaaatatggaagtttaaacttctgctggtaagataaatggtgagtgtacctctttttgttttagatcctcctgggaaacctgaggttattgatgtcaccaagagtactgtatctctgatctgggctcgtccaaagcatgatggaggcagtaaaattattggctatttcgtagaagcttgcaaacttcctggtgataaatgggtacggtgcaatactgcacctcaccagattccccaggaagagtacacagctactggcctagaagagaaagctcagtatcaatttagagctattgccaggaccgcggtaaacattagcccaccttctgaaccttctgatccagtgactatcctcgcagaaaatggtaagattctgctgagtattataggcaaagatgtaacagcattcatgatggtcatttttcctaataaaaaactaaatatacacctaaggaaaaaaggaaaattaaaatgatgttttgtatatagacacaaacattatgattatggagaatcataataacatgctaaattaaaaagcaagatacacaactgtggcaactatataatttcaatagttattcaatagtgcagttattatttgtctattaaaaataaacaaaatgaaataacactaaaattccattcttgaaagaagcagcatatgaatttcccactattattaataaggattacataatatagctttgcatacattaagtcctttatcttatttctttccagtccctcccaggatagacctgagtgtggctatgaaatctttgcttactgtgaaagctggaactaatgtctgcttggatgctactgtttttggtaaaccgatgccaacagtttcttggaaaaaagatggcacactgctaaaaccagcagaaggcataaagatggccatgcagcggaatctgtgcaccttggagctattcagcgtgaaccggaaggactcaggagactataccattactgctgaaaattcaagtggttctaaatcagccaccattaagcttaaagtgttaggtaactaataaacttcattggaatcccatattttactttggataatgggatgtaaataggatttacagaataatgtgggagaagacattcatattctaatgtgtatttcctatgcacagaattattcttatgacagaaccacgttttagagttaaaaagagctttagaaatcacatatttcaattacctaattttacaagtgaagaaactaagattctaaaaaattaactaacctcctaggtcatataggaaattgacaatagaaagactgcagcccaggtctccagacctctactctatactcattccccattccacatattcactcttcttccttattccttcagataaaccgggtcctccagcatctgttaaaatcaacaaaatgtattcagatcgtgctatgctttcttgggaaccgcctcttgaagatggaggctcagaaatcaccaactatattgttgacaaacgtgaaacaagcaggcccaactgggctcaagtctctgcaactgtgcctatcaccagctgcagcgtggagaaacttatagagggccatgagtatcagttccgtatttgtgctgaaaataaatatggagtaggcgatccagtcttcactgaaccagcaattgccaaaaacccatatggtaggaacatttcccggtggtttttcattttattttttaaaattatcttttagcctgggaaattaacttttcaatcaatttctgcagacccaccaggacgctgtgatcctcctgttattagcaacataaccaaagatcacatgacagtcagctggaagccaccagcagatgatgggggctcacccatcactggctatttgcttgaaaagcgggaaacccaggctgttaactggactaaggtcaacagaaaacctattatagaaagaacattaaaagcaacaggtcttcaagaaggtaccgaatatgagttccgtgttacagctataaataaagctggaccaggcaaacccagtgacgcatccaaggccgcttatgctcgggaccctcagtgtaagtgttcatgaacgagttccatatcctgtgttaaaagcagcattaaacacccaggaaggaagttttcatgaaaatttcctatcattatttattctcagatcctcctggcccaccggctttccctaaagtatatgatacaactcgcagct

SEQ ID NO: 25008 - DNA, 2300 bp, Homo sapien
caaagacgctacagacttaacaagatcaccaagggtcaagattgatacccgtgctgattcatctaaattttctcttactaaagcaaagcgaagtgatgggggtaaatatgtagttacggcaactaacacggctggcagttttgtggcctatgccactgtcaatgttttagataagcctggtcctgtgagaaatctgaaaattgttgatgtgtccagtgataggtgtactgtttgctgggatccaccagaagatgatggtggctgtgaaatccaaaattatattctagaaaaatgtgagacaaagcgaatggtttggtctacctattctgctactgtcttgacacctggtactacagtaacacgtctcatagaaggaaatgaatatattttcagagtccgtgcagaaaataaaataggcacagggcctccaacagaaagtaaaccagtcatagccaaaaccaagtatgataaacctggtcgccctgatcccccagaagtcactaaagtaagcaaagaagagatgactgtggtttggaatccacctgaatatgatggtggaaagtctataactggatactttttggagaaaaaggaaaagcattcaacacgatgggtccctgtcaacaagagtgcaatccctgagagacgtatgaaagtacagaatctcctcccagaccatgaatatcagttccgtgtcaaggcagaaaatgaaattggaattggagaaccaagcttgccttcaagaccggtggtggcaaaagaccccataggtaggatgtccttgttttttctgatattacagcaactcttaatctcaagcacagaagtattcgataaataagttaatgtaacatctaaatctgtaacatccaaactgtatttagcaaatatttttccaaatagaccttttaccaaaatacctaaaaggtacaaacaatagtagattctcatttttatgaaggaaaataaagaggacactaattgaaaaattggatgacctatatttgattaactgagaataggctatataaaattacacattgaagtatcactagtagtagttaactatatgtatattttactttcagagccacctggtccaccaaccaatttcagagtggttgatacaaccaaacattccataactcttgggtggggaaaaccagtctatgatggtggtgcaccgatcattggatatgttgtggaaatgagaccaaaaatagcagatgcgtctcctgatgaaggctggaaacggtgtaatgctgcagcacagcttgtacgcaaggaattcactgttaccagcttggatgaaaaccaggaatatgagttcagggtgtgtgcccaaaaccaagttggtattgggcgccctgcagagctaaaggaagctatcaaacctaaagaaatactaggtaagtccttcccttagcatgtgattcattcacacttaatttcttatgatttccccacattctgaaaaatcaattaatgaccttaatgtcatttgcagaacctccggagattgatttggatgccagcatgaggaaactggtcatagtgagagcaggatgccctattcgtctctttgctatagtgagaggacgaccagcccctaaagtcacttggcgaaaagttggcattgataatgtggtcagaaaaggacaagttgatctggttgacactatggccttccttgtcatccccaattctacccgtgatgactcaggaaaatattccttaacacttgtgaacccagcaggagaaaaggctgtattcgtaaatgtcagagtattaggtgggttactaaaatgcttctccctcccacttcaaaaatgaatttgttaatagggatgctgaggagacatgtatatctgattttatgattctttacagacactcctgggcctgtgtctgatttaaaagtttcagatgtcactaaaacatcatgccatgtgtcctgggcccctcctgaaaacgacggtgggagccaagtgacacattatatcgtggagaaacgtgaggcagacagaaagacatggtcgaccgttaccccagaagttaagaaaacaagcttccatgtaaccaatcttgtccctgggaatgagtattacttcagagtaactgctgtcaacgaatatggccctggcgtcccaacagatgtcccaaaaccagtgcttgcatcagatcctctaagtaagtattatgctttcttcctccttttaaccccagtctcctattttagcaaggtcaagatactaataccattttaatccacttctgaaagagatttcatttgtagagac

SEQ ID NO: 25009 - DNA, 2300 bp, Homo sapien
aatgtgttttctcccagcatcagtcacatgtaggtcaaggggtggtgagggaggacctgagaaaagagtgaaatattcatatccacagtctcatcaagttctagacaatatcttgtgtataatcagcactacttacttgttggatcttcaatggataggatttctgtgggttcacttgggtggccaactccagcttcattttcagcccgaacctgaaactggacctctgttccttcgatgacatcagttactctgaagttacagtcaggtcctgcagtctttccagctttcacccaacgggtacctaacctttctttcttctcaatgacatatctattgaaacaacaaagcatttcattagcattaatgaaaaaacacagttaagaatttgcagccaagtgtaagttattctttatgaattaattcaaattctacctctgtattggtcttccaccatcatttttaggtggctcccactttaggtcaacatgtcgttttgtcacatcaaccactgccagggcgtagggtggtccaggagtggctgaaaataaaataaacaatgattaggaaaaccagaggaaaggtgataatctcctgtcacaaaaattaagtgcgagagcacttattgtcacaaagattaagtgcaagagcatactaaaggtgtctttggccagcacagagtcctcaatttcggtgtagtcgctttgtcctatagcattttctgcagcaactcggaacacatataaagagccctcagtcagtggggtgactgtgcacttggtgtccttgacagtggtatccactgtttgccagccttttcgcctgacgtctctcttttccacaatgtagttggtgatgggggaccctccatctttctcaggaactgtccattttaggtctgctgtattttttgtgatattaataacttcaagccagcgtggtggtgatggaggatctgaaaaagaaggaaggaaaacaaattcatttttttttttattacccaatagtcagtctgaaagtgcaggcagtcattaagaagtaatgtagccaggaggaaataatagtaatgaatttttcatattttctcatatcgtagctcacaggcagatattagaagaatttatatatcccagacatcaagagtgacttacatagcttctcccggcaaagcacagggtcactgggttcactgggttcactttccccagccttattcacagctctaactcggaatgagtattcctgtccttccatgagccctgggagcaagtgctgagtggtgggaaccccttccgccactctgacccactcatctgttccagtcttcagcatttcaatgacataagactcaatctttgcacctccatcatgttctggttttgtccaattcaaccttactgatgttttgcctacatcttttacagttggttttccagggggccatggaggatctgcaagccaatgaaatcattgtttaggtttgtcaaaaaggagttcatatgaacttcgaaataaccacaaaaattatataaataatacctatgggatcctttattaagattggttcagttgatttgcttggttttccaggtccagcaagattttcagccaacacacggaatctgtattttttcttattagtgagacctttcactctgaattaggaacaaagtgcatgtgtatcatcatggtaagaagcagaagaagcctatgtttattttacacagaagagactaatttatttaaattgtgaaaaggtgatttggaaatttaactgaaaagcacttcaatataaattaaaaattgctttttaactgccacacactttagactgggccaaacataccaatctaattataatatctatgacagtggtcattatcataatatactgggggatcaaacactttgaaacttcctgaaggttaatattttagagtaaactaagaaatgtgcccttgaatggaatttatataatttttcaaattatgaggtaatagaaaatatgagtaaaagtagtttaaaatttttttagtaatatataatcatctgtaatcccaaggaatactaaagagtaaacatttgaatatactgctgtcttaacatcttgatggggattctgagcatacctgtatgttgtgtcctttactggcatcttattgcatctaacccatttatctgtatcaggatccagtctttcaacccagtatcctgtgattgggctgccaccatcatcatctggctcacaccatgtgagagtcactgcgtctttagtgatatcagaaggttctaggcgagtt

SEQ ID NO: 25010 - DNA, 2300 bp, Homo sapien
ttcttaattaaagaaaacacttttagatgaaaccttatttctgattcttttctttacactagcataacaaatagttccactggtgaaaaactttacattatttttaacgctaagtaaactcttaagcagtgcaaaatcagtctggatgacagggcacagcttcttaggaattttatatcatagaactggaagaacccccaagtctcttatctttgctgtcagaatgacccctatctgtcgcaccattgacatctgattttcccattcctgatgcttagacacatgaaaaaggaagaagagtccaactttcatttgcagttttgaacaaaattaataggttgtacaaattatttaatcacaggtttaattggtttgcaaaataagtttaattgctaaaataaatgggaagaagagttatagcttgttgttgcatggcaaacaccttacatacagaacataaggtttacttttagcttgccatagctgatattttctttcatcctttcatgaattcgcttttctaagttcttcctttatatgtatataagcccaggggcagaatgggggcacacatatatatacacatatacgtatatactatatgtgctgtatatctacgcatatgcaaaaaagaccacaaatgtaaacagaaactggcctgggcaatttcaatgtgaaaggccacctagtaattatataaaggtaactatgaaaccctaaaattttcttgaaagatcccaaactgcatagtattccatggtgtatatgtgccacattttcttaatccggtctatcattgttggacatttgggttggttccaagtctttgctattgtgaataatgccacaataaacatacgtgtgcatgtgtctttacagcagcatgatttatagtccttatacccaatgctagatgatgagttagtgggtgcagggcaccagcatggcacatgtatacatatgtaactaacctgcacattgtgcacatgtaccctaaaacttaaagtataataataataaataaatttaaaaaaaagatcccaaactattggttgaaatgatttttgaatgcatacgtgctaaatagatgattataaaacaacttggaaagctctatttccatttatttttatctaaatgaattaaatgcacccatatactagattgctgtttcatgtattctttttttaaaaacaactaggtggtcccacgttcagaaggaaaagttcatacacttactctgagggatgtaaagttagaagatgctggggaagtccaactaacagcaaaagatttcaaaactcacgccaacctctttgtgaaaggtaattacaaggcttattttaaaaacatgtataaggcagaggctcatgaacaatgccaactctcaattatctttatatgatgagtactatagatgtttaaaatcaaccaaataatcaaaagtctgattttactttttagcataacaaaataattcacagactatctttttaaagagccaaaattgactagcataggttttacttcctccttccatctctattgtttttattgcacatcctagattttcaaaagccagctggaggaagaattattatcaagctaggtatccatcactttattaaccaagagttggctgttatttccttaatgtttcctagtttttaaaaatgattttcctcttgtctgtacaaataatgataaaatatcatttttagaggaaaatgtctgagtgtaatcaaaacttgaaaataaaacttaggacagaacaaagccctggagatggcaggggaaagttgagaaggtaccaaaactcttggagaaggaaaggagtaccttggctaatgagtatgattctttcagaacccccagttgaattcactaagcctcttgaggaccagacggtcgaagagggagccactgcagtgctggagtgtgaagtctccagagaaaatgctaaggtgaaatggttcaaaaatgggacagaaatcctcaaaagcaagaagtatgaaattgttgctgatggcagggtcagaaaacttgttatacatgactgtaccccagaggatattaaaacatacacttgtgatgctaaggattttaagacttcctgtaacctgaatgtcgtgcgtaagtattcttcttacaaaggacttttcatttgcaattctttaataactacaacaacaaaacaacacaacactttttgcatgcccttcttggcctaactgcatttcttggcaacttctagtattgacactgacctaacctgatcctttatgtgtttaaagaaaaaa

SEQ ID NO: 25011 - DNA, 2300 bp, Homo sapien
ttaagtgaaatctcagaatttaggagtaacaacattcatttcctaattgattatacacattttccaaagacaccctcaaactgtattgagaaaaattttggctatgataatagcatctgctttcagctattggtgcccattcgtagttgctgaaacacaaatatatgacattggatttacataagcatgtcaacttttctgacttaccttacaatgaatatcagtgactggttgtattttaaatggttttcaaattaaagggccagctgcaagtactaattattttttaaataattgatatttttaatataattctttagtaaatagagctcaccagagtactgtgatttctaagactttatggtactgttatacatataagaccctcccctccagcctcttctagaaagcactcctgccatccacacacatactttgtttgtgcccatatgtacttagcagatttctgaactctaaaatttttctttttgaaatttagaagtgcagatttccgattgcgtttgaaattattttacaggaaaagttatacatattagataaacaattatagatcctgaatagcaaaaattattttactgaggcaagaaagaatttcacagaggaataagttgtagagtacaatcaagtttgtgttccctaacacttttaaaatttaatttgactttgggtcattagctctctttagtatgttctttatataaatattttaagaactcacaataatttctttacactttgctacattcgaccagcatgaatacacttaagaattgggatacttttttgttagtgatgcaaagaagagtgcatttcttctcattttggatttttgaacttttcttgctattttataactgggtacaaagatggagattttaagtatctgaggtaaaagcaagtaaaagaaattcctctctatataatctaactttgaaccctctttgtacttaaacagctgaaccaattcagtttacaaagcgcatacagaacatcgtggtgagtgagcatcagtctgccacctttgagtgtgaagtgtcctttgatgatgccattgtaacatggtacaaaggaccaacagaactgacagagagccagaaatacaacttcaggaatgatggccgctgccattatatgaccatccacaatgtgaccccagacgatgaaggtgatttcattgacagttttccagtgaatgtataatttaagcctcgtctgttttctgtatttctaccctgtatgcgctcatgctctcattctatctagaatgcttttttagaaaagacaagtgtaaataaacacatacgtatattgaagtaaagaagtgttatttgcaacatatcagaaaacaaaagttggatgatttttcaccctaggtgtctactcggtcatcgctcggctggagccaagaggtgaagcaagaagcacggcagagctgtacctaacgacgaaaggtgaggtagcgccatcagaaagccaccctgccatcttcgaaacacgtagcctacctataccattctgaacacaaaaatatcattttttttttattttgcagaaatcaaacttgagctgaagcctcctggtaagttgttttgtaaaaatcaatccttgcttacaataaatttggcataattttgtaaatcacagaagccaaactaaaatgtataagatatctttctcttttgggtaaaatatttttcaataaaactgttatgcagtagaattactttcagtcaaataataaaatgttaaaccttgtgagtctggcaaattagagataataaggtctcactcagctgatgctagaatcatgttaaatagaatagccacagaatgaaacaaattttgacagtgaacaaaacttacctgcgtggttgcatacaaaagaatactaatattattttgtctgtatattagattctgccattagatatgcctgacatatctcaggatctaataaatcaaacacaccttagttttctaataaatagcttgttctcagtctctctatgcttattacatgtccctttccagatattcctgactccagagttccaatcccaaccatgcctatcagagcagtgccaccagaaggtaagacccagaacctcaacatctgagcttggagcagcaatattctagcactaggaatctgtacgaaattttataccagcgaccaaactgcagcagagtcagaacaaaaccttccatgtcatattcttcagtgagcaattagaaattaaagtaaaaaaaaaaagtagttccagttataaataaatgct

SEQ ID NO: 25012 - DNA, 2300 bp, Homo sapien
gagaaaattgaaggcgatcttagagcaatgctgaaaaagtgagttcaataaaaaccacaaatcgtacaatcagccctccatataagtgggttccgcatccacagtcaaccagccccagtggaaagtattaaagaacaaaaaatttaaaaatacaaataaacaatacagcataacaaccatttacacagcacttacattgtattagatattataagtaatctagagatgaagcatatgggaggatgtgcataggttacatgcaaatactatgccattttgcatcagggacttgagcatctggccacaggcctcctgaagccaatctcccaggcatagagagggatgactgtaatgtcccattcacaaaaagaatctctcaagagtcatgggccatccatctcaagattcagattgttaaagaacataggcatatagacattttcacagaagcagataagcaaatacacaacatctgggtgttcttgtttcattagaatcaatttccgaatttaagagaaagttttaagaatgaggtgaatgtctattaagatttttaaacaaaaagaaatggcctataaagaaaccccagtattgtctgtgcctaggtatgaaactttttttctatatatgatttcttatgttatgaatggttctctaaaacaactgttttaaacattttccataattatcattcatttcaatatggttcatttttcaacataattattaaattaaatccacactcaatttccacacatcgtttccgtgatatgtatactattctattattaaagttttccattgctattattattttttctgatattataattcattagctaggctctttggttataaagtttacagaaatacttctattatcctttcccttcttaaaattttcattcctacatctatattttattacaatggtcctaatccatctgatcttaatcgactccatctccaaacccacatttttaaattgtttcacagctaacatggtaaaattaatatttattgaataaagaacatagaaaaccttaatgaagtatataatctttgaatgatgatagacaattaaaaataagtagaagacaggtgttttatccttactttttaaattttatttaggactccaatcttaaagaaaggagctggagaagaagaggaaattgatatcatggaacttctcaaaaatgttgatcctaaagaatatgaaaaatatgcccgcatgtatggaatcactgacttccgaggtcttcttcaagcatttgaactgctcaagcaaagccaagaagaagagacacatagactggtatgctccttcatatatagcatcatgctaaaaaagtcacatttaaaacatctcacatattccctttgaattaccagaatcctatagttatatgacgtcatttaatatgacctaaccagcatccagaatggaagctgaatatagtcatgcgtcctctaaatcaaattttgtttcatctgtaatgcctatcatttttgttcttctcaggaaattgaggaaatagagaggtcagagagggacgaaaaggaatttgaggaacttgtatcatttattcagcaaagactgtcacagacagaggtaaaaagaattatgttgataataaaatgaacaagttattattgagtattattataagggaaggagtaacaaatgtgttttaattctttattctcctagcctgtcactctgatcaaggacattgaaaatcagacagttttgaaagataatgatgctgtctttgaaattgacattaaaattaattatccagaaatcaagctttcgtggtacaaaggaactgaaaaactggaacccagtgataaatttgaaataagcattgatggtgaccgacatacactcagagtcaaaaactgtcaacttaaagaccagggcaattatcgattggtttgtggtccacacatcgctagcgctaaactaactgtaattggtaagttagaaaaggcttatgaaatacttgtgagatttaaattactgttgagcacatctgcgtgtgatattgaacaaaatgcgtgttgtatcacatgaacagagcctgcatgggaacggcatcttcaggatgtgactctgaaagaaggccagacttgcaccatgacatgccaattttctgtaccaaatgtaaaatctgaatggttcagaaatggcagaatccttaaaccccaaggtagacataaaacagaagtggaacacaaagtccataaattgaccattgcagatgttcgagcagaagaccagggtcagtacacct

SEQ ID NO: 25013 - DNA, 2300 bp, Homo sapien
ttttgaaagatgatgctaatttgcagacatcttttgttcataatgtagcaactcttcagattttacaaactgaccagagccacatagggcagtataattgctctgcttctaatcctcttgggactgcttcatccagtgccaagctcattctctcaggtgagtaactcacagtaccctcttcattgtaaagcagcttcactgctccaggccaccaaaaggctggtgccatttagtttctgctctgtatgtgagagcatggaaataaaaatcaccatgttggtcttcattcttttcagagcatgaagtgcctcctttctttgatctaaagcctgtatcagtagatcttgctcttggagaaagtggtacttttaaatgtcatgtaactgggactgcaccaatcaaaatcacttgggccaaagataaccgagagattcgccctggaggcaactacaagatgactttggtagaaaatactgccactctgacagttctcaaagtaggcaaaggcgatgccgggcagtacacctgctatgcaagcaacatcgctggaaaagactcttgttctgctcagctgggtgtacaaggtacttgttagagtgaaggagcaagatctcttttacattttcagtatcttaaaatataggagggtgggtgtgcttgagagagagctatgtttaggaccagggtctagtgatgaaaatggatcaagtggatcaaggaccttccaaatggagacaagtattttttaattactttaaaaaaaaaatttaaaactaggaaaacatggaccaaaagtccattttaagagactaaaaatagagactagagagagataaccgaaactctacaaaattgcaagaaaatcctagtttgaaagacggtatcataggacaaaagcgaagttattgcaaatgacttttttcccacagtacttagtaaatgaatggattttgtccctctaaggcatagcaaagagccaaactatcaagcccttcaaggagaattcagatgagaatgataagttcaacttactttcctccactagccccacttaaataatagtggaggtcaggggctggggagtaagtagatcagtatctgctattatggaaggcagtcatgtgtttctgccacatgtttatcgctgctactgtcagaaattaaatagttcactcaatggactgctagtctagtccattagagtatttttaagggtttttgtagtggtggtttataaatatcttgaaattaaaatataattagatttagcagcccatttgctctatgacatatagctaatcacttttacttccctatgcctgaattttttgcttcagttaatgaggaaatcattactctcacacacttcaaaggaaaattatgaaggttgaggaaatacccatttaacacctaaaagaggaaaatggcattttaaaaatattaagatatctgacccactttgccattccggctcttcatgctatgtaactgatagcattgcagccttaggaaatagttctccactggttcatatacaagacagtaatcaaattctcattccccgtggacctcagagggcttccactgacagatacatgctattatctctgatcttggcactagagaagggactcttttgctggggagaggatggcacaataaagagtaatgtctttttctccttcttttagtaataatacttgatgtggatgcttacaaaaacaagcatattttattttagaaattttctatttaggtttcatttaactcttcttccttgaactgcataaatttgttttccagagctaaagacctctctagcaaagattattttttccacctcatcttgaattatatgcatctgttccatcccttaccctgtgtttttcctcttggttccatagaaccacccaggttcattaagaagctagaaccttcaagaattgtgaaacaggatgaattcacaaggtatgaatgcaaaatcggtgggtctccagaaatcaaagttttatggtataaggacgagactgaaattcaagagagcagtaaattcagaatgtcattcgttgactcggtggctgtgctggaaatgcacaatctcagtgttgaagacagtggagactacacctgtgaggcccacaatgcagcaggcagtgccagcagcagcacatccttaaaagttaaaggtcagcgctctccccacctgtgtgtttttcacattagcctcctctttaattgtcctcttaacttcctgtttgactcttcaacgatgttttaaaatagggaaaggacacaacaaa

SEQ ID NO: 25014 - DNA, 2300 bp, Homo sapien
gttgagaatttaatttaatataatgtgctctcccctttttcccccacctttttcttgtagccaagcaattgatcactttcacacaggaattacaagatgttgttgctaaggaaaaagacactatggcaacctttgaatgtgaaacttcagaaccatttgtcaaagtgaaatggtataaagatggtatggaggttcatgagggagataaatacaggatgcactctgacagaaaggttcacttcctctccatactgaccattgatacgtctgatgctgaagattacagctgtgtacttgtggaagatgaaaatgtcaaaacgactgctaaacttattgttgaaggtattcaacaacgaaggatttcattgtttacctaagctctaaagtcacccttagcatgtggtaaaattagctatgcaatttttctttcatgaaacaattatttggaaattgactataagtttcatagccagaatcataaatttatgttcgtaattaagaatgttaacaatttgaccatttggattttttaaagtagtattatcttgatttttagcttttaagttttttattgaagcataattctttactttcaaaaatatttaaaaattaaaataaaataactgcttcttattgaaaatttatctctcagcccatcagcgggtagatattaagaatacacctgatagtatgggggagataaaagacatacaagacatcatctctatcctaagtctagatgcatacctctccaaaaaaattgatttatctttctgttatacacttcaggtgcagttgttgagtttgtgaaagaacttcaggacatagaagttccagaatcatattcaggagaattagagtgcattgtatccccagaaaatatagaaggaaaatggtatcataatgatgtggagcttaaatccaatggcaaatatacaattacatctcgtcgtggacgtcagaacctcacggtcaaggatgtaaccaaggaggaccagggagaatacagctttgtcatcgacgggaaaaagacaacctgtaaattaaagatgaaacgtaagtcctcccattcctgtcagcctgcagtgagcatcattatggtttattgataaaaaatgatcataacattctttttctccccatatttcacagcccgccccattgctatcctacaaggacttagtgaccaaaaagtctgtgagggtgacattgttcagcttgaagttaaagtctccttggaaagtgtggaaggcgtctggatgaaagacggccaagaagtgcagcccagtgacagggttcacattgtgatagacaaacaatctcatatgctgctcattgaagacatgactaaggaagatgctggaaattactctttcaccattccagcccttggcctctccaccagtgggcgtgtctctgtctatagtgagtcctaattataaaattttatgtttacactattaagcaacataaagaacttcaaggagcagacaatttcaacaaaattcattcatcttgtgtgtgtatgattttgcaggtgtggacgtgataacacctctaaaagatgttaatgtgattgaaggcaccaaggctgtgcttgaatgtaaggtgtcagtccctgatgtgacttctgttaagtggtacttaaatgatgaacaaatcaagcctgatgaccgtgtacaggccattgtgaaaggtactaaacagcgactagtcattaaccgaactcatgcttcagacgaaggaccttacaagctgatagttggcagagttgaaaccaactgtaatctctctgtagaaagtaaggattattctacctatctaataattactttaagcattctactttcccagtgtaacaataaccaagagattattttattttttccccagaaattaaaattatcagaggtcttcgtgaccttacctgtacagaaactcaaaatgtggtgtttgaggttgagctgtcccactctggaattgatgtcctgtggaattttaaggacaaggaaatcaagcccagttctaaatataaaattgaagcacatggaaaaatatataaattgacagttctaaatatgatgaaagatgatgaaggaaaatacacattttacgcgggagaaaatatgacatctggaaaacttactgtggcaggttggtatatttattaacctaaattcttacgaggagtgattgttattttaagaaattattattcatttcccccaaaattcctttcagtttcccacttccatgcctctgcttatgctgttcccaaagccaatagtacttgcaacacc

SEQ ID NO: 25015 - DNA, 2300 bp, Homo sapien
gtttcatgaaagaaaaattgcatagctaattttaccacatgctaagggtgactttagagcttaggtaaacaatgaaatccttcgttgttgaataccttcaacaataagtttagcagtcgttttgacattttcatcttccacaagtacacagctgtaatcttcagcatcagacgtatcaatggtcagtatggagaggaagtgaacctttctgtcagagtgcatcctgtatttatctccctcatgaacctccataccatctttataccatttcactttgacaaatggttctgaagtttcacattcaaaggttgccatagtgtctttttccttagcaacaacatcttgtaattcctgtgtgaaagtgatcaattgcttggctacaagaaaaaggtgggggaaaaaggggagagcacattatattaaattaaattctcaacctgaggaatggggaaagaaaataaaagtaaacacactcatggatattcttgaatacaaagacaggtccatcaaaggaaagacatgcaaattaccttggacaagtaagaatgcgtgactggaggtttctccagctatgttgatggcttttaccatgatgctggcagagtcctcagcagtcacatctcttatgaccaattcacaaacattgtcttcgggccagtaccagtagatccggtcagaccgttcaattttgacaccatttttgtaccattcacattcggggtctggtttccccacgactctgacccggaagtgtgcatcagatccttggcccactgtttggctctggattctttcgaagatttttggagcctccatactaggacttagttcaatcttgtcaggtttaaaagttggaatcgtgattttgccttcttcggcaagagctttcttttcctcttcagttaactctttggtccagtggagaagttcatcttttgtcttcctgaggagttcctcataggattcatccttctttcgagacttgagctccacagcggtaatggcttcataatagccctcttctgttctgcgcttgaatttactgcgcagctcttccgactcttcaggcactttttcatgggtaattctttcagcccttttcaacttcacaacttctttggtttcagtggtgtcaacaggtctatccactttttgtacttcaaactgaagctttcctggttcatgtacgtgaaactcaggccttggttcaggagctctcctaaggacagacctaaaatcttccctctgttgaatctcaagcttcactttatgctctatcacaccttcaggattttccgcggtgaccttcacttcacctgtgtcatatgatttgcagtccacgatgtccaggtaatggataccatcatagcgaactctgaaccttttgcttttgcggatgagctgtccattgaggtaccagttgactttgggctgagggtagcctgttaccctgcagcggaaccttgcagtctccccttcaagtactctaactggctctgggtacaagacaatgtctggcttttgcttttctttctgatctgttgttacacctgtaagtgcaccttcatgagccattctctctaattcttcaattctctgtaagcctttcctcccctcaggcaattgggattcttccacaagacttttctcatctttaacaataagggtagcagatgtgtgatctgttccatatttgttagtggctctgcaagtaatgataccactgtctctagaatatgcaacgccataatcaaggctgcagtacccaaattcattgatcatacggagcctgttggctgcttcaagtggctttccatcatggagccactccaccaccatcgttgggtcaccaatgggtgttagcctgcattcaaagtgggcaggcccaaagcgcttaagtcttaaggaagtgagttttttcttgaaaaatggtttctgttgtttctctttgtcatagagatcaccttcttcccattgctcttggccatatcgcaaatggaggggctccagttctggggctgcaatctcctttgctctatatgtcccccgtgggatgattaactttctctctggctcaggctctgcaaactcaacttcaacatttactttgcatcttgtagtgtctctgccagctttattaatagcagtcgcagtataccaggcagaatcttggctgacagtggaatcgattttaagggcagcttctcccttggttccttcaattctataaaaagttgggggagggaataatcaatatagtggtatagcttccctggttattggatttgtataatgagctt

SEQ ID NO: 25016 - DNA, 2300 bp, Homo sapien
aattctgaatgtcacataaacatataaaggcctaaaggcaaggatcttgacaatattgcaaggtgtattagggttctctagagggacagaactaatatgtatatagggaagaatatatacatacatatatatatttatataaagggaagtttgttaagtattaattcacacaatcacaaggtcccacaatatgctgtctgcaagctgaggagcaaggagagacagtccaagccccaaaactgaagaacttggagtccgatgttcgagggcaggaagcatccagctcgggagaaagatgtaggctggcaggcagggtctagaaaagtctaagaacagtgactagacaatcagcttaagaggacagacacttgactttatgtttataacatatggtccatcttcttggctcttgagttacctgaattgcatcatgtcaagatgacgcaggcttccagattatagtcacttcttccctctagttcccgtaagaattaaaatgatttgactttagttccaacaaacataacgtaacattaatgtgcttcacattaggtcaaatgagtctaaaaatacacacacgcacactacatacccacacacaaatatgcacaaacgtatcttaaatagatagccaattggtgaacactccaaaacagaaagatcatacatttctagtgtttctttgccttatgactggcagattctttgtaacacaaatctctcagtgggaataattttcaaagtatataatatgaaaccagttgtttctgaataaagcaatcaaatagaattatagcagatgccatctatgggggtggaaatggtgccaccaatacagataccaccacttaagtaaaggagaaaaatgtttaaataagtacatggcgtcatcttgttaacataactatactacattagttgtcagtaaatttaaactgttaaacattaacatattaatcactatataaataaatacaagatatgaaatactcaagaaattgaaaagtttaatgcatggccaaattcttccataacagggaatatttttattacagacataaagaaatttaacttaaattaaaaattttagtctcttttattgataaaagtctctttccattatcaacaagacaattttcctccctctaagtagagtttcacaaatctctcagctgagtcattataaagatcttttggtgtgctcttttttatttgaaatatctcttgcttgaaattaaattcagtcctaaaatagcaactatatcacctcctatccacttcccattagtaacagcaaactccagagattagcagaacagcattcatgtgtctggaaaaggaaccttatggatgatttaagcataagacctggctacttactaaggagcagtacacacatatttgtaaatattaatgccagacaaaaatgaaatctgacaaaggtgaaatcattgtactgtacagactaacctaagcagagttccaattttgcctttcaacattatatcttgcagggttgtataagcaataagctcattaacatcagtgtaactgtccccgaaatacaagtggattctggagaatgtaggtagtacaaatgagctctcttcaacgttaaggtttatagcaactgattcttcagagaacatgaagccttatgcttgagataaatttcctcatctgctgtcatgattgacaggtccatttggtttgttttatgggggaagggaacaggactggggcctgactcagggcacagtcctcaggtttggggctcttttgtatgactgcccacaagtgctatctactgtcacacctctttaaacctgcattttcggattttaacatcagcaaccaatgctcttctctgagcctcaacacagttattctttaaatacagttctatttccttggtgaagtctcctttgaggtactaaatttagcactgtcaatcagaagaacaggtggtatgtgacactaccaaataggtcctctcccatcatgctttcctaagacagccaatcacccagggccctgcctaaggatgtggggctgtcagcagatctggtgaatataagggcaggccagaccctggctcttgagcagtcgtgcattcccagcctcgcctcgggtgtagggattgcatagaaaagcaaaactacacagtcttgactgtgtagttttgtttttaggattagaggctcaccgattcatgtcggagatggtcagaaaaaccaactctccataggacgtcgtttcagaagcaaccttgggcttagtcccaccctttttaggcactc

SEQ ID NO: 25017 - DNA, 2300 bp, Homo sapien
tcctattcatgagggcttcaccctcatgacctaatcacttcccaaaggcatcatctcctaatactatcgccttaaggatgtggattttaacatataaactttgggggagcataaacattcaggctataacactagtataatcccacatataactactacatataattacatcacatataactgctgttgccatcccaaccctccctacttgattatacttaaggaaaccctctggcgctgctaaatttagtgtcccacacaatatttaacactatgctttgccttgtatttatttattgatttatttatttagagacagtgtgttgctctgttgcccaggctggagtgtagtggtgttatcatggctcacggcagcctcgacttcccaggctcaagcaatcctccaacctcagcctcccaagtagctgggaccacaggcatgcaccaccacactcggctaatgttttgatttttttgtaaagttgaggtctcactatgttgcccaagctggtctcaaactcctgggctcaagtgatctttccgccttggcctctcaaaatgctggggttacaggtgtgagccaccgcacctggcctgctttgctttctaaagcaggtactccagaaagagttttggcatttgtagtaaatgcccaatggattggtacagagaagaactatcattcattgcttgaagatgtttaatttgggtggatgtagaaatgagaaagggtctctctggcaagagaaataggcatcagcattatctttatgagttacagccgcaacaaacgcttcccaaagaatgcttaccagcactttacaggtgtttgtatgaagagagcaaatgtctattttttatgttattaaatataaaggttgatgctatggctctcttttcaaagttatagaaaatgggctcagcaattcctgtcagggcttaaatagtgatagaaatcctttctaatgtatagcaatttgagacttacaaaggacgttcatatacattatctccagtgatttccaaataatgttgagacgaaaagaaggcaaatgttttctgtgtagaggtgaaaggaaaagtccaaagagggtaagagtgctttacatgggccccaatagtcaatagtggtagatctgaaatttgaatttagatctaattcaaaatctagcattctttccacaccagctgatattttggaataagatatcagctgcataccaaagcagagtgactcattgagcagcacaaaccagttcggtttagagttgggactgaaagcagaatctccccagtagtgggtctccctgaatcctccgagccagtgttgcatatgcattttgatgagcatgcatgtttgtttaagactcatctaaggattttattccaggtggaatagagactcttccattgcagtataatcatcattctaaactggtgtgttctatcatgtgtgataccagtggttctttccacctttacaaagtcttctcggctcttgcactgactccacagtactttgcaaacccccactacctccatgactaaaactgagccccatgaaatgcagggaacaaaatatcttcaaccacatgaagcatcctgtgttctcaattgctgtttttctttactatactcagtgatattttattcctcttttcaagagtctccccagtattttgcttgtgtagattctctggatttcctactttcttctcccctagagatctttaatcatttctacctcactgctgctccccagactctcctaatggtttacactgccatgcataatgattcctttctctagagaatgctcctgcagaagcatcctattataatgattacttttttcctgctgggtctttcaacaaccaatttttactggcaatgaactctatcaaaggaatgaggcaggagggaaactgtgagctgggagggataattttataaatcacatcatgggagtacaccagtctcttgtggaatatatttgctgaaaggttgcaagtggtctatgttttcttccaagtagttagtgtatggcactgttctccaactttcctggctcatgctctcactaactgttgctttgtacagcagggagatgttttaaagatgaatccgaatttggaagacttccattatgattacattgacttgctaaaggaaccagcaaaaaataagcagacaatattcaatgaagaaaggaataaggtaaagaaaactacttaacctcagctattgaggacttttgctttgaggttaaagtcattgtccattgcaaaataaaagtgaat

SEQ ID NO: 25018 - DNA, 2300 bp, Homo sapien
agagcagcgttattaaaacatgaaattctgaatatttaaaactatattagattaatactgataaaatacatttcaagtataatgagaatctataaaataatatttatcttcctgacacatgtgcgtacatatatgcaaaaatatattactaagactgccatatattattcactcctaaaggtggaaatgtcaattcagaaaatcagtccagtactttctaatgcaatggatgttggttctacccgttctgaatcagagaagattttgaataaatatctggaactagatatccaagctaaggtaaataaaatgagaatgattattatggctataattttgtaaagataattttaaaaatatttgatagctataaacttaatcctagctcacttgaggtttacaattctaaattcatatgtagcacataatgacttaaaaactcatattcttatgtgtctaaattatatttatatgtgcatttattagggcagttgtgttcactgaaagtcagcattacggctgggtattaaacactcatttggttcccttttcttgcctgggcagtttctcaaaaaaagcctcattttgggggtggcagaggaggcagggacagtgcttctctgactattggcaattttttttgcaagagcaagttaccaaaaaatgaccagaagcaacgtgcgttattgcaagattccaaggatataaataaaaacaaccttgtttgcttacctaacattcagagacagaaagtgccccacccccaccacagcaccttctccagctccctcctacccctttcacttggcacttggctccaaacctgccctgaagtttctgtctgctccagcaaagtttaaggaacatgagtcaagtgccctcccctggttctcccaggtcagcaggaagaggcctgtgactccagttctcagcagaagagcctccttcatggactatgtccccaccggaaactcacaaacacacccatttttttgttaaattgggtattttttatttattatttagaatacttagaacttatgtctgaactccatttcattttttaattgtaaacattttagaactggggaggagattacaagggaagaaattccccgcttccttccttcccagagtgctatcatgaagcagggcctctaaattaaagttaccttcattcaatgtagtacttgggaagcatattaatcacaagtagggaagcaatctctcattgctgcagagctttttctttcattttgcttggtttttaggttggtctcaatgaaattttacatggctctttctatgacatgcataatcgtcatgcccacaatttctattcatccatttaatcagtggttggagttcacataacagaaattacactcagaagaaaacataggagaacatccctgagcaagtcaaagtcactgattttttaggttatttaggcctgatatgtaatattttccccactggcccttctagatagagatttaaataagactgcactattgataggtcatctttttgtaaattaaaaactaataaataagttttataaatttgccatctcatataataaaattagtttaggaatttgctggaggtattgttaaatttcaaatagctatctcatgtataattatttcatttaaattatttaaaacatttctaacctttcataccaaacaacctttcttttatttgtgacacagaaaatagagtgctcaaaataagtatagctgatagaaccaagaagaatttgaaatgattttcattctaaagtgcccttttttttttttttagaattttggaagttgtgtctttctttattgaggagattcttggtataagttcaattagtgatcataattggtggatatgcagaagataatgaaacgtgaatgttcatgattcccctgtcagtttctgacctccagtgctttgcttttacaggagacatcacatgaattagaagcagctgcaaaaaccatgatggagaaaaatgaatttgtatctgatgaaatggtatcactttcctctaaagctagatggctagcagaagaattaaacctatttggccaaagcattgactatagatcgcaagtcctgcaaacttacgtggcatttctgaagtcatcagaggaggtatggtactatgtgttaaccttcttcagcaaggtggccactgcccatgtccttgctttctgtggggatatatgctctgccttggtgggtaggtccatatcctctacccctgtgcgtgggctcacttataggccctgtattcttgtaaa

SEQ ID NO: 25019 - DNA, 2300 bp, Homo sapien
gactggacaatacttttacctctttcttttctcagaattcaggcctgtcctcggaatgctacaaggtacagcccatttgagctcctgtgtggacgctcctttttatttagccccagtctcattccagacaccagaccaacttagattttgcccccaaaatcttgtcatccctactatcttctgtctagtcatactcctattcaccattctcaactacttatacatgctctgctcttgtttacactgctggtttacattgtttctccaagccatcacagctgatatctcctggtgctatccccaaactgccactcttaactcttgaagtaaataaataatctttgccggcaggactatgctgaatctccttaggcactctctaatcagatgtcctaggtcctcccaattcttagacctttaatacctgtttttctccctctcttattccatttagtttctcaattcatataaaactgtatccaggccatcaccaataattctaaatgacaaatgtttcttctaacagtcccataatgtcaccccttaccacaaagtcttccttcagcttaatccctcccactctaagttctcatgacgcccctaatcccgctcgaagcagccctgagaaacatcccccatcatctctccataccatcccccaaaattttcaccgtcccaacactttaccactatttcgttttatttttcttattaatataagaaaggaatgtcaggcctctgagcccaagctaagccatcatatcccctgtgacctgtgtacacatccagatggccagttcctgccttaactgatgacattccaccacaaaagaaatgaaaatagcctgttcctgccttaactgatggcattatcttgtgaaattccttctcctggctcatcctggctcaaaagctcccctactgagcaccttgtgacccccccactcctgcctgccagagaacaacccccctttttcctttacttacccaaatcccataaaacggccccacccctatctcctttcgctgactctcttctcagactcagcccacctgcacccaggtgaaataaacagctttattgctcacacaaagcctgtttggtggtctcttcacacagatgcaagtgaaagaaggagcctgcctgcaaccttccaggtcagttacctctttgcaagctctccagccctgccataaaatgaaaccatttgcaatagttgctacatcatagcttgctcggcatctgctttcctgagctcgctccaattgttcccttcatggggtcaggtgaagttcgtgttgcatagggactaggatctaggtatggtttccatctcactggggcagcaggcagatgctgagcgcagaggacatgggtggtggctacacagctgcagagcagccatgacatgctcttggaaacaaaaataattgaacactgaagtatgtgtaaaagtacttttcccctttgaatcaagaatatgatcatgaaccttagcaaaacaaagcaatggagctgactcagtcttctaaacattggccctgaacctgaacctactattaaattgggctaaaaggtttacagagcaagtggattcattaaaactgttttttgctatattctctgttgtggctttgtcccagagatttccaatgcttccagcagctttggagttagtaactctgatatgtttgcatctgacttctgacctaaactttagtgttattttcagctgttctttgacagggaatccaacagctgctgtttaataccacagacaacttgtgacacaggctgagtttctagcaataggattaatctaccaatgtggggcactgatttgaagctggctataattttcctgaacaggaggtgggggtagggaataaaaagcctgaagcacagtactttcctttttgtttttgtttttaattgcagcaaaatatatgtcttaataacttttaaccacacagaaaacattttcttgctgcaattaaaaggtaacagcaaagtattttgctttctcatggtattaataactgaacttgaaaaccttgtccaatggagcagaatagtcacaaagaaaatctgaaatgataggcacctatttataaatgctggttgaaatattttttaaaaattcctaagaaatctgaggctctgagaaaatgtggctattccatctaaacttcatttagcaaagaacagtaagttttagaaaagcagattaatctaaaaatgtgttttaagcaatttgtgacttaaccccaagacaaataccaaaacttttttaaagtac

SEQ ID NO: 25020 - DNA, 2300 bp, Homo sapien
ctattgctcccatgtgttagctagtcttaacatgtttgttatttcgttatcttattagctgacatacggagtggtattattagtgtcgtactccttagcgtgagcatgacaattaagttaccttactaacagtgatgagtaaaccatactctgatctaaacccattgttaccaatgatgtgattatgaagttagctgaatctatggtctacatttgaagaaatagttcagaattctctactacattgtaagttacttgctaatagagattgggcattattatgtactactccccttctcacatcctacccaaagtacacaaggccgtagtaaaatactgttgctactaaaaactaaacatactgtggttgctaatgtcctttacatcttcagcctatagggaatggtacaggcagaaacaagcaccattaagtatattatcatcagtagtgagatctgtatgattaggatatctttgcttaagcccccaaaggaaaaattctctagcattaaaaacatggctggaacatagctaagcagttaacctaattagtagacttattgttaacgttcagtcctaaaaatgaaaagcttcagttgggagtagaaaatatactatgctggtatatagagcaacaaataccctgatgagataaaatgaagtagaaacttaccatttgacattatttgactttcatacatgctactgaaaagtctaggtttagctaagaagcataaataatggcagtacttgtagaggaaagaacataccagctaaaacaagaactgtaatgaatataatggaaagtgtttggagcttgaatacttggcttcaaaaatctggctttgccatttactgttaaaaaaatatctgagaatttatctcaggctgtaaaacagagaagtcataccaatttcaagaataaaatatgatataaagaattgttgaagccaaaatatccagaaataaacagaatggaaggtatcattgctataattatcttttcagaataaaaaatagagtattctttatcctttctgttgtctcacatgacaagcatgggatggtgaggaaatggcatattgcctatgttcgccgccccacccccttagttccaccaccccttcaccgtcacccccagttcactagtgtatcagaatgcatcttcagaattacacactgaagatacaaaaggtccagttggtaagctcatcagtaaataacaaggctttgaaatctgacaaattagctatttttgtaggaagataatagaacagcaagatggaagacaagtgatgagtatcatctgttttgaggttgacaaggtgtgacataaccctgttaatagacacaagtaaaagaaaatcatactaggattggatattagtgagcgagcaccgaccagtagaaacaacaacagcataaatctgttatttaagtatcccaataatgaggttaaaaaaaaaaaaaaaacagaacaaagcatgaaaagaccacaattagtgctggctatgcttagagaggagcagtctcttggtaaactcaggcagtgatgatgaacagaaaatggccgactgatactgtaatagaggcatagaactaaggacactccgtgagctggcataaatacaggggagtctttaagactgaaaaaagttcatgggtatgacacttaatatgactcaacattactgcagaattttaaagcaaacatgaaagcttgagaataaacactagtccctctacttcaagaaaaagcagaacctgtactagaacatgaagaacttagagatcaaaagacagccagaactatgatgaaatattttgaaagcagtgggcacatttttaaagattttttttggagaactttatgaggctgtatgtataattcctatatgtaattttataggaattcttaactgaaagtagttatcaactgctacttatcaggagcagtgttattagggattttaagttaggcatgtagaaaactttctgacaaaagggctattgaactccagccagttcccagtgaatctccaggaggcaccttagaagtcttcacaagctgaataccatgtctttagggtgtccaaatgcttctgtcttgggggagagatgagagatgactgggtgcctttccactcagaacacagtagaccactcactatttatgaccaagcctcacttcttttctattacagttacagattcttttttagtctggaagttagggtaaataaaatttgtatgtttgatttttctcttaggaatgttttctcatcttaactcttatgtta

SEQ ID NO: 25021 - DNA, 2300 bp, Homo sapien
atgtgcccccatgatccagtcatctcccaccaggccccttgtatttattagtccattctcacgctgctatacctaagacaggataatttataaaggaaagaagtttaattgactcacagctttgcagggctggagaggcctcaggaaacagaatcgtggtggaaggggaggcatctaatcacatcccaccaggctcctcctccaatattgggattacactttgatgttagatttaagtggggacacaaatccaaaacccagatccaaaccagatcacctagtatgtccagactggaatcattttcctctaaaacttgctctccttttttaatttcctgcctaggttaaagttaccatcagctaccaaacttgagatttatcctaaaatccttcatctttctcatcccttatagcttaatcaaatgtccaggttctgctgtctctgaatctcaaacatttatggtcaagatcttaaactcttatctgcctctggcctggctactctccagctttttgtatataagtgtaattttcataaagtacaacaattgtgtaaaacttccttcagtgacttcctgtttgctcagatggagtttgtcttcttggaataatgtaggagacccttcataatccaattcttgcataattttatcttctataacattcccataaaatcacacagttgtttttatctccctgaaagcatcatgctgtttcatgcatccatgactaagaatacttgtttccttgttttctgctcagtgaattcctacttactcttcaagactcagggatacttactttactttaggaagcctttttggacttctaaggcaagttagtcacttgctcctccctactctcataaaacattttaaatagctttataatagtacttataacatctctgcaaatgggagcatcttgatagtagagaccatatcttatattttccccagcacacattatctaatacctgaatacagtatatgtatgataccatcttcatcaaagtggcctacattgttttttagtttcatatttaaaaaataattatcacttcccttcagtccattgtagaattactttaaccaagttgaattttaatgtcatgttatagcttttattcagagcatctttatttttttttaaaaaaaagccttgtgatacctacttctatattgttattaagctttctttaaggacatcaagtatagtagagcacagtgtctggtaacatattatcggtatttgagactgcagtgggagtcccccatcccacctgcagtacgcagaatttcatggaaatgaaggaaatggaccagagttaagttaggttaagttgccttaaaaatttaaatggttatattatccaaaaagaccacaatgagattaaaaaaataatttgaattgtgtttctctacacccagaggtcagtagagtttttttgtttttttaagccctccatctagtttttaagaatgtagatggagggttttaaaaaaaatcagaattaaatattattttaggtactataatataatgaaaagcgttaatgtttaaatgtttctttagctgggcatagtgatgcacacctgtagtcttagctacttgggaggctgggatgtgaagatcatttaagcccaggagtttgaggttatagtgagctatgatggtaccactgcactccagcctaggtgcttgagtgagaccttgtctcaaaaaaatatcatcctgtatttgagaaacattacacttttatccttgaaacttgtttgatgctaaacagcaatggagattttttttgggttttagtgtactattgtccttacattttgctttaatattttgcagaatccatgctatctttaagagggtttgtcattgagtatcatttgggtattttgatgttttgatgtaacattgatataaatatccctaaaattcttacaaatcaatacaaaatacttgcattctccattgtttaggactaagtattttagtgtactataaaatacatgtaccaaatgatgatgttacaatagtaatcaataaaacagaaatgatgagttaaatttatgtttgggttcattagatgtgaagacatggtagatgtgcgaaggttaaagatgcttcagatggtgcagttgtttaaatgtgaagaagatgctgcccaggtaaggagcagtcagctacattatgtagttaacttttcttagaagattgattttatctaactacaaacaaaagtgtacttttcatggtcctaaaaaagtaaattcttgaagtcaggttctagt

SEQ ID NO: 25022 - DNA, 2300 bp, Homo sapien
tgtaattgtgataacctcattagatataaacctcattaatcattaaacactttagatgctgattacatcagggttatctctttggtgtccctctgctttagttgtctcagcagttggatggcttattagggatgttgtgcgtagatgtagcaccagctgatggagcatcgattcagcaaactttaaaactgcttgaagagaagctgaaaagtgttggtaagcagattttaaaaatgctgaaacataaggtttttttttttttaaatatcattaccatggttagacaattaagtcaacttacactgaactaattagtattattttcaggaaacagaaaaatagtataaaaagattttattcccttgaggggttataatttatgctgaaaattttatttttcatcgttagttagtcactcctcccttcactgggcctttacccttgcctgtttacccagctatatctacaggtgctgtgtcttgcatatactatgaacaattatttgtagtgcatgcatgaactgtaattagctgtgaaatgttctgtggtaaatcctgtatgcccaaaattgtgttttatgcaatgatttttgttgttgctttatcctaaccttgtgaaaaaatagttggtttggttttttggttcttgtctcaccaaactgggaatattgtcagattacccattctccaaggagtggggtacatttacattaaggggtccagttacattaagctgatgtaggcttgatgtcatttgacatcaaggcctttagaatttttctacagcaggaagcacagtgaactttcctaaaaggtcaggatgtgacaatgggaaggtggggagtcgtatcaaggggggacaaaaggggaaatggcaatggaagagaggaaacaggaacttaaggcagagaactagtaaaaagtggttgcacatgactaaaccaaattattgaaaactgccttagggaattggtttgaaaaatcacacttgtactgacattttacttgcttacagcctttgttattttatttttttgagatggagtcttgctgtgttgcccaggctggagtgcagtggtgccatcttggctcactgcaacctctgcctccccgattcaagtgattctcctgcctcagcttcctaagtagctgggattacaggcacctgccaccacgcccggctaatttttgtattggtagttatagtagacatggggttttgccatgttggccaggctggtctcgagctcctgacctctggtgatctgcccacctcagcctcccaaagtgctgggattacaggcatgagccagcgcacctggccagcctctgttattttaacagatggtatgcataatacatatttagtgtttaatatgacaaatgaattttcttttaaaatattagttttcttgagccacagtctttgtttaaaaaaaaaaagttcctttacacatgtaatttggagaattgtaaatataccctaattgttgcttcctatggtatagaagctagactgtatctttagtcacaatgttcaacatcctttgacattgatgatacattgctggagtgtcttaaaattttgcaaggcttatgcgcttttttaaacaacatgtttgccttgttctcctataagttggacagcataaaagcaggaagaaaaaacagaaaattgttttctattagaaataggaattttcatatttttcttctgctttcattttttaaaagtaattattgtctatggaaacccatgttttcaaaattccctttagggagaatttggcatgagagagagctccaattcgagttacatttaaagggttttattgcttgaaatgttcataggatggagtcttgggattccatcccaaggtggtttactgtacaaagctcctatacttgggatccaggtacaatatctgatgagacgatttgtttgagggagggaaagcgccttagttgtgtaagagattaaatctagtaacttttgttttagatgtgggattgcaaggtttgcgtgaaaaaggtcaaggtctcctggatcagatctccaatcaggcatcctgggcctatggaaaggatgtaaccattgaaaataaagaaaatgtggaccacatacaaggagtgatggaagatatgcagcttagaaaacaaaggcaaagtttgaccgttaattactttttactaaaataataacaatattagttaaaatgaagttatataacattttatatacagacaaaacgttcttaactgttatatagaagacatgtagtaggtttttggtgaatgtga

SEQ ID NO: 25023 - DNA, 2300 bp, Homo sapien
tgaaaactgttgtgaggtcatgaatggtttcctatcacttggagttcaaacatatgctggatagctacattgcaaggatctagcatatatatatttacttttataataaaatattaaaaacaaatgctaatcatagagccaaagaaactccagaagtaaagcctcatgactataagtgattgagctaagttcattcagtagttattggaaaacgtagcatccaaatttcattctctgaatttatagtttaatgttttttccattatagcagttacctcttatctaacacctaggtaatacaatgtggaaccagaagtatgtaaagaggaagggcagggatattttgtgaattattataatggattgcttggcatgctcttgttttactaggataagcaaagaatgtgaatggtagttggagagagtttaaaatgataagcagagaatgccacatagtagagaagggaaaaacagaataccacggaaggctaaaaaaggctgggactgtggacttccctgtattttcttttcgttgagtagatgctcaacatctatttgttgggatggaaaattatttcaacgcttcagcaaacagttaaagagaaccttttttgtgctgagcactgtgctatgttctggggagcaaaaaaaatgaactagacaaaatccctgtccttttaaggaacacacagtctaggaagaaaaggccaccaagcaaagcaacaggaaaaaagcaagtattaaagattatcatagggaatactgtagatagacgattttatgaaagcagagagaaaaagagtatttaattcattgtaaatgtgtggggtaaggatacagatgtggtgaaaggagatgatgtcagggaagattccaaggaggaagggatgcattatcttcattatcttgaaggacaataggagttcaactggttaaatgagggatggatttcaggtgggggaaaactacaagggcacaaagacaaagtctgttgaatttgtgtgatacgtagatatattaggagttgaagctggagccaaggaggtcaatagatcagattttaaatggctttgtaaaccatggtaatgagtttgaacctgattcaaccaggtggagagactttgaatgattttaaagagggacgtttcatgcttagctctgtctttttggagcattctctctggcagttatatggaactgaagcagcagtgaagttaaaggcttgacctagagtggcaaagaggtggaagtcatggagacagactgatattcacagaattaagaggaagaattaatccacgggattttaagtcagaaaactttagtggagagaaatttggttgcttagttgttggaataggaagattttatcaacggaattaggtgatactgaagtgagtggctgagtgaataatatggaagtcttgaaattgggaccacacagctgctctgatctggtgtgaatttgctgatgactcttttgaactgaattcaggaaatgacatacaaatgatttgcgcaataaaatgaaaacaaggactcttaagtcagtatacttggagaaaaataactaggttggtaaaaatggggaagtagccattatcagggagccccattgtggattaattttggactgtccagtggaaagatcctcaaagcaaaacaaatgccctgaatccagcccttcctcaccgcaaccctttccctttcatctgccttcatccttcagccacaccaccgcttggcagtgagtacttgggagcagctcttggagactttgtactcgaaccttcgaactccagcatgaggccagaggaaataaatgacctgccagggtgtcaagtaacggaccctctcttaagcccagacttctgactccagatctaggtacccttccactctccaagactgcctcccgcctggggagcctgggcctcggctaggggtggggacggcagggtccgtccggagcgccagagtcccactcgcgcccagccctcagccccaggcccggttggacgccccgccccgccccgcctccttcctccttcccgcgccgggcgggttgctgtaccgccgtcacccgggcgcgcgcggggtcgcgcggacgcggctcgggccgcgggtgccgagaggtcgccgggccacccgcacccccgctccccgcctgacgcacggaggggccgggacgcgatttgccgcgagtgactggagccgcagccgtcgccgctgctgccgccgccgcccgggcccgctccgcccccagcccgccttcctcccgccgcgccctccgcctccgc

SEQ ID NO: 25024 - DNA, 2300 bp, Homo sapien
agaggccttcagaaccctagttttattttgctggagaaatcataagccagattacagtgtttatgaagtaaggggatagtaaaaaataaaggaagggtaggctactctaaaagaagttaaaaggtaagagcaaatagttggtagactaagaggctaacaagaatggagcaagttttgtttccttaagaatggactgactaaagaaagacggtgattgatagggtaaggtcttatagagagggcgggctgtattaactaactcaaggtgatgacttagctaggtaagagatgcctggtgcctcctttggatccatccaagctcttctcattttttagataaccatttaaatgtcacctctctgtggagcctctgtctctcctgtagttttccccgtagaggcttaagtgttccttatcccattctcccactggtcttggtacatacctgcactatggaccagtggttctcaaacatcagcatgtttcaggtcatgtagggggctggctaaaacacagattactgggccccatccccagtgtttatgattctgtagatctggagtgaggcctcagaatttgcttttctaacaagttctcaggtgatgctgatgctgctggtctgaggaccacactttgtgtactactgaactaaactaaaaatatgtgagacgtacaaataaagagcttgggagttcaaggatgcactagtattccagaccgggaaatgttctagaaaaaatactccaagaatcagtcatgattcaacagcaggtaagaaagaatgaaacacttcttcatgaaagaaaaatattttgaagaggccatcaacataatctctacagagcagaggtttcttaggggagagctatcatagatgaagacttttttttgagtgaaaaccacagccatgactataattatactgtaatcataaggaatgcccagttgttatttggggggaagtaagtatagagctagcatactatgtttcatttagaatattattttgttattattcataacttagatgattgagactggaaaaaatgtaccatttctaagagctggttttataattaccattttctttgctgcatctaattattcacttaggtttacctgtccctgatagttactgtgcaaatctgacataagcagatatactaaatctcagaacttggataaatataattttttctgtacgtcactaaagtgttggctgtggttagtaaatgtgctaagttgcccaaccaaaggtgcaaaatccttcctgacatttgcaagcatcagtcatttcaagtttcttttattcattcaaatgcccactaagctaactcatcagtatcaatgacaatcagcttagcataagcaaaacaaccattcagtcatagccacactgtgtaacatggatatatcagatgctttattctgacaacatggtcagatgccactagatgcaaagttaaattaattagatatgagagcaataataaatcagtttagttccaagcctgtataacttcaattttaccataataccctatataactgaaattaggtttttgagttgagatgcatacacgtccctattaattttatcaacatcaaattgacatctgccctagtctttttgaactatatgaatctttatttaaaacctaaaaatccatgggaaaggaaacaaattcttcaggcctaatagaatgcaaataaattattctagtctaacagaatataaataaagtttgttgtgagaacacatttctctttgaaataaaaagcaattttaaaagatttagttgcccacctgagggggaataatcccttgacatataagtgatactgaaaattccaaactgttgtgataagtagatattttgagagaattgaattgttttgttaggagggagatgtgggtgtcagtttgctttatttccattttactatgacagagtggtagtttttgagtagctgggggatactcagaaaaattacatgaaagaaagccacttgtcagtcttttaggatatatttggttctgtgtcatcagaaggttttctgccctctccctggaatcaagttgcaaacacgatcctcaatagtaattagagctaagcggcaattacaggacgtatgatttgttcagaagcactgcctgccggctgtttcctagcaccacatttcacgggagcaccaggttgagatgatggaattatttacttttaaatgtaacatctcgtacagtgctcaaatgcagacgtgaacgtggactgtaaccttaaaaacaaaggtaagcactg

SEQ ID NO: 25025 - DNA, 2300 bp, Homo sapien
cacctcagtatgtcaggtctttgtattcaagtgctatcaactcctaaaggaatatgaaagaccattttatcttttgagagaccctaagcatggggcaagtttgttttatttcacagattaaagaacgggacttattattaggagaaaatagaagttaaatgttcatagtacccttgatcttcttatgaacagaagacttgaaacaagcctgggcttggagggaattttttaaatcttctcttttttcctgtgcttctgggagtgatgtttaagttctgccatctgtaggacatgtgcattttaaaccttttacttagagcttcagctttttgggaaagtttttatttttgtttatggtacctaaacaacagaaattagcctccatctgagatagtctctgcattattaaaatgcagcttgttgtgcagtgttttaatgggctctttaaggtctttacatattaatgttatataccaagaactattaaaacattccaaataaaacagattcatcagttaagtgctctgttttactgtggtcatgaacgaaaaggacaaactagttatcgtcatggtcacttaaaaaattgtaatctattccaaagacagttttctcataaaaagccacttagtcacataattctggggaagtcctagagagtttattactctctcatttttattcatatgttttagaagccaaataaattaaaacaatttaacctattataggttattttatgaaatatttagagtaacttcttaatctgagacaagtatttcttctgccaacaagaatgtggtaacatattagtttgtcttcagctggtatgtatttaaagattttgaaggcctttaaaaatacctaagtgctaattggtaaggtcaaccaggtggaagggagtggggagtagggaggaaggtgaatataaagtaaaattatacataattttttttgtttgtttttttgagatggagtctcactctgttgcccaggctggagtgcaatggcatgatctcggctcactacaacctccacctcccaggttcaagcagttcttctgcctcagcctcctgagtagctgggactacaggcacgtgccaccacgcccggctaatttttttgtatttttagtagagacagggtttcaccatgttgatcaggctggtctcgaactcctgacctcgtgatccgcccgcctcggcctcccagagtgctgggattacaggcatgagccaccatgcccagccaataatacatcattttaaaatgatctagctcactgtttctttcaaccaaaaaagagtaatagctcctcattaaatatttacttaaatatttcacattaaaaccttcttgaaccaagttggcaacctacagagctgggccctgggtgccctccttttaagtcaatggggtggcagccgaatataacacaagagctgtaagtcaggcaacagctacagcttctattcttcacttagccactcattagatgagtgaccttaggcgagtcatttagcttctttcgggccttgtttccttattggtaataatagaggcttagactaaattcctttaaacagatactacagggctgctgatatgccatgttttggtgagacataaaaatgtaaaaagcagcccctgtcttcaaggaagtgacagtttaatagaaaagacatctataaaaacaaatgcatgcaaaaaagtggtttcgagactgttacataaatttgtactatgtacattgggggcaccaaaagaaaagttgtcaatcctatctgggtttaggtgagagagatgaaattcacaaagacttaacagatgaaatgcttgaactgagtttgaatgccactacccagatgaacatggggatggaaactataagagcacccgtctatagaagtgagtcagcataaagccccaggacctaacagtggtcctttatggctggaatataagtataagataaaatatgcaaaggatcattggaacaaatggaaaagtctttctgtgacataaggattccagaatttgtgagacgctatgacagggttctaagtagaatttgtgaactgttcgtatatgtgttctagagagatcattcttgcaaagtatggcaaaggcttggcaaaggtgagcaaggaaaccattcaggaggctattacagaggtacatggaagagatgataaaggtcacagtgtagccatcgagtagaaggaacagaactataagatgtgaggaaagtgattcctatcaaatcactgattaaatgagggttgagggaagaggaggaa

SEQ ID NO: 25026 - DNA, 2300 bp, Homo sapien
catccattaaagtaacactaccctccagatttcttgcctaagcaagagaacatctgcttaggtaccatttcccaatccataactttctagcagtttaggtaaacatttatacagtccacaatctcttacttgcaatttccgaaatccaagaagcagtgagaactggaagattttataattcatattgatgggaaaacgtgacatgaactaatgtgagcttaaattatagcatttatttatcccaatgagtatgaatatgcacaggttttgctatagaatgttaatgtgtctgattatagagttgttgccccagaccccagtgcggcattatataacatctgccactggaggcattatataattcctggcatacgtagagtattacctttctaaaatctgaaaacgtttgaattctgaaatgcatcaagcccgaagggttttagataagggattggcgtataatcaaatatcctggtttaattttaaacttttatcttattactagggagcttcatgtgtggtaataataaaaagatttttaggcatacaatctctcatgaactattcctatgactattttcgaaggaaagtttatgtgtgtgttgggtgaggcagagaggacagaagagagagaggacactgaacaattgcaaagtcaatgatgcccaatgccttttctcataatacattcaaatgttgccctaggggcttcaggtgacaaatagaattcaggtggcaaaagtgactgtgaggggcaattgtgttcaatggcataggtatatgtatacgcacacgcatgtgcatatccaatcgtgtgtctaatctgtctccaagcaagggcatctaaccagcagcccgtaaggagtcaactttccatatggggacatagtgagaatgcccatgagagtgctgtgtttaatgttgctccagaatgctgtgttacgtaaatgtgtgctgcttagttttacacagatgtttcatattgtagacacttctaaatgtgtcatctcagagctggtaggattactagaactgaacccagtcatttataggagatcctcaaatcaggaattgcctttactggattctagtttgtctggccttcagagtctcaatgagaacctaaaaccctttttaaaaaattgaatagaaccttaaatgtgttgtcaatgttgcctcctaggaatttcttccagtttacttttgtgatttttaataaacattttatttcttttttgctttgcagtttgcatgcacatgtcaaatctgtatattttgtgatctcaaagcactgctactgctttctggggtatatgtatttctggggtatatctaatactgctttctgaccttgtgtcttctaaagacgatgtccagtagctcttgcatcttatattttagtaacaaaacagaaaggattataaaaagcaaaagtataaatttgggggtagttgggataaaaatacatgggtttaatgaactatagattttttaaaataatgagcaaagattatagtgttaaaatatctatcttgcatgtttattgttacacagaatagatttaaatctctattgtttatgaaattatcttagaataaaattgatggtattttgtcctggtgctagcatagcatcgcacatttttaactatcaccattattttaatttagagatgggcacttaggagttaaaggatgtttgatttgccctttaatggacatctatgtcaaatatatggaattatttttgttataattgtcatagtctccagtgatttcatttgtctatagcgaagtcccaggaacctacagctattttgatttatgcagcctttataagtcctcgtaatatagactactgatttcttccctgtatcctgctcattgttgaaaagccagagctatttttaacatttacacaatttcaatagatgattctttattccacaaggtttggtgctaaatctgtggagactttcataatcacatccttcttgtggtttgcttgaatttgatcacagtggctgatttcatgcattgataatgaaggcttaggttgcctgtttctcagcataaatccacctcagacttgtacattgacagtgcttctggtttcagcacacatggagatatagaattgaaattgctctgctttctttacaaatgactcagagtgtgcttgtccttccctaaaatgttgccagcatgtaaaggattttcaatgagcagtgcaataagccagcaactgggaaggcttggagcggcactgatataacgtggtgctgtcacacagataatcag

SEQ ID NO: 25027 - DNA, 2300 bp, Homo sapien
tttaaatttaatgttgtttccatattgaagtgcgtttacaaaggaggcactgcaattgttttgtgcttggggctccagaggccttaatcctgccttggctaaggacgtgaagggcaggattcttagtcagttatgtcacaggtgaataattgggagttgtctgcatgtattttatgcttctttcagctgttaggaaatgcaaccctcaaattattctctgccgtgagtcttagctataggtgattaaaaatagacagggaggagggaaggatatagttgcagtttgcaggacataaaaaatgcacatgctgctaaactgtgcaagccacggagaacacttctcacaggtgttccactctgcagaggttactcatttgcctccaagtgcaatccaaggtgttgactggagactttaaggggccctcacccctttctctgcatcttagattcctggagatatcaatacttacctgagctcagaggcaacctcgacaaccacgctgtcccaactctgaagtgcatggcactggaagctgggtgtttttctcatggaaggtttttgcctctggaatttcctgcttgtcccagtctgccagagctccatcttactgaccttcagggacttgtgaaagacgtgttttcaacataacctttattgatgacaagagaccttaagatcataattttgtgaaagataatttaagcaattatcatagctcatgttcttttgggttaaaatgattgaattttggtgctgtccttctgtagcaacttcaaataaggtacagttttaagaataagcacaccaataaacgtttgttcttagtattgagactgccgacctggatgtgaagatatttggattctaaaaatacaaaaactgtaagtcagatttatgccctttctcacgctggtacctcaaatgtgctggtgcttgcaataactctacattccaaggtgcttaaaaacacagcctgctcccttagaaagctctaggatggtgtgattgtttgtcacatctgaagcccaccctgggagaacaacattggctttggctggacgttaagatatttattctagacgattatgccaagacattaacagctgcaggattatttacgtagtgtcaatcatctgagacaagaaccaaagaaaaatattttaagatcatctggttaaaaaaaaatccctgctatataacacaactctcttgtcatttatgactattgaacttctccccaaagaagtaatctcagaaaactgctcttttaaaattattttccctttcttaagtgttctaagtgctttccctttcagaaccaagcaccttggccatgtttgcactaattttcagaagatgccctctacatcagggtaaccgatgacaggttttagttttgaaaacttaaacacggaaaagaaatccggcgaaaatgagccccccgcccacaaccctttcagatctgctgcgaggctgcgatgccttcttgcgctccgggccttcccggctccgccaaatatgccgaagctgctagctgtgctctgctagcccaggggtggtcaaagaggaaaaacaaatagttggtctgacgatctccaagaagagagtttcactctgggttgactaatattggaagcatccgccccatcgcggggcttggcatctaggctttgggacctctgccattgccaaggatctcttcggggacccgagcccccgggctgaggaccgcgggggaccccaggtcgggacggagcctcctctggctcgctgtgcgcgcacgcctggaaaggcgggatttaaggcagcgatgctgcgggaggctctgcagtgtcaacgagcccccgaacggttccgcctcattccctctctgtgtgcctcgcaagtctctgcttagtaaaccgtcacagcttcggcgcgcgagagtggcgttggcacgtccaaaccccggggtcctcggccaggccaggggggcgggcgtgcggcggggccgggccgggccgggcgcgcccagcgggctccgggcacacgcccctcacctgggcgaggcccggtgcgcaggcgctcagcgcgggggcagcggccgggcgcttaagcccggcgcgggcaagagttggacagttcaggggccgcgccgggccgagctgtcgcccgcgccacctccaccgccgccgctgctaccgccaccgccaccgcctgggctgcagcagatcgcgggagaacgtctgcgcgaagccccggtgcagccctggcgggaccgcagcaaccaccggagcgtgagcaacagcttcccggctgg

SEQ ID NO: 25028 - DNA, 2300 bp, Homo sapien
tcaagaaaatttaattcatttaatatttataattagtacaacctaaaaactgtcttggtgtagggggggtcattaaatactttcaaaataaaataagaacaggaaaaacagactgtcatatagctttctccctgatacttcacttagtagataaaagaaaagtagtaacatttcttcatcaactactcgactgtttttcagaaatttcaggattttgtctcagtactaatttcgttttttaaaagagctggaaaagaaaaagtcacatctgttttaaatgtttttggttttgctgtattattaaaatgtatcaattaccgtttagtattttaatcttaatgttagatactgtttaatattatctgttatataatctctttcctgataggtttcttttttatttcattgccttgtaccatcctggattattaccctgttgtgcttaggaaaccctctaagtaatagaagctgaggaatatagatgaactgcaaaactaagtccataatcattacttagtgatgattttatgctgtattatcaaaagtaagggtgtggtcattccacagaaatgcaaatatagtagcattatttctgaatcaataaacaattaacaaattgagtttgctaattctcttaggtgaactatactgatgatattttaaattctgtgcatatgaatactgggtaaaagcatatttttttcttgcaagttattttatatttactatttttatatgcggtatttataaaatgtagatgccctgtgtttaggatgaaccaagctaacttgtaaaagtagtgattaagcactaatgttatgctgaactcctggtacgcctttcacctcttggaagcagtatagaaaaatataagaaatcggcaatgtctagtaaaagtagatagagttatgatagaataatatatcatttactcttccacactgagattttaatgtaagcagagaaacttgacctgtggttgctgctgtctcaattaggacttttcctggcttctctaagcacgtgatatacatttcaagaaatgacttttcaaattaagtattaattatagccttttcttatgcaatattgggtgagaaagtgtaaatattcctgtgttcaagttctacttctgggacgatgtggccaggagcaaatttcaaatactaatacctaagtctcatttttctcatctataaaaatgagagtcatattagattgtctctaaatccttctgaaatcctgtgtataaacctaaatcagtatagtatcctttaggtgtttttacctccagttgtttctaatttacgtgtacatttgtgaataagaatgtatttcttaaaaatgttaggtagttgtaattatttttttaaagtattaacttttaaaagcttttatttctttgtcctcattgttaaccattctacctgttgttttatctaagcttttgaatagagttattgatttttttctttcttagatttatttaacaactaattgtagaacagaacagctatgtctctttaaaaccttgagcattgggaagcactctttgagatctggacctgattacccagatttagagtacttagatttgtgctgtaatatgggattatcaagtcagaacatttaataaattcattatatacagttattatcctccaatgcttgaaggaaaagatattgctaacacttaagaatttactaccgtcatatttgagtgaccagtttgtagtgggaaaacattcgataagcattatctgattgcagaaatgagagaaacttacacatcatgtgttttgtttcttaaaatgaagaaaatcacatagaatagaaacccttttatctgattagttatggcttgaagttggttggtttgagaaagtaatacaattcaatgcatatacctcttatttttatttttgcctttttaagattgagatgttattcacatgctatgatactcacccttttaaagtgtacatttacagtcatgcgccatataatggtttttcagtcaacaatagaccacataggcaatggtggtcccataagattataataccatatttttactaaaccttttctatgtttagtgtgtttagatacataaatacttaccattgtgttaacagttgcctacagtattcagaagtacagtaacatgctgaacaggtttgtagcataggggcaacagccatagcatgtagcctaggtatattagattgtaccatctaggtttttgtaaatacactctgtgatgttctcacatgaaaaaatttcctaagaatgcatttctc

SEQ ID NO: 25029 - DNA, 2300 bp, Homo sapien
tgtcaccgttgagtatattagctatgggttcgtcatatatggcctttattccaatttaatttctagtgagagtgaaatgggaatgtgagagaaatgggaaagatgagcaatacattttagaaaagcagaagggaatcaccgtattctataagaatatgtggctttaagcaattggtgatatttaaaagggtcagaaaatagaattactccatgttgtatttattattttaaaatctgagggctgttttctcatgtcattttacatgactatgattcatctttaaaaaaatatggaatgtagtggccaggcacggtcgctgtaatcctagcctgtaatcctagcactttgggagcctgaggcaagaggaccacttgagtccaggagttgcctgggcaacattgtgaaaacctgtctctatgaaaaatacaaaaattagctgggcgtggtggcacacagtagtcccagctcctccggaggctgaggtgggaggattgcttgagcccaggaggcagagcttccagtgagccaagatcgccccactgcactcctgcctgggtgacagagtgagaccctgtctctccccaacctctccaaaaaaggtgggggtataaagtaggagcagcaagttttagaggtagagaaagttgatcaagagacagccattatcctcaaaagtgggcagagatctctccaatttacttagaaaaaaagtagacttagaagagttatggattgctaaagatactataatttataagctgcatcctttttcttattttccactctagtgattcagttgtcatatctaaaactaccattaagactttttttcctgacttttggcaatccaataattacttgtcattacattgctaaaagtaactttagtttgcccaatttgcctttccccttcctcatcaaatgcatatagaaacatgaccattttcaaaatgagttacaagtaggtaccttttaatttcctgttactgttttagcattaatctggcattgcttttaattcgtttctttatttctcacaggagtattccacatcttcattttattctactaaaattagacttaaagatttaaacccaaatttgtctttaatcacaaaattaattttataaaaatgacagatctgtagtagaaactttatgttatctaccttttatacttttgaagcaggtctgcttttgtttactttttaaaaaatgttaaagaaattatttatatgaacctttttaaggttcaaattcatgattagatataacagactgggaaaagaggaattatatgtagagagaaaaattttggtgataaattgcagtaaaatcttcattctattttacaaaatcacaaattcacatttcgttttctgaaaaacaatttttatttattagtaagacaaactctttccagttagttctgatttagattttatgattacttatagagaaatattactgaattttaatagtttttgtttcgtttaattaatttggtgattattgttgactcctttttaaattcttttttaaacagaggactgctgtccaggtctgttttgcaagcacagagtgcttctccaatcttcacccatgtttatgcagcattagtggcaattatcaactcaaaatttccacaaattggagaattaatcctcaaaaggttaattcttaattttcgaaaaggctatcgaagaaatgacaaggtatatatgaatggcttgtaagtagaatgatacataggaacaaactaacaaaccagtatcaacaaaagtaagcaaggttgattttgacacagctacataacataatgctttttaaaaactgtctttcatgagaacttctttgatctgttaaatatccctggccactattgatgagccacaaaaatgatggctataactgtagaactataactatttaaccagaagggatactctttcatgtgttttattttgtaactttcttataatgtaaaaattatacttgtgtggtacatgttttaaatagatgatgttagtaggccatagattatgtaaataaatgaaaattgggtttagtttataggttaactttccacctttatttttcagcaactttgcctgactgcttcaaaatttgtggcgcatcttattaaccaaaatgtggtaagtaattatcttcaatacttggtcccattcagtggcattagaccagagggttgatgccacttcactgatacctctctatttttgctttgctttatagtccttgggataaaaatgttggatgatattttcattttaaaacta

SEQ ID NO: 25030 - DNA, 2300 bp, Homo sapien
gtctgaagattttgttttatcttatagactgtttaggttacatgaattattcttaatgatttaaaaaatgttttgatacaatttctaaagtacttccaactttctaagccatgtatttcagtctgtgttattaacataaataatttttgaaatgttttccccttttcctcttttaaagccttcttctggtcatgacagaagggaaaaccttaattcatatcagaggaactcctctccagaagacaggtaaatagtttaatatgctctgaatgcaatgtaaatttttatagtaaggtttatgtaataatttagctcttagatttctaattttagggtggataacttctttttaatggttttataaccaatattacttgaatgggctgtaggaggaatcatccttaaatgactcttctaggagtttctagtaaataattccagatattatgtaatttttatgtgaaagggagtaatttttaatgtttcaaagactaatggaatgaaagtgtaaaatggaaaactgagttgaaattacagtattcagaagtgctgcttttgctactgttagtattatctcttacatgtacatagctctgtattgtctttaaaatatttttatatagattataacaggggtccccaacccccagagccatggaccaggccacacagcaggtgagcagcaggcctgccagcattcccgcctgagctccacctcctggcagatcacctgtggcattccattctcataggagcacaaaccctcttgtgaactgtgcatgtgagggatctaggctgtgtgctccttattagaatctaactaatgcctgatgatttgaggtggaacagtttcatcctgaaaccatcccctcaccccctaacatctgtggaaaaattgtcttccacaaaaccagtccctgttgccaaaaaggtttgagaccgctggattatatcatattataactatgttaaggtcagcgatccaaaaatgttaacattaatgtgcattatgaattcatattagcactacaattatttcatttatgatcattgaaagaccattaagcatatggtctattaaaaataatgactgtaaaaaaaattttttatgcccattaaaaataatttatgaaggaagaagcacccttcaaactttcttccagttgtctaggcttccttactccacatgtactttcttattctactctgctaaataatctctaaaaactttgctttgtgaacatcaagttaattgccctgattcataattacttactatctttcaccgattgtctactccctatatatttaaaaacaaaaaacaaacaaaaaactctttacacacagacacacacacacacaggtatttgtgtgtataacttaattgtagatgtgtatataaaatatggattatgttactatgtatctattatgtatatatttaacttctcttaaggttctctgattttattgacttttaagattcaaataacagatctgatgctatccatccttgtttgctaataatttcaatccattctcattgctgtccagtaatgcattttcaagattaacagctgatgaatatggtcttttggtatggaattaaactgatccttatggaggccagccaatgaccttggtctcatacattcagtgttttgataaacaagccaactaagcaaaaggagtcatttgtaggatagcctttttcatgctaactatatatgatatccagatatatgtctcctactgagaacaaagtgaatcaggataattcactaaacaagtaagtttggttaagtgaatcctaggagttgttttgctgtgtacaaactgaaagcttttgtaattctgatggaatgaatgggtgttagcaaaatgagctgttaagaacagtttgacacgatgttgttcagtcatagagttgctttaccattaccaatatatgactttcctaaatatttataacatagttgtttttaatttgcaacttggttttcttattttatgttagatatgaagaacaagaacgatccccccgggatagagattactttgattacagcagatcagactatgagcattcaagaagaggacgttcttatgatagtagcatggagtcacggttagtgttgggaatttctaacttgtagaaaattgtatttgtttaaactctctttatgctacatttgtaataaaaacaaaaataatactagctaacattaattggatgtttttaggtgctaggctttctaataagggctttatatgaattaacttcttattgcagtaaatat

SEQ ID NO: 25031 - DNA, 2300 bp, Homo sapien
gctacataaactacccagtggccctgggaatcaaaacacccttattatttaagttcttagaggaaaacagtgtaattctctctagtctcgaacctctctttcgcctttgaaacatgttttttatttgacttttgataacataggcttattaagatggtaactcttgcatgatatcagaatagactgtttaaggtagaggggcatgcctctcctctctgctaccatcacagagtctgattttatgaagtgttttacgtaacttattctggattttctcaattatttatctaaggtatagcatcgagtaggaaaagttactctgaaactaagttcaaacaatgatgtcatagttgtgggcataataaggtcctagatagactagtctgtgggcatcaggatttaggacccagagtaatctttttttgtttgtttgtttgtttgagacgaagtctcactctgttgcccaggctggagtgcagtggcacgatctcagctcactgcaagctccgcctcccaggttcacgccattctcccacctcagcctccggagtagctgggactacaggcgcccgccaccacgcctggctaattttttgtaatttttcagtagagacggggtttcactgtgtttgccaggatggtgtcaatctcctgaccttgtgatccacccacctcggcctcccaaagtgctgataaactttaaaaagatacataaagaaaagattgggggacaacttgccagctgaaaacaaggctgagctttctaaacaactgcaataataactaattgaagaaagagcctgttaataagcgtattatgtaaagttacacacatttgtctctttaactgtaagcctcgtacataagcagtgatgtgctttagattgtagttatattttatagattgataagtttgcctttactaaccttgacaccatgccaatcattgtaatagaaacatttcttgacttagtaattcgtatacatccccatctgcattaaatgacagccgctctgtatcactttataatgtcaagactatttgtatgtgtgtgccagtgaaaggaatacttaacagggtgtccttatggtaggtttctagttgtaagtctagctggcattataatttaattattataattataattgaaataggatatctggctttcagtgttctcttttaaaagaaggaattggaccagataatctgttataccctttctgacactcaaattaatttttttttccagttgtattcagttattttgctactaagcacgttgctttctctgcattctctgtatcttttaatccttttattttctattttatttttgggatttcagtgccttatactataaaccatttagatatgtacttccaataaaatatttgaatgcaagttctttgtgaacataagtatcaatttagcatcttgcagaaattgctaaaacttacttagagtattaaaacacatctgaagattttagatttaatgctgatgactaggtttattctgagctaaatacttagttctcatatgtgcatatatctgaagctttgtgccattaatagatcacattgagacataattattgtagtttagcaccttaaatttctatgtggattaaatttatttcttaatgatcattattgcaaggatattgggtatttcattcttagtctgtgtagaaacattggatttttatactcagtttatatagagtttctcttctatcgtttcctcaggttttttttaataatatcacactactattttatgatgtaggtatgtatctccctcactatgagaacatttttaataaagttataggacatccctttttaaattaacttttgttccgcttggtccttagaataaaaccttctatttgctctcttgttcatggattttttttctacttgtatgtgttaggtatacattattatgtgtaactacttaaggatttttacaatttttattatatttgtttatggattaagaaaaataaagcggtcaaatgtccattgtatagaaaaaatatatcatcatttttcacactttgttagtgttaataaagctttctttggtatattttataggtgatgtttgcagacagaaaaagtaaactgtcaaggaattcagagcattgggtacttgttatttggaccagtttgaagcatctttgatttattggaccaactggcaacagaaaatgaaaagtagtgtggcacagataaaagtaagtgtttgaaacttaaaatggaggatgtaaacttatagtcaattacctattctt

SEQ ID NO: 25032 - DNA, 2300 bp, Homo sapien
tcttcttggggtggctctagccagtgactgagcaaaactggtacaagggcctagccatttcatcccattgtaggcctcttcatctttattctggagctactatttcctccattttcctttcacctttattattcataactctttctcagtgtctgcttcctgaaggacccaactgacaaatccaattcttttccagctccatctagttctcctctgctcaaccctaactttcctatttctgttgatagttgtagaggtagtatattcatcagggttccctagagggacagaactaataggatatagatagatagatagatagatagatagatagatagatagatacacacacacgcacacacacacgtatatatatcctattacatatatatcctattttttatatatatccttatatatatatcctaatatatatatctatatataaggatatatatataaaaaggggagtttattaagtattaacttacacaatcacaaggtcccacaataggctgtctgcaagcttgaggagcaaggagagccagtctgagtctcacaactgaagaatttggagtccaatgtttgagggcaggaagcatccagcatgggagaaagatataggctgggaggctaggccagtcttgccttttcatatttttctgcctgctttatattcgatggtagctgattagattgttcccaccagattaagggtgagtctgtcttccccagtccactgactcaactgttaatctcctttggcaacaccctcacagatacacccaggatcaatactttgcatccttcaatccaatcaagttgacattcagaattaaccatcaccggtagtattgtgggtttttaaatatatgaatacaaatgttcatctccagatccatctcctgtgccctgtattggtgcaccaaaatgcaccatcaacaatggccaaatatcttaaatatgaaataaaatagataacactattgtatactagcaattatcttaaatgcatcttgtgtatcaactaattcaattcttaaaactactgcctggatggatactattggtatttccatttaacagatcaggaaacggccacagaatgtgaagttacttgccccagtcatccataaataataaaaggactcaagattcaaaataagtagtccaactgcagtgtttttattcttaatcatcacactctgcctccagaaaggagtggaagcacagcaccctaaaactgtaatagagaagtgtgtggagaaaccagtcctggtttatgaaagatttgataacataaagatattcttggtttaggaagagagtttccaaaatagcaagtagttgaacttttaggttttgttactagtgaaaagtgaagtttaaagaaactgtttgatgccctagttctgcacgctgtacaaactgctacttcctactcagccaggcaatctctttattctcaggtcataccagttggtaccttaacctaaaagagaggcaacacagtctctatagaattagtttttcctcattatttcactctatttatgatttaatattctcccattcttatggcctggatatcttggaatttattaggcacttaactgttggtcaaactcttataaagtctcaggaaaatctctctcttaagatttttcaaggaaagtgacaactgactgcttttttaaaaaaaatttccccaaaatgcagtgaaatagttttaaagtaaattcggctagaccctgaacactactaggctgccagtgagcagcgtggatgttaactcgctggcgcgcatctgtatgaactacaattcccatcgtacaccgcgccatttcacgctaaactacaattatgctttcctcatttccgtcagcacaggcgctggatttcggactttgtagttcatgccaacttctcttttttgtcgccattttggcaacaagacagtgtgcctggatcgactactttgactctggtattatgatatggtatttgaaataaattaaagggataacgtgtcaagccaattgagcgtcaagtttttaaatatttcactattcgccttcttcctaccgtcggtgctcgggaagaggaagtgacgtacgtccggtgtaatggcggcgcggtggagctctaggtaattatcgaactccgtggagtccccgcaggcagagacgcggagtgggggtggcgggtcgccggatcgggtgggaagtaaaagacccccaggagtgggtgcgggctcactgatacggctgtgagcggcattggagtgtgcgtgggtcttc

SEQ ID NO: 25033 - DNA, 2300 bp, Homo sapien
ccctagtgctctctccaggaccaatctaatgtttccttctttgacctttacctcatgccccacaattccaacctgaattaatagttccattattagttaattgatgattagtaatgctcttttctcattctctttacttctttaatacagcacttctcattctgcaggctacgtttctggctgccccactgcacaattgagcttggttaagagcatgacccatgtttcactccagtttcccaagcagttagtagatcctaaatattctgttgggtgaatgttaagttaaactccatgacttcaagttcgccaaagaatcacggaatcatggaatttttgagcaggagaggacttagaacctttgatacaatctccttttacataaaagtaattgaaataacttaacttgcctgaggtcatatgaacttcgtagaatgaggattagaatacacttccctggcttttcaacccaatactatttcttctgtagaagatgttaccaaacaactaaatatctttctcccctaagctccttaccccactaaatcctatcagcaattggcctttgggccttcaggctatttctgttcttaaatttcctaaaagaacccatgtttaacgtacagctttccttttctgtctccccattccaaacaaagcaaagcttcaactccaaattggctggcttttgctgtaacatcacatcgtgtaaagctgggggaaaattctgcttttattttcactaacaagcttttcccacaagcactctttgacccagccaaatcaaaatgcttgtccacacacagaccatgatcttttttgaggcatgagatattctatctgttcattctgagtggaatatccttactacttatgaacctagcgaactttaatgaactgttccccttctggactaggagctcttagcacagagtagagacctggctttagtcacacagcaattgaatgagtgtatgtccagcacctagcaacatatagccctcaataaagttaactgaatgactgtgtctttggaaaattatggaaatgtaacttactctttagagttgctatcaagcctttaccaaaagttttctattaggagaaatagtaagcaaatacgttggctcactcagtcttttcttctttcccttaactctatacatcttttgactgccattctcactccctttgtgaactgcacattctcacagcacccctgcccctggacacttgtgggagaggaatccacaaattcctttgaggctccatcaccggaacaagttctcagtagctggagaaggcctgggtggcaaacaggaagtttttgtattctggctactttgtgccgtggggtaaaaaccgcagagtccacctggagactgcaaaaagaatggtagaacaaacaaaactgtcactatctccacctaaagcttttctgggtggacattctgactcaacatcactcagaacttttctttccagaactggctcctcatgtgcaagacagaagagtcccgcagaaaagtgtcatgttttagctctcatcgccaccccccaaccccaaactcttctccttcacttttaagaatgttgagcgggacattttaaacactgttttggatttttaaggtttcaaataatccgaaggacacttccctttggcagcgacagttgcaagctatgagccaaaaagaaatagaggttgttcccctaatctccaaatacattctaccctcttcaattcccaggaccccaacttgtcccttcctccagcttacgcgaggggcaagtggcagctcttctccgcctgcgtgcctggcctcgtcaacaacacccattagtctcccgtctcccggggcggcgggggactcccaaccacgcgcccagggcccttgcccaggtactggggccccgggagccacgacggcccccgcgcaggcggatgggatggaaccagccctggggacgcgggtagcccaatgggcagcctcgccccggaggcgggcccaggccggaagccaccccgcggcacagcggccccgcgatacggtgcccgcgcccccgccttctctggcacaggctccgcggccaagggcggcaggggccagcccgccgggtccccgccgcgctctttgtcctggccgcgcgcgggcggacgcgtgcacccccagggtgaggggaggtgtggagagcgcgcacgggagcgcgcgggaacagctcgcgcccgccgggcgtcggcggcgcgcgcccctccgccaggcaagcagcgagcacgcgcgtcgccgccgcgcccgccc

SEQ ID NO: 25034 - DNA, 2300 bp, Homo sapien
atctttctcccctaagctccttaccccactaaatcctatcagcaattggcctttgggccttcaggctatttctgttcttaaatttcctaaaagaacccatgtttaacgtacagctttccttttctgtctccccattccaaacaaagcaaagcttcaactccaaattggctggcttttgctgtaacatcacatcgtgtaaagctgggggaaaattctgcttttattttcactaacaagcttttcccacaagcactctttgacccagccaaatcaaaatgcttgtccacacacagaccatgatcttttttgaggcatgagatattctatctgttcattctgagtggaatatccttactacttatgaacctagcgaactttaatgaactgttccccttctggactaggagctcttagcacagagtagagacctggctttagtcacacagcaattgaatgagtgtatgtccagcacctagcaacatatagccctcaataaagttaactgaatgactgtgtctttggaaaattatggaaatgtaacttactctttagagttgctatcaagcctttaccaaaagttttctattaggagaaatagtaagcaaatacgttggctcactcagtcttttcttctttcccttaactctatacatcttttgactgccattctcactccctttgtgaactgcacattctcacagcacccctgcccctggacacttgtgggagaggaatccacaaattcctttgaggctccatcaccggaacaagttctcagtagctggagaaggcctgggtggcaaacaggaagtttttgtattctggctactttgtgccgtggggtaaaaaccgcagagtccacctggagactgcaaaaagaatggtagaacaaacaaaactgtcactatctccacctaaagcttttctgggtggacattctgactcaacatcactcagaacttttctttccagaactggctcctcatgtgcaagacagaagagtcccgcagaaaagtgtcatgttttagctctcatcgccaccccccaaccccaaactcttctccttcacttttaagaatgttgagcgggacattttaaacactgttttggatttttaaggtttcaaataatccgaaggacacttccctttggcagcgacagttgcaagctatgagccaaaaagaaatagaggttgttcccctaatctccaaatacattctaccctcttcaattcccaggaccccaacttgtcccttcctccagcttacgcgaggggcaagtggcagctcttctccgcctgcgtgcctggcctcgtcaacaacacccattagtctcccgtctcccggggcggcgggggactcccaaccacgcgcccagggcccttgcccaggtactggggccccgggagccacgacggcccccgcgcaggcggatgggatggaaccagccctggggacgcgggtagcccaatgggcagcctcgccccggaggcgggcccaggccggaagccaccccgcggcacagcggccccgcgatacggtgcccgcgcccccgccttctctggcacaggctccgcggccaagggcggcaggggccagcccgccgggtccccgccgcgctctttgtcctggccgcgcgcgggcggacgcgtgcacccccagggtgaggggaggtgtggagagcgcgcacgggagcgcgcgggaacagctcgcgcccgccgggcgtcggcggcgcgcgcccctccgccaggcaagcagcgagcacgcgcgtcgccgccgcgcccgcccctcccccccgcgctcgcctcggaacttgctgactgcgcggccgggaggagccgagccgggcggcggcggcgggaggctacagcgcgcgggggtctcccgcgtcccctccgcctcgccgggagctcgcgccctcgcccagccgagctcccacccccgcttttttccgaaggcgctgggcggcgccaccctccggccggagcccggcactgcacaaccccctccgactttcaatgttccacactccccggccagagcctcctcggcttctttttttccctccccccccttcccccccccacagctgcctccatttccttaaggaagggtttttttctctctccctcccccacaccgtagcggcgcgcgagcgggccgggcgggcggccgaggtaaggcggcggggccggggggccgcgtggggggcggccggggcggcggcggcggtgggggagggggcgggggcgggcagctttgttcgcgccgggcgcccgcgtcgccggtgtccgcgagccg

SEQ ID NO: 25035 - DNA, 2300 bp, Homo sapien
ctgctaagcatacctgttctttagttacccttttctctctttccctgtcatagctcctctaccccaactggatgcacccaaatggtagaaggtagaataagggggagatgctctgcttctcttattgtggttgtccatggatctcttgcttttccccttttatttgagcattttgaattgccaccaatattggcaactgcaactgtgcctctttggtttgtatgtccaaggccaatgatataatagctatatccttcgaacctgcccagacatacctagagaaaacattttcaggtatctctaggtaggtgtgagctaggaggaaggttagttaggagcagagaccaaaaagagatataatgaatgcaactctatgaatcacaagggaaaaagtctctaattgcagaaggagcagtaacagttttaagctggagagcctgggttggtgcccaaagcatttctttgtttgccaaaagctgcctcaatgtggtatttccatcaacacctatttgttgagagcctactctgtgccagacactattatacaggctgtaattttctattggctctaagccattctgatacataaaaatatagtttcctcaaaagagattagtattttataatctagttcagcttcatgtgttagcacttagtctgaatatttgccattgtgaaaatatgcaatatctatgtatttttcagacatgagccaaagtattgaagtgcttcatacttaattgttcttcaaagtgttcaatctttaaccaaaatatttctcaagaagtatttcatggatatacttgttatttatttttgttctctgaaagaaatgcctcctgatgttaaaaatcattttgctaatatctcagtcttattcctttttagagtcctctacactctatcaatatagaactagctacagttaccagaaagtgctatattgttttgtgcctctggatctttgaatatgctagactcccagctgggaatgcacttccttgcatgaaaaatgaccacacaatattctttaccacagttcaagaatcaactcctttgatcagctcttttacgctaattagaatgcccgtttccccacttgaggcccaatgtattctatataaattcctattgttgtaattctcacataatattcataattatttgtccagttttcttttcccatcttgtgatttcccataaaatcataagattttatgaacttattgaggacagagattatgtcttatttgtggttatatcctcagggcacaaaaaagagaaactcaatatatgttcagtaaattcattgaatgaataaatgaatcaatgaacaaacaagcaaatgccatatgcatgcatatattcaactcctaggaacacattttactggtattttatatcttatatttatttataatatataaatattttatatattatatataaataaatacaaatatttatttatatataatatataatataatatatttatttatatataatatataatttataattatataaatatataatatatttatatataatatataattttattatatattaattatatatataataaatatatataatatataattttattatatattaattatatatataataaatatatataatatataataatattatatacattatatataaatataaatatttatataatatataatataatatatttatttatatataaatatataatatataattatataaatatataatatatttatatataacatataatataatataataaatatataaataaatataagataataaatataagataagacccttttctgaagatacttctaagaagtatcagcaatacattctatgggatgcgtataatggttcctggataatataaagaaagaaggctttcctttctcaaaaaggcagtctgttataaaagtctttgtaagttgaaaacattttttttgaaaagcagaaccctgtagttaaagaaaattcagcagcctaaattctttactacatgtgtgggtatagtgaaaacatttagctatctgatattacactatcgttgacttctcagttttagtattcagagaatgacctgaacttagctgtgttaagttgcctgctccacaggaaaccacctctgtaactgttgcttgctgctttctctttaggcaacacccaaagccactgtcagatgtcatggagatgagacctcacaaggtaagtgcaaagaaaacaggaacaaatacattttcaaacagaacttggtgaaaaca

SEQ ID NO: 25036 - DNA, 2300 bp, Homo sapien
ctctacaaaaaaaaaaaaaagaaaaaaaagtgtttttaaattagctgggtggaattggatgtacctgtagtcccagctactcaggaggctagggtgggaggatcacttgagcccagaagtttgaggctgcagtgaactgtgattacgccactgcactccagcctgggcaacagagtgaggcctcatctctaaaataaaaaattaaaaaaagaaacagggaacacagaacaataaagttgcaagcaacattcaggtcttgatgtgctagtagagttgggattaaaaagcaattatagctttttgtacagagaagtgacatttatacaactacaagttttttggtagattccagtttttcttacttgtgtatttattcccatactcttccttactccttaccttttttttctctcttaaaaagctctcataaggtgacactagcgaaacggcagattcaggacctctgaaaattctctcttctgtaaaagcaatgagaaaactggcaaaaatggtcagaatttatgttttccaaactctggaaattaatgaagccctttcagaaatttggaaagtatttattggagcaaaacagcagaatcatggtagcaacagtgagctttgtggcattttaaacttgttctattcccatccccactgctgatctcaatggtaaccttgaaaactagccatccatattcaaagtgaaaaccaacagcatggcagccactggagggggaaaaagacaattggagcaccttcaaaatcccattctcaaagatctgtcattatttgacttgtcaggtaattctctagggatgcctatttgcaagattatctttatttcacctgattcagagcttcaccaggctcttctcttgtacagagaatagtcttttctcttgtacagagaatagtcttttctctggagattctgtagaaaacacaggaattgttaacactgtggatgcatagtcatgaataacagttggaatgaacaacaagctaaccaaaatgcttaaaaaaatggggaagtgggggaatcagaagtccataggggctttgataagtccttctaatccataaaaccatggtcgtacattctcagaaaaaagctcagaaaggccctaagctctcaccttggggctcacacaagcaggaagtgaaggcccagtcagagttctcaattgcctggctgaatgatgatggcatattccaacattcacatagagccccttgccagagattaggagactcattggttctaggcattgaagaaaatctctgttcaattactggctaatcattatcctaactgaatacagatttcagtgaccacacatgaaaaggaacacagacttacagaatttattaaataaacaaaaacaacagcaataaaccctggggaatttgctggagaagaggaagattctgatttccagagttctcacattattgaaaatgccaaattttaacaaaaacttatgagacacttgaagaaacaagaaatttggcctatgcatattttttataaagccttcaataacaaatgccccttaggaaccctaaatattggaataattagacaaaaattttatgctattttaaatatgttcacagaatttttaaaaatgtttaaagtaatacaggaaaatatgagaatgcctcatcttgaaggaacattttactggatgtagaatacttggttagcagtcttttctttcagcattttgaatatatcatctctctgccttctgacctccatgatttcttatgagaaatcacctgttaatcttgtagaggattccttgcatgagatgagtcatggccttcttgcttctttgaagaatccctcttcgtctttttcttttgaaagtttgattataatgtgtcgaggtatgtatctccttagagtttattgagctccttggatgtgtagattaatgtcttttattagatttggataaatttcagcctttttttttcttttcttttcttttttttttttttttttttttttttttttgcccttctggctgggactatctttatgcatatgttggtatacttgatgatatttcacaggtttctggggttatattaatttttattcattcttttttattctgtccttcagacagaataatctcagttggcctgtctttaagttcactgattctttcttctgcctactcaaatctggtgttgaccccttccggtagatttttcatttcaattattatacttttcaattccagagtatctattcagttcatttaaaaaataatatctatctattggtt

SEQ ID NO: 25037 - DNA, 2300 bp, Homo sapien
gagtgcccaaatatttatgtcgagttgagagctagggataggcatgagtctttcttaaacatccttctcttctccttcctccaccccctcacttgccttcagaagcattgatcagagagatagcagtatcttcagttttttttaaagcaacatgaaacacactttattcctgctaacattaggaaaagcgagctgttttccaagccctggaggaaggaaattcagctaactaacgtgaggtaatgtagggtggctatttcttgaaaggtagtgaatcataactataaccatactatggaaaaaagtcctgccttaccaaccactccactgactgcttgtcaccaaaactacgctatgaaacgaattgtgttgagtggctttcattgtaaaagattttggtgaagggagggaaagaaactggtaggggttcagatcagaagatctggctttgccagtttctggagggtgtcagaatggcttcaacatacctacttccttggcctcaactggaggttttgtagctgtaaacaagaaggattgcatagttcagaataacgacactgtaagctcattgtggaactgggttaaaatcagcatgtagatctactaagaaagaaacacactcagcactactacagaaagaaacagccatgggccctgattgttagctttctggaagccatttcatttttacaatagatttatcacacactgtattgactttttccagtatagagtaagagaaagttaatattcctcatgttttgtctgttgacagactgaaaataattgcattgagtttggctagaatatcctgtcattccataaacatctcaaactccacatggctaaaacttaacccatccatgcccccatctgcatgcacacatacatgcatataacttcatttctcagtgtttttttctccatgaatggtagcaccattctctttcaagaaagagaaatacttccccttgggattatcctatctctacttattgctgcaggggcttccaaaattaggttttctgtgttcagtcttgcattcacacttctgaaacccagagctgaccgagacaaattcttcaacttcctgtcagtcccaacatagatttaaaattcctaacctggctcatgaggttcaccatgtattcctgcttccctaagtcagcctcatatcacaccaacctgtgtgtggagtggctaaatactctagccaggcaagctctctcagttcttctacctggctcctctggagccctccttattgctcatcccattcttagcctgattcaagattcctggtccttcaaatctctctttaagtgtccttacctggatctttctctagttagtacaaatttttctatctaccattggagcgaacattttttgaaactttgtatcagtcctgccttactcttggtggaatcctgtggtcctagtcaagtgcctgctccatgaatgtgctgaataaatgaataagcattttaattgtgtatctgtcattagtgtcagatgtgttatttattccagcatggttttagcacacagacacactctttgatgcagacttttcttttctttttacatatagcaacaataaaaaactagactttcatctcctgaaaatatcagtctaataatcacctatggctgtctctctggttgctgaaggaaaaaaaaaaaaaaggcagggcacacctggattgcattagaatgagactcactacccagttcaggtgtgttgcgttgtgggtctccggcacatttcagaggctcattaggaccctgaccccacactggggtttacacccctaaaagcaggtgtgtcccgtggcaactgagtgggtgcgtgaaaaggggggatcatcaattaccagctggagcaatccgaatcggttaaagtgaatcaagtcacagtgcttccttaacccaacctctctgttggggtcagccacagcctaaaccgcctgccgttcagcctgagaggctgctgctagcctgctcacgcatgcagcccgggctgcagaggaagtgtggggaggaaggaagtgggtatagaagggtgctgagatgtgggtcttgaagagaatagccataacgtctttgtcactaaaatgttccccaggggccttcggcgagtctttttgtttggttttttgtttttaatctgtggctcttgataatttatctagtggttgcctacacctgaaaaacaagacacagtgtttaactatcaacgaaagaactggacggctccccgccgcagtcccactccccgagtttgtggctggcat

SEQ ID NO: 25038 - DNA, 2300 bp, Homo sapien
attgcatagttcagaataacgacactgtaagctcattgtggaactgggttaaaatcagcatgtagatctactaagaaagaaacacactcagcactactacagaaagaaacagccatgggccctgattgttagctttctggaagccatttcatttttacaatagatttatcacacactgtattgactttttccagtatagagtaagagaaagttaatattcctcatgttttgtctgttgacagactgaaaataattgcattgagtttggctagaatatcctgtcattccataaacatctcaaactccacatggctaaaacttaacccatccatgcccccatctgcatgcacacatacatgcatataacttcatttctcagtgtttttttctccatgaatggtagcaccattctctttcaagaaagagaaatacttccccttgggattatcctatctctacttattgctgcaggggcttccaaaattaggttttctgtgttcagtcttgcattcacacttctgaaacccagagctgaccgagacaaattcttcaacttcctgtcagtcccaacatagatttaaaattcctaacctggctcatgaggttcaccatgtattcctgcttccctaagtcagcctcatatcacaccaacctgtgtgtggagtggctaaatactctagccaggcaagctctctcagttcttctacctggctcctctggagccctccttattgctcatcccattcttagcctgattcaagattcctggtccttcaaatctctctttaagtgtccttacctggatctttctctagttagtacaaatttttctatctaccattggagcgaacattttttgaaactttgtatcagtcctgccttactcttggtggaatcctgtggtcctagtcaagtgcctgctccatgaatgtgctgaataaatgaataagcattttaattgtgtatctgtcattagtgtcagatgtgttatttattccagcatggttttagcacacagacacactctttgatgcagacttttcttttctttttacatatagcaacaataaaaaactagactttcatctcctgaaaatatcagtctaataatcacctatggctgtctctctggttgctgaaggaaaaaaaaaaaaaaggcagggcacacctggattgcattagaatgagactcactacccagttcaggtgtgttgcgttgtgggtctccggcacatttcagaggctcattaggaccctgaccccacactggggtttacacccctaaaagcaggtgtgtcccgtggcaactgagtgggtgcgtgaaaaggggggatcatcaattaccagctggagcaatccgaatcggttaaagtgaatcaagtcacagtgcttccttaacccaacctctctgttggggtcagccacagcctaaaccgcctgccgttcagcctgagaggctgctgctagcctgctcacgcatgcagcccgggctgcagaggaagtgtggggaggaaggaagtgggtatagaagggtgctgagatgtgggtcttgaagagaatagccataacgtctttgtcactaaaatgttccccaggggccttcggcgagtctttttgtttggttttttgtttttaatctgtggctcttgataatttatctagtggttgcctacacctgaaaaacaagacacagtgtttaactatcaacgaaagaactggacggctccccgccgcagtcccactccccgagtttgtggctggcatttgggccacgccgggctgggcggtcacagcgaggggcgcgcagtttggggtcacacagctccgcttctaggccccaaccaccgttaaaaggggaagcccgtgccccatcaggtccgctcttgctgagcccagagccatcccgcgctctgcgggctgggaggcccgggccaggacgcgagtcctgcgcagccgaggttccccagcgccccctgcagccgcgcgtaggcagagacggagcccggccctgcgcctccgcaccacgcccgggaccccacccagcggcccgtacccggagaagcagcgcgagcacccgaagctcccggctggcggcagaaaccgggagtggggccgggcgagtgcgcggcatcccaggccggcccgaacgctccgcccgcggtgggccgacttcccctcctcttccctctctccttcctttagcccgctggcgccggacacgctgcgcctcatctcttggggcgttcttccccgttggccaaccgtcgcatcccgtgcaactttggggtagtggccgttta

SEQ ID NO: 25039 - DNA, 2300 bp, Homo sapien
actgcatttttatagaggtgccccgtgtgctttgagagagggagaagctgccaccttacgctgttaggggagagcaatgcagggtgaaggtggttaacagtgagttttggctggaagaacaactgagaattattgacgtccaagataaatcttgaagaataagtacacgtcagatgcatgaagaggagatgttgacatcagagtgctagtttgaaggaagacgcaaaacatcctggtgtattagatgcctgtttatagaaaaatatgactgaaacaatgaattgtgcagtgaaagtgaagcaggggccaactctggagggcctctgtgtcatgctaaggagttggaactcttatcttgaaggcaatgtatggttctcaacagacaccattatctagtttgctttcttgaaaatgaccctctggcagtgtgaagactggattaaaggagaggagaaggacttgagacagataaatcaattagaaactcaatccaagtgaatttaggttcaatcatgacattttcagacttaaaatttcttgaggcagccaatttaaccatagtagtagagaaagaacaagtatcatgtctttactacctcaggcaaaaagtggtttcccagagccctctattcacaacacttgcccgtttgtgtatcttttttacatttatttacacatctgtcctttattatatcagctctaggaaggagtgaagtgtgttggtatttgggaacgatgaacttagtgcctgatttattgtacagaaactttcaattcattcatgaatcttcaagtaataattaaaagcagaaattttgaaacatgttcttaaactctgtccttacatactctgtctttaatcaattcacaaaaacaactaaattcctactgtatctttagtatttccataaatagtttattcaaacactaatcttctctacaaatgttgatttgaatgacacaatttaaacattattgaagaaactttctaaattctgcagtgctaggtggatatttatcttttttatctatcctcacctgatattttgctttgggtaaatgcttctctacttttaactaatttttctgaatgttaaattactagatatctaagaacttctgttcttaggggaaagtttataaaatgacatactgtattggaaagttttccttagcacatagctgttctaaccctctcactgggaaaaagaatgaactgtagaaatttgcaattgtttcaagacttcagaacattctagctgtggcctttgaataagttccttatgtctcaaatacttcatatttaaaatattttaaggactttatacagtatacataacccagatcttcagtgaatggtaggtagtatggaataggatgactgaggcttaaaaatgctaaattacttccccaccagaaagaactgctggcagtgccaggacttgaactcgtgcatatatatggatttacagcaatctatactttgcaatacacaggaggatgaagcatttctccagttctgtttttaaatttggcctagttactggtggaggtgaccagctgcttcacaatttaattctagtccaacagattttagtgccacgcacttgtgggtggacatagtagttcttcctcatgccttgctcacttctaccaagtattccttctagtcttcttttctaccagttccttccattttcctccctcggttcaggcagcagctagttcaatgtctattttaggcttgcaagaaagaaaagaaaaactgctttgcctttagaaaatgttacgaaataatcaggaaaatgttaaaattatagaagcaagaggttatgcagaaaagaaatgagaaaagatacgagtttaattatagctcattaaagtttccttgggtaataggtgactgaatttataaaaaacatgacaaagagttcttcttaatatggttttacatctgcttgcatagggtcaatcccatgattgtttttccaagaaaattagtattttatgttcagcataaattatatacatatatccttgtatgcatataagagagagggatttttatttcctaaacaagaactaaataatattacttaatttttaggccccatgaaaataaaacatatcttgctgttgggagtatgaagacattgatgttgaatgtgtccttgtttaatgctggagatgatgcatatgaaacgactctacatgtcaaactacccgtgggtctttatttcattaagattttagagctggtaagtactgtaaaccacaatagcatgatactacttggtatt

SEQ ID NO: 25040 - DNA, 2300 bp, Homo sapien
ctaaccaacagttaattggataccctggaaaaaaaatggtctataagaaatgtatcaacaattcaataaaaatgcttactaacctggtattaggtgccaagcctctaggtgccactgaacacaggcaaggaattgccataatgctgacattcaagaactgaccctggatcatttgccattgatcattacagtctaaaggtaatgaaagtgattggttattttccctcaccagaacaaaatgtcaacagaacctggcacagttctcaaggagatacttttcgactcaccagatttgggagatccctgtgccctcctaaaagaaagaaaacaaaacaaagacataaaacagataacgcgcgcacagacacacagacacacacaaatctattaaatatgagaaaattagagaactcatcattatatatgttaaatactttcttcaattagatagtaagtaaaaacgtacaattttgttgctgccaacataatgtgttgattcatttaaaggtaaactagtattataaggaataataatgtactatttctttaaagactataacccttctttaatatggctttaatatttgtattacacactagaccaaaattatcacgagggacaaaactgtgtgttttgttcattttttggtgcattgttgtattcaaagtgcctggcatatagtaggcactcaaaagaaaagggaaagggaaaaggaaagaaagggaaaaaaacaaaggaaaggaaagaaaggggaagggaagggaaaaagagaacggaaggagggagggagagacagggggaaggaagggaggaaagaaggaaggaaaaagagaaaaaggctgagtgagtagttgtttgcttactaggacctgtaagagtctgtgattctatattctttactactatgttagaaaaataaccaaagatcctaagtctgatcaattgtttgtcagaatgttttatgctttaaagatacaggttatctgtattacattgagtttttacctacctttcttgcacatcatcagagctgttaaatggtaaaaatgatatttcacagtcttctgccctaaaatgtaatgaaatttgttattaacagtcattgaacctgggatacaatttttggtttaagaaaaagacttacttaagttttgccagtgccttaacaacagcaaaatctctccgttggttaggggacatccatcgatatttttctgccagagccaaagttcttccaccaaagccaaacatggctgagaacccaaagcgaagaagcttgccagcggtgctgaaggtgcagacgtcgaccagctgtacatgcccttgaatattacattaaatattaatcagtgagtacagtaggacttgtatcaaaacagcaaacataagagagcatatttattggcttataggagaatatctaaaggtactgtagaccatgaacatcctcactttctcttcagttccctttacctataactacaataattaccatttttaacttgttcaggtactagtgaagaaacacagagtactaaatttttcagcttattgctatttcctataaaacatggtcaaagaaacgaagttaaagtagataggcaaggtaaacacagatttaacagtagtttagtgttacatatacctgagcttatatgctttttaccaatagggataataaaatatctatagacatctactggctgaaatttttttctggttatgttttttcattaataacataatcctagtcctagagtcttggtacagtcctacatcagtgttggatatacttaaggagtattcattaatgttcttcatctggttataaaattataattttgagcacactacaatattttttttctgtacagattacaataaaacttcatttactgctctttacaaagcaagtattttgaaaagacaggcaatccacatagtaaagcattgccttttggttttttagtcaaacatttctctactctaagagacaaagaacctgccttttcttaaagtctgatggaaataagatggccttccttatataaatcaacatttccttataaaatatgaactgctttggaagaattcttacccattataatgtgcaatgttgcagttatcacatgaggaactccatgaagagaatgtgccaatacattggtagatcctgccaaagcaattttaaaacatgcactattagggtagaatgtgttcaaactaacatttgcttttactttatgtagatgtcattcttcaatgttcagatgaaaaataaacgagaatttataaaatc

SEQ ID NO: 25041 - DNA, 2300 bp, Homo sapien
ctttgaaaagtcataaaattttgacaaaagtggggatggggtggagcttaaaggaaaaactgtctgaacaaaggaaggcccggcagactaggaatttggcaataatacagtggttttggaccttgatgaggaagttgaaatggaacataaaaaccctctgcatttagctccatttatttgctcaggcagctctcactgcctaaaattttcacccctgctgttttgctcaggggtgggatgaggggtaatgagggaggaaattttagggggtgaaaacagcacaagccaaaaaccctgctcagatactcccttctcttgaagccttttccagatccctaataagaattaaccaccctctctcacacactctgttgtactttgtccttctctgttaaccagcctctgtgttttgtgctgtctgtatttgtggatacatcttcctcctttaaagcacgaatcatatcttaatcccttggcccttcttcccagtacttagcacaagtgctcaatacatgtttctttaacgcgtgtaacagaggaaggcgaggagagtgagtgggattgggagcaggaggattctgaatgtcattttaaggggtttgggctcgctcttcaggcagcaatgagccatagccgcctttgaactgtgcagcactgaccagagctgtgatgccaaaggatgcagtggaaggggaggacagccagcatgcctgggcatggtccccaagtcagaggacatcagtgggagaagggagaaggcatggaagcaagtggctaccatcttatgaatctgagcactcattcaaaggtggcaaggaaaaaggaaggcattgagcacggttttgaggtttccagcctgggtgattggaggctgatgcaggcttcttaccaaaaagggccctaggcagtttcaccaggaatgtttaaggagtttatcatgaccctatctcttcctcgtctaaaactctccctaaaatcaaaacagtatgtcctgttgaaatactttattgtatcaaatataatgagaagtaaaatattctctctacttgatgtatgaaacactgacttcttgtagtggacaattttcacttgtctttttagtaatggtttttattaaaaatagatgttaataactgcttgtttaatctttaaacgtggccctctgagagcagcttaccgtaaaagaaacggttgtcagctttctttttgctcctcagtccctcctgccccttcctaacaacagaaaatttgctttgcacctgctccaactgggttcgaagagataagcatcttgcaagcccagaaaattgtagtatcaaatctcagccccaactgtgaggcagcactatcattgaatccctgctgagaggcgttgctttcccaattcccaaaagagttctttctcccctggccccttttcaggcttgaactctgaccgaaaccctctttttaactcccagcatgcactgcacttggtactgacactgacccatccctgcttcctctgttctgcactggactcatcagtaggtcaggcgttggtagccctggggtcactggggtgcccaattccaataatgagcacatttagctaaggagaggaaatgtacccttctatttgttacagtccattgctttttttccagaaacaaatgctaaaagaacatttgatatattgtggtttggtaaatacacatagcactgcctaatattcacaaagttgcctcttttttttgcatcttccttcataaattaaatatattgttctaactcatgatttattttaagagggatatacctatttcacagctaggaaaatgttttcaaataaagttatattcagaatactcttgcaagaatttcaaataaaaatagcaaatactatttaaatgcatataacattctaacagacttgtgtgtcattttaaagggaaagaaaaaaaatgatgacaaggactttacaactttgtctttaaaatttcttcttaggctttccaaacagaccgaagtcattaaaaatactccttaacccccaaagtcacaaaaaagaagctacccaggtttattatgagaaggttgaacctctgttgaagcttgcaggaataaaaactgatgtaacaagtaagtaattttcagaatataatttcaccatctacaaaaacatacaaaagcaaaataatctgaatttgtccttaatgcaaacttgggaaactacttgtaatatctatagcatttttacgtcttcataacctactgcagccagctcgagggttataatttaattatttttgttattttta

SEQ ID NO: 25042 - DNA, 2300 bp, Homo sapien
aagcttattggacagccaagtagagatgtcaggtagggagctggacataatacctaaagttcaggagagtggttggagctggtgacatcatttgcagaaccctggatggtacataaagcacgggacagtgtgtggatagatcctaaagagagccctagggcactccagccctggaagaaggcagcttatcaaaggaaaaagaaagaaagaaggaaacacaatccttattacttccatcttcaggacaattcaaagccagtgtttttgacttcctggcttgagtgaagcttgaaaaatggcaacttgcccctttgcaaagctcctaaggagtagccattggcttggcctgtttgcactggctctgggtgagcttttaaaatgccagtgagctctaattgtgttgattgcctaacagctgtgaatacaagatgctgactccagaactgcaactcattctgcgaagggcaccgtccttttccctctaatgactgctgaacagagccacctgaagcctgcatggggtttagcagcagctgcacttctgctctaagaaatagctcactgcagtcagatcaaactgaagctcttccttgcttttcctcgaagcttgggtacttattgtcggagcattaaacagtaagagtcctagcttaactggtgcacagtgctttatgtttggtagggatttggttaggcctacaaaccgtctgagctaagaaccttgagaaactcctgctatagttagctctttctgtgactctgcagtgtgaccaggaatgaggacagaattaagaatttgctgcctctatgatagaactgtttaggcactagaacactggaactagatctacaaccctatgaatttaatttccttttcaactcccctactccttcttttcaatatgatgataatgatcttgtttaaaaaaaaaaaaagccttctgctttacttcccactctgctcctcttcccagggactcactttcttcctgactgcttccccattacaagtactcagctccctgttttatcaccctgcttagagcagccattatcagccttggctgaacattggaattacctgggaacttttaaaaatccggaagtctgggtctcgcctccagagattccagcttagttgtcttgagcgtggcctggacatttgggttttcaaaagttccctatgtaactttaatgtgcaaccacaattgagaatcactagcctccagactctctgtgttatcaaaattaatgagcagctgattttagaaatctcagttatcaggagaaaagggtgaacccccccagggctcttctccttttccaggtgacacttctttatggcagtgcgtgaaagtgaagccctgctgcttgtaatctccctcaagggagtgcaagatccaggcaaagacaagactgcagaggcgctaccttgggggaaagtaggaccctaaatacttacacctggaggcacttacctttaatactgaatttgtcagatgcaaatttgtctatgcaaaccagggccttatctctagcttcccctcaggggttttgggaagtgcgctactactctgaaacagggttgtaaagcgtcacctgtgctctccagggaaccctctggaaaggaggtggaaaaacagaggcttccacccttgcaactctaagtgtgttccttggccagtgggatccatcacctagtattttcttagatatgtggtatctgggggccagtcccacacctatgcaataagaatctccatttgaacaagatgcccaagcgattatatgcaagtttaagattgaggagggctggtttaactcgagggtaacgaaaagtacgaaatcgtactttacaggagaagctaggcggagggagccacttattcttcctcttgcagctgggtctttttgtggtgagtggcgaagcggcgaggctggcaggccagggtgctggactgggtcaggcgcggccccgcctccctcctgggtccctgccctgcgcgccgttgctgtggcagcgctggacgcggctagagctggggctgccgcgccctccacctccttctccaaaggcctccccggacccctggctcgggcccagcctgcgactccgccatgccctggaggaggcgcaggaaccgggtgagtgccctggagggcggccgggaggaagaggcgcccccggaggctgccgctgtgcctccggcgctgttaacgtccccgcagcagacggaggcggcggccgagcggattctgctccggggcatcttcgagatcgggagggacagttgtgacgt

SEQ ID NO: 25043 - DNA, 2300 bp, Homo sapien
tccccagttctcctccggaactccccaaagttggaaaaatgagagcctaggcacgagttgcatatgcctgcggcatagtgtgctgccagtcggggcagctgccgggtgaggggcagtacttaacctggccctgccgcaaacgtcgggctgtgtactatcttctaagggctagtactccgacgccctcgagttttagcccaacactgaagatacagacagtacaggggtaaatcctgggcccaggctcctgggtgaattattttatcctcccctatgcgctttgtcagccaagtgaatgtagaaaagcaagcaaaactccagaaccccacaacgattcacgccacgcttcggtggcacaactcttttcttccccttttagattagtactgtgcagggaaggctgcacctgctaccttcagacaccggggatctggctaggaccctcttcctctacccctactctctcctcccgtccccaccctctcccagatgcaccccaatccagcctctcaaccctgtcgctgtttgcaaactcgagggatgtttagtgcaattgcctttaaataagcaattcacgtaagaggtatttattgcagagggtttcaggtctgggagggggtaaggagttagttaatgaaggattagaggcaaagctgggaaagaacgagtagacaggccagtttctttctttctttttaaaatctattattctggaaaacccttgttcgaaaagagtaaagaattgctatttgggcaacaatatggctccttcagaactggtcgagaatttctgtggtctttgcttgaccttcaagttgggagtttcaaatcagaggctttgaagtctggaggagttcgcagccattaatccttccggggttgtgctaaaggcgtttctagaaagagatcggaaagacccgttcagcacaggcccattgcatcttctctttgaaaacgcttgtctgaatcaagtatcttatacagacccgagactgaggggagcaagagcgcaggtccggctgtggcgaggtgtccaccaccgtacttgtggtcaatgcctggactagagagccgaggccgtccagggcgggctggccagggaaccagaagcgtccctggactggctgagtgagggtgccctttccagcaacccagtggccatggttaaaaggcagaatacaaccgtcaaagaagtccccagctcccacataagagagcgcaaaggccaatggaaccaaggcctcctcgcgagaactagctcgctttgaggacaagatcctggggatggaggtggggactgacgtagtgagagggtctggaggaacagtcgtagctgaaggtcaggacatgaagaattgcacgtatggtagggatagaatggcaggtacaacttttctgtactgaaggaactgggagaggacgatccggttagggaggttggggaactaatctcaacgctgcgtttacagatgaagccgcttttatatggcgtatatgtttgcttagaggggccgacggagattaggagaagccatcctttggcgccaatgatcaaagcgtctgccaaggagaagaagccaagggatgggcctttcagagagggcaaggagtcatgctgctctggatgccagtgtcaggacaagaaatcgaaaggagcgaggactcttcactgcgtgcctcagtctccccgcttctgcctctttcacctctgtcctacttccggcgcgaaagcaggccactcgctctgatctagacctagttaacattagcttttcccttccttccctcaaatcccctcccccctctatccccgtcccttctgccgcctgaaagggttaatctctcctgcgggtaaaaacaggtccgcggagtctctaactggcgacagatgggccactttcttctggccacaaaggggccggaatggagcgctccgcggcatacaaatgggcaggtcacgtggttccaggctcttggctggaccgggaagaccatatggcgcatgccggggaggaaggaggaggggcgggggtaggggtggagggtgaggggagcggttgtcggaggagggcgggagacgagcaaggcgtggggagaagtggggaggaggggagaacggggagcgcacagcctggacgcgtgcgcaggcgtcaggcgcatagacctgctagcccctcagctagcggccccgcccgcgcttagcatcactaactgggctatataacctgagcgcccgcgcggccacgacacgaggaattcgcccacgcaggaggcgcggcgtccggaggccccagggttat

SEQ ID NO: 25044 - DNA, 2300 bp, Homo sapien
atagtgatgacatgcattgagatagagaacgaagaggagacatagacttggttggggttgggggtggaggacataagaggttcaccttcaaacacattgattttgaggtatttgcagggaatccaaggggagttgtcttgttagggaacatacttcataatttctggacagatcttggagcccttctcatgtgggggataattaaaggtgtaggaccaagggtagttcatagatgtttattgtctgtctgccagcatattctccttaattttttggagtattttgcatttcttcaccaataatctgtgtgatttggatggggctccgcctaaatttgtccccaaggatagaatatgaaacacacctggccacagtgattggggtgtaaggttggcagcctcaactagtaaagtaaatgtcagtctaaggatgtgtgcaggagttgctgacttagaaataaaagtctactccactcaattccattagactaggaacctatgaaaaatatgaaccaggaaccaggttttcctaggaaccaggaaaaatatgaaattagagctgttgaagccatcttgccaccatgaggatgatagtaactggaggccatcacattgagcctgagaaggaatctaatatataagtttgagatgaagggtaattgagttctttttatgtcatttcaaatctgaatccagccatgcctgaagcaagaccaaagactaggcatttcaaatatgtgagccaatgaagtgcctgcttttcttataccagtttgagttgtatcctaatgaatataggcagccctagctctgcatagtagtgcaggaccataaaaaatgactttaccaccaggtgcagtggctcatgcctgtaatcccagcactttgggagggtgaggcagcggatcgcttgacgtcaggagttcgagaccagcctggcgaaacgctgtctctactaaaaatacaaaaattagccgggtgtggtggcgcatgcctgtagttccagctactcaggactgaggtgggagtattgcttgaaaccaggaggtggaagttgcagtgagccgagaccatgccactgcactccagcctgggtgagagtgagactctgtcttaaaaataaataaataaataaaaatgactttacaagctgaaactctgaaaagttggtccaagacctttagatttttttgttaaaatattaaagaagactcttattttgagaaactaaaaacttataaaattaatatttatttagtatactaaaatttattagataattaagcgttcaaatgttgtatttctttgtaaaagtgtatcaaaagtagtttggacaagcattttttcttagtgaattattacactcctttataagtttggatcaccttccaacattttactttttgccctttcaatgctgtaaaatatctctgagatttcctttaatttgaagggtttttgtctgtttttctgttgctttttttattacacacatatatttaacagtacagttttacatagaatgctaagagcatttcttcatattttacaaaaaggctggaaacatatggactttgtattagtaattatacaatagcacatccaaatctaattcctaaatagatgatggattataatttgcttagaattcaaaggcttaatgacaataatctggggaggaaaaagagtaagtttattttacataactgaccaaaaaataaacacaagaaatagtaaatagaatttaatgtggtctcatgtgccctgaaggaggtggtgcccgatgcggaggggtaattgctatgtccaagtaatctacctggaacttctgcgacggcagggtcatggaatcatcagtcccctttctgccagacttggtgctaccaacttccttaactcgatagccaggtcttttaacatctgtaaaaacgactgcaaaattgaagagagtgcccttctttctagcttctgggtagacttcttttaccaagcttgtcagttctttcaaggttgcatccatccaagcgtagatctgcaactctctggactgtacgtttccccgggaaaactcgtccgttcggtggtggtggccattattggtggtgaagatgcgcagcagcagcaggcatgttttctcacggttgatcgggttctctggctccgtcttaatctcctcccgggtaacgcgcgaccccaccgccatcttcctcctacggcccgcctgtttttctttactgtggttacttcctctgggatattgtcatcctttttgtcacaaccactttactcttttaagtctat

SEQ ID NO: 25045 - DNA, 2300 bp, Homo sapien
aaataacatgaagcaaattttaaaataatcaatttaggtgtctctttgaagaacacagaaaacagaaactacctcaagaagacccattatcccttgtgggatcagcatttaaaagtgtaaggggtgcaagaatactgaagaatgttctatcatctctcacaatttacaatctggctagtaagccaaacataccttccagggccagtcatattatttactctacaatccagtccccaaataaatgacatagacatgctgttgtatatcagatccctgtgggaggggtgtgatcaggagtggtggaatggtggagtcaaaaagttctggcttagctagattttgaaagtcatgaaggtagtggacagaaagaacaggaatgaattaattagcaaagacagagtaggcaacagcacttagatatgatagaattgaagctgggagcagcagaggaacagggtggatacgtaagaaccctggataaaactttgaaggcagcatattttgtggcacttgaccagccctttcaatgcttcttcttaggtaccttctttattcattctctttttcatcttccacacaggcagcgagactctgacctattttggagagccattaaactgttagctgcatcctactacaggacccttgaaggctgagaaagtcttataggttcaaagaaaagattttctagtagtgaaatttcaagccatagagatattaatatcactgttctaactcccctgacatttggcagtacatagatgagactcaggagaatattatgatggttctggaaagctagtctggattttggatttgatcttggggatattagtaaaccattagaagatgtcttggaattgtaaatctagagcaatgcgctagaaaggagataggaaagaatgaaggcaggaaaatcagtgtgctattttagtagtctatgacttatgtgtaaatgcctggacaaaaactaggcactatttcatctccagagcattcttcattccaaattctccaaaagttatggtttcctgtagctatcaatgacaatgcacttaattaccttgtaattcgaatgcttccattaggaattttactatgctctggattttaatttcaaatgaaaaataattccttccttaaaatattttgtctacgcaaaatattcttttcaatcacgttaagattttaaaaagtgttctaacttgttcttcagagcatagccaagtacaataaaatattggaagccttacttatatgtatagttcagatgtaacatttaggggaacaatgctgcttgataggtctgtcacattgtgtctggttttggatagaatttgagtatttttgctaatgagaatttaaacataacaaaacggaatgccaaagctggctttaaaaagttttgaaccctgacatcatttgtttcttgtatcatgctgtctcaccaaaatccaagcaactatctccacattgtcccaattgtttcctctattctccctcaccaaagtccaacttcaatgtgaaatttccagattaaatatcctttcacaattcattttcattcataacataaacacgataaataactttaagtatgaaagtagcactccaggaagcttagtcttttgcagtttttacattttggcaacaccaatcaagcacctctttccgtccttaccccaattccttggacactaaagagtctatattcaggcgactctttcaagtgtatgtttcagggtgcccaagcagacacttgttttctcgcgggggatgttttgtgagacttggcctccccacttacgttctatttttaggtgagggaggaggaggaggagaggaggaaagattattaacaaactaatcttgcccattccgcgggcagtagtcgggggctggcctgctccgcgtcgcgccgggcgcgccccgccctaccgcgccccgcgcggccccggccggaagggggcgtgggccgccgccgagggaaggcgcgcagacgcgcagcggccggcctgctccgggcgcgtcaggcagggggtggggagcaggggccgggcgggcgctcggctcccagccgcgctccctcgggccactagcgctcccgcgcgcgcccggccgccttcatgtgaagcgccggccctccgccccttccctccccttccttccctccctccctccctgtcccctcctcctcctcctcctcctccggcgcccgcttcagctccccggggccccctgcccggccgggcgctgacagcaagggcgggggtccctgccgccgccttgtctcgcgcagg

SEQ ID NO: 25046 - DNA, 2300 bp, Homo sapien
tataatcagaataatgtctgagtacattcaagtctgaaagattttactgtataagatattttgctgggtgaatttaactaaaacagtgattttatatgagggtggagaggaacagaacaccaggatgagttttcaaatgtgtctttcaggtgtgcttgtgagaaatggaggaagttttgaagatgatttgtcattgggagctgaaggtatgtttgtttggaagaactgtatttttgtgtagttttcaaatttaaaaaaaatgagaaagctgaatggtttcaggtttatgatcctcaagctaaatttaaaggtcttgaaaatggctcaggcatattttacattacctttctttgttaataatctagtcatagtctgtaggatacatgtagggatgactctgaaaaactatgtgaagtgtccatctgtctttcttggactaaatgcttaaaggaacagtttgtaacaaaccgtggtaatataactgagggaagaattgtcctgaaaaaggaaggacacttaaatatttatacatgggaaaacaaaattgaagcttatttttagcgcaaaatagacttatgtcatacttacagctgcagcttgtctttctctttgcatttaagtgtctcctgtcttttccccattttcctgatttttagaaaattaaaggggaaagacaaaatagcagagctaatagaattttattagaaatcatgctggtgtttattccagaaagcattagattttaaaaagtgtgttgtgctatttaaaagtttttacaagttatgtaatgttttccagtagatttataataaagctttcttgtacaaaaaataagaatttttaattattttactggtgttttaaaagctattttatagctcattgatcaaattgcatagattattcatagctgtatagctcagttattaatgtgtacttttttaaaaaaaacaaggatttttaaaaagtctttaaagcttacaagttggtgaatagtgaatttatacattgaatttaatattcttgattttttcctgtttcaaatgcatctgtaaagtaaattacttatttagaaccttctaacatttaaaactctggaatatgcaaatatattagttcttattatttctgttcatatattttcaagctctataaagagcttaaacttactgattcccactcagtacaattgaacatgttgtcaatccgttattaaaatgcactttgcacttttgatatttgccttggtagtttgataatattgaatgattttattggaaaccagaacctaaaaaggagtctcatgaaagagtaaatctattatgttgttttactgaaaattatttcaaggctatttccattcattaagtaaataattactgagtgctgtgagttaggcacctttctggtggatgtacaaagaaacacaaaattgtcataactttgtagatcagaaatgaaaagcaattcatgtgtgctgaaatagatgtgtttataattaattttattctttgtatttgtctataaatttaactttaaacattaacacttacctgtttagaactttaagctaaagttctatcataaagttgaaaggcaatttttaaaagaaagtttatattgaaataagtagaaattttcatgttatatgtgtgaaaaatcagttataaccttaaaaaaaattcacattagaaactgacatatactattgccacacttaatgttaaatcatgttttcctcttaagatattattcattaatagcttttaaatttaataattagtaccacatatatggtacatatcttcctcattacttatttctaacctgttaaagaaatttaactggttccctatacgtttttttattttaagcactcaagtgagagtagttagtttcatgttgccacaacacaaaaacacccttcaaaagctcctggccctgttcttatctatctgtatatcacttttaataatgcagatttaatggaccaagataagtgtttaatatatttggcatttaattctaatattgtaggtaattagatttcttgataattgtatcatagtagttatagtcctactaacaattgtgctctacgtttattgtttttacctgtagccaaccacctccatgaaagtgatgctcaaattgaaaactggtatgtagctgttttgttctatttcttttaaaaaatgaagacctttaatgaaaataaagttataaagttttatataatctgattttgttcgtagcaataatatcttggccaaagagagaagattacagtttcatcagaa

SEQ ID NO: 25047 - DNA, 2300 bp, Homo sapien
gccaaacagaaaaatacccttgcccctctcccgcccgcacatatagtatattaaaatacatcagtgcatgtgcctatggaatccagtttaaactgttatccaaattataatattagaatctgagcattttgtctgaaacaaattgaaatgtctctctgttgaagttccatctctaactttcctgttttcttcagtgagtcttagaaagcttggattatcactggtatgagagagaagggatactaaatatttaattcccaataggattagagtagttacctttgtgtaacccacactctctgtaccttactcctcctacttcctgagtggaagtggttggagagaagttgaaagtaagctcctccctcgcttctctgaaatcagcttgttatctttattgttcctcctaggacaattgccactcctaggacaaggataacagaaaagctcaaatttcacaaaatgtccctcagttccttttaatttctgctttaatctgttcattccttattcttcatcatctgtcttctacttgttttagctgctttacagggaatctcttaaaatgacaaaacaaataaggtgaggaatcacgtagggaatctctgactgtgttcgttggggttagctcttttctgcaactctagcaacttgagacaatgaaccctttataagggctatttattccccagtacacatgtgtaaacatggtaaaataaataatggtttccagagcagaagctgagaaaaaagattttatcacaggaaatcagtaatatgtattcatttataatgtggtgtggactatcaatttattttatattttcatgtttccttttttgccccctttttttgtagtgtttcagaattgttggaactttatgaggaagatcctgaagaaattctttataatcttggatttggacgtgatgaaccagatattgcttctaaaattccttccagattttttaattcatcatcctttgccaaagggatagatattaaagtatttttgagtgctcagatgcaacggatggaagtagaaaacccaaattatgctttaacaagtaagatttttaagtgttaggcatattattttcttaaattatagcatctacagcaagatggtcttattttaaagccttaattttcaggaatagcactggaaagtaaagagattgattaacgcaaaagccatttttacatgttaaaattaagctattttattactccatttatagtggttaatttgcctatttttcccctcctccccaattcctgacttaagtgctaccataacttatttgcagaaccttattgttgtctacagattgcttttattcaagaagaaaagaagtaggagaggagccttgttaatcttaaatgaagtcagtctgtttcaggaactagtctggctaatttgatcagtttcactcatatctttgcttgttttctttctgttagccaaagattccaaaaataggattccaatcctgcattgttcatggatcagttttaagagatcaataaatccctcaccctgcaaattaggtataaaatatatgcttacatgcattttcttaggagaattttgaaagagtcttaatggagttcaagacttcagaatagaatcacaactgtagattcaatagctagttctttctgttttattcaatgttgccattatgctttgtgcttatttctgattttttaaaaatacaaattctagtgcttagagtaaaaatcttgctccttcccacccagtgaatgtagagaaggtttaagtgttagatgaggaaaaaatagggttttataatctttgtgatctaagtgtagtttttggaattctaaacaataatatgcatttaatatatgtgtatgtatatatataaatataaacatatcattaatattgtttcttttggtaggccgttttcgtcaaattgaagtgcttactactgtggccaatgcgttttcttctttatattctcaagtctccgggacgcccctgcagagaattggaagtatgtcctcagtgacctctaacaaggagacagacccacctccacctttaactcgaagtaacactgcaaatcgtttaatgaaaacactctcaaaactgaatttatgtgttgataaaacagagaaaggagaaagtagtagtccttctccatcagctgaaaaaggaaagattctaaatgtttcagtgattgaagaaagtggcaataaaaacgatcaaaagtctcaaaaaattatgaagaagaaagagtcatcttctatgttggctacagttaaagaag

SEQ ID NO: 25048 - DNA, 2300 bp, Homo sapien
tttactttgggacttctgtttttattagagccatcttttacttcagttttcctccaaggataaaacattgattggatttaccaaaatagattataattagagcttaattaatgagcgaataccgagagattctaatagaagatctgatacagtttttgtttgaatttgagttacctcctgtactttgaagacataattttgcataagtaatgcatatttttctaagaagcagtcaaatattgtgtatcttatatctgctgggaatcatatctctgtagtaatattgctctcagtaatttcttatagccactttttttatttatagatcatctgtttcttatagccacatttttttattcatagatcatctgttacgtactgcaagtcagcattccgatagcagtggttttgctgaagattctacagactgcctatcccttaatcatcttcaggtaaaattttctgttctaataggcactatgattaacttcctcattttaaggtggtttttgtattactatatattttaatattgagtctgtataatctttatttttcaagtgacagaacaaaactcctggcatgtagatgttatctaagcatttgactataaattttagatttcattaattcttctctctgaatatgtttttaaaaatatctatcttccccttaatttttggaccaccagtaaacagagattattgtgatcattaacctgttttgtctgttgtttttcttatttttttaaccatcattatatttcattattttacagtaattgttttgcctatttaataactgacattaattgtggacctatagcttgctgagtgttatactgatttttacactaggttgtgtgagataacccagagaacaggcacatctttatccccaagaagcatatagtctatatgtagagtacacagaatgcacagaaaaagcatttgaaacattttttaagcaaattctaaagaaaattgggatgagaaaactcccaaagagcctttaggaacatagcatttaaggggtaaacagacaagaggcatatgtaagttcactgagaaagagtaattaagtgaacagaaacactgggagatggaggagaaactttcagaaggtatggaagaaaagataggaatgttgactggttttcaaatatgaatgatagcttaagagtgaggggtctttttgtccttttataataacatgaaatgacttggggaaagtgttcagctaagggaaataaccgtaagagaagaactgattcagaaaaatccgggctgaaactggagagataccctggtcttggagaggatatgatcaggaacccaggttggagggattcgctttgagtttcctttcagaatggagagaaggagggaatgatggggagagatacaaggaagtttttagatgttggggaagaatgttaggaagtgtttgtccattttctctatgagtcagtgtgttgtattgaaaggaaagggggaggttgttggaaagggaattttaggaaaacagtgaagttctgaaataatctttgtgagaaagtgagaggaaggagggatgtggttgctgctcaggagcaataaaacaattttgagcaacagcagggccacaactgcagtggagacagtgaaattatagaagcaccatgttggtttggtattttgttagtgactcttcttacatatattcttcatctttccacctattttcttttcacaggttcaggagtccttgcaggctatggggagtagtgctgatagttgtgacagtgagacaacagttacgtcacttggtgaagaccttgccacaccaacagcacaagaccagccttattttaatgaatcagaggaggagtctcttgtccctcttcagaagggactagagaaggcagcagcagttgcagacaaaagaaaatcaggtagccaggatttccctcagtgcaacaccattgagaatacaggaactaaacagtccacctgtagtccaggggatcatatcattgaaattactgaagtggaagaggatttgtttccagcagagacagtagagctactgagggaagcaagtgctgaaagtgatgtgggtaaaagcagtgaaagtgaatttactcagtataccacacaccatattctgaaatcattggcttctattgaagctaaatgcagtgatatgagctctgaaaatacaactgggcctccctcttccatggacagagttaatacagctttgcaaagagctcaaatgaaggtttgcagtctgtctaatcaaaggatggggcgtagcct

SEQ ID NO: 25049 - DNA, 2300 bp, Homo sapien
tctttgttttagtctagaatcttttgtcatttctattattaaaaaatcttccctcttaaagttctttctctctttctctctgctatttgaacatgttgactaccttttccttttccaagttttctccctgttggcttctgtggcaccacgttctcctggttctgctcgtagctctctgactaagctttccccttcacctactgaccctcgatgctgtgcacagagttagtctacttccactggactcaaagactggaactactccagaccagaaaataacaaatcaggtaaagtgtgaatttgatttaaaatgctctgtatgtcttgtcacttttaaagtcattctcagatttgttagtagactggaaataattttcccaaaaaaattttgaaaataagtacgttgtcttcagttttgccttttacattttcttgaacattctctctgaatgaatcatgtttagacaattgagggattgaagaaaatgacaatgtaatatagtcatgagagcattcaacaaagagtcaggaggcctagaatgaatgtaatagacctcttatcatgacatagtagacagggagccacttggaaagtaaaaatcaaaggtgtaacttctcaagttataataagatatacctcctcttaactgtaagttttatcctcatgacaattgtcccctaacagttttctgtttaaacagaatgtgggtgtttcttattcctccttacaaaatatagttctgtctgtgatggaacttgcagctgtgattatgtcaagctggggatttccaggaccctgtccaccagtaccgtggtgcatctttctaggccacctagttcttctgctccagctgtggtctctttctcctggatatcccagcaataactcagctaatacatctccccatgcctaccccaccctacactagtggacaggtgctttctatgatgtggtctctgactatctctccagcctcattccttagctgtaggattgtgcacaggtctctaaacagttgtgtgttcttaggtatctgcacatggctgattttgtgttttgtttttttaaaataaaaagatgaagtttctgtttctcgcccacgtggagtgctggagacagtggtgtaatcatggctccctgcagtcttgaactcctgggctcaagtgatcctcctgccttggcctcccaaagtactgggactataagccacttttttttaaccgagatcacccagtctttgcctttctttgcataatcaagccctatttactgttaaggctcagttcaagtagtgttaccacttttgggaaagttcacgtaatctgaatttttctgtgttcatcatagcactccttccacagtattagaatttttttaaaatttcctttatttttctttacactgtgagaacacctgaaggctgggaataccttttatgtttttatctcactgcctaaaatagtggcatataggaaatgctaagatgtctgagaaagacgacaatgattgcttgctctccagcaaagttaataatcactataatctcatgatgatatttgcaatggcttctacatttttgcgttttgattttgtttttttttagtttcgcaagagggaagtcctgaaagaaatagatgtgaactatgttccttcgcctcctcctcccacgtagattgacttatacctggaacagctagcagtactaggtgtcattgggaactgatttcttttttcctgcttacaatatgaaggttttttggatccttttgtcttaaagagaaaaatatataggccccaaattctgccttttaaccccttaagtgatttggaagtattcactttaacattggttttaatcctacttttacttttttgaagtaccctatgatgagaggacctgatcctgctgctgctccatatagtactcagaaatcatctgttctacctctttatgaagtaagttctttcttacatctttgtgttccaaaataatttgtagaatttagaagtgtaattttgttatattgcattctagaatacttttcaggagctccaggtaatgaggcggagcctgaatttgtttagaacacaaatgatggatttagaattggcaatgctgcgtcagcaaaccatggtttatcatcatatgactgaggaggagaggtaaaagttcattttgtcttagcacacctcaaaaagcttttcattcaaagtcttctcaacttatattttttaaaattaggttttgattctactgctgtgtaccttgtatctgttttgtgaaccagtgtagataaga

SEQ ID NO: 25050 - DNA, 2300 bp, Homo sapien
atgtgcctgtagtcccagctactcgggaggctggggtaggagaattgcttgaacctgggaggcggaggttgcagtgagccaagatcatgccattgcactccagcctgggcagcagagcaagactccatctcaaaaaaaaaagaaactgcattttataattacaattgataggagaaaatgattttgtgattttaataagtataaatagattgatttggtttggtgttttttattcaaaaatcaaaatatacgaagaaaagagggtttgccctaggtgatagcagcataagaacttgaagaattaccatagttatggatgaccaaaagaactgcaaaaggaaattacatatgattagtagtgaaagttcaaaagttgagaaaattagtaaaataaatgttttttgcactgagatcaggtaataggaaggaatagaatatatcgtttaaacagctcaatgcaattatctctgtttacctagtagtattctgtggattaaattgtacataagcaaatgtgaaatttgctgtatatgcagttctctagtatttcaatcatgttgaatcaaatcacattttcaaaacaagcattatagcagaagacttcatatctgtaatttattttcatgatatgactctaccaactaaatgtttaaaaggtcttaattctataaatttatttttcctacaaatgtaattatttttgtaaattggttttggctgcctaatgtttagcaaactcagcattcaccctactcggtcaggtgtgtctatgattaataatccattcctgtttacatgttttatatcaaagattagtttttgagtgaaattatgtaattattcttctccacactatatttgctaactgaggaagtgggttttaaggtaatttttttttttctagaaatgtgatggttttgttccccttagcttgctttggtatgaaagttttctttgaaaactttatattgctcttttaaaacaaatactccattcaatgcacacttgaatcctcatttttagaattttaatggcctgatatgtcctgtaggtgatttcctaagaataaagtgttcatttcagactagaacattgattctttggcttataagacacagcatatagaaaatttagttattcccattaggctgccttggtcctagagaattaatcatttaaaagaacctctcattaaatatgaaagattttataatttgcaaacacttaagctggtatgcaaggcaaatgttcaaagaatttttcagaatttgttatttaaaccattaattagaaactacttagttctgaatttggcataggcttgaggaaattgggtttaacatttattcttttactgtctacaaagggcctacccagcaaaatatgtatagatcaaacaaggcataagaggagtattgttgtacttaagaaaacaaattattttgaagtactttaaaagcatatttaatagtttaatgccagttataatttaaaaaattatgttaatattctcttagttacaatagttttctgtttataaagtatttaaaatttagtttggtttttattccagtcattcaaattggtaacctttttacctaaatacatactgtactaaattccaattttttaaaatcttggtgtacagctaccaagaaaattaaattagattctgtcttcctagcagatctgagcccctaatcccattaacaaagccaccattcaggaaggcaagatttaatcttgggttgaacagttttgcaggtgaggattaagcatgtttggcaggcactttcaggaaagttttcttactgcgttcatggatgcatgaaaacaatggtatctgtcaggcctttgtttctttcgttgtaccattaagtgaggtttttaaaaagagggttttcatcatttataatgtgttaatacagtagaattctttttttgaaggacaacattgaaagtcttttcagacaaatatttaatacactaattacatagctaaacttttgtcatattaaagatacctcttttctgcatgtgcattgtactaggaaaaaagtacacactgtcttaaaatttgcccaagtcatctgtgatgtatgtgatcagtggcctgaaactgtttgcagttactttaaaaatgtataaatgtgtgtaaataaaaagattacttaataggatgaatgaatacatgcccacagaagccaattcagcaaaattaaatgtcaaggagtaaacatagattgctttgtgtttagagagttatttgttaattagagttcatagacttgattcatgcc

SEQ ID NO: 25051 - DNA, 2300 bp, Homo sapien
aatttttaatggccttatttaaaatgaatataaaggtacttaaggaaggtagcagttgtaggctttcttttcttaggaaatcaatactcataaaactcaaggttggaaatgagaattaaaaaccacagtgagtttattttaaaacatgtagtctgtcatctttattttccctttggattacatagtgtttataccctgaggtctatttatgttgctgcaactctttcactgactttgaagtgaactttgtatggtgctagaatcagagcactagggcttagagatcatgtattccaaccctctcatttaaaaagagtaaattaaggtaagagagtaaagcgaatttccctgatatctttgtttcctctgagatgtaaaaatctctgttgttcttaaccaccaggctaagttcagtgacagcaagagtcatcctagttcagcccctaacatggcccctgatcctccccttaacctagacagtgcctggcacttagcagacactccacttatagttctggaaaaaaagcacttatctctgagcaaagtcttttactctcattagaaactctctggcattcctggtatggcttaggagactaatcactgataataaataaataaataaataaataaataaataaataaataataaattcctgctgttcttctcccaaatacatgcctcatggagttgcctgcaggagaaagagttccacagcaaatcaatacctgcaatttaaaggattctactcttgccaggtgtgatggctcatgcttgtaatcccagcactttgggaggctggggtaggaggattgcttggggccaggaatttgaaaccatcctggtcaatatagcaagaccccgtctttacaaaaaaattaaaaatttagctaggcgtggtgttgcccacctgtagtcccagctactcaggtggctgaggcatgaggattgcttgagggattgcttgagcctgggaggtcaaggcggaagtgagctgtgatcgcaccactgtactccaggctgggtgacagggtgagaggctctctcaaaaacaaacaaacacacaaaaacgaggattctattcttgtaacttcaaaccaataaaaataaggattctactcttataacttctcaccagcagattcatttaaaaccattatttcttctgtccagagcatcctaatacatgcaactgctctcatccaactggcaagcacacagatttactagcaaagtttagtacctgttggtcagaagactgcctatttcttctgggtatctcttcaatgttccaggaaacaaatttcatttattcttataagtctgactgtcccagacaaagttactgtatgtacaaaaatctgtgtatttcttttggtgtgattcagatgcaagcagaaatgaattttattcatattgttatctttaagactgtgtgggttggagaaggattcatagacaacaaaacaggaaaagattaagtcaaacaaaacaacttagtggttttgtaattttggaggcttttgtctgaagggagatagctaaagcttgacaaaggcttcctatgtgtgagtagaagagacagctcttttccctcttcattggggcaagcaccatagtaattagatttaaaggacaccaatagacttttttattagaaccagataactttctggtgtttctcaaatgagagaaaggcacctccatggaatgtctttcatccgttttcaaattctaccaagcccagttcttctgcaaacttcacctaatgtatgtgtgatctacagctgtggtttacaaactgaattcaggtggccaggcagggacccctccccccgcgccccactacccgctaaccgcctcccgccacacacacacacacacacacacacacacacaccccgcgcgcgcgcacacacacacaccccaccccaccaccccgacctccacatacattcccccgaccccctccagcagtgaagtctaagagcaccgcgaagtaatttaaattttcgagggaaagcacagcgccatctgtcggacatcatgccaattactcttgttaagttcctacctgacggttactttatactttgaactgctaggtactccttttggcctaaggacacagtgaaaaatgtaccgagaccttggagagccacgaaccaagaaacttcagaaacctctgatatctgatcaagagttaagagacgtcagaatcatcacaactgacaaaaggttaggaaaaaattctaaacatttctatttcctacagacttccccattatatttttggctg

SEQ ID NO: 25052 - DNA, 2300 bp, Homo sapien
gagttatgcttcattctttaagaatacagagaggtgagtttaaacccaatgtggagaacagtaaatctacaaaggcttcctagaagcaatgatacttaactgaatcttaatggacacacaggagttggcctcataaaaaacaagaagcttaaagggtctagatagcccatttacaatattgtctctgatcaacctattcaaaatagggcaattagttaatgagaaccattttattggtatttataccaaacacatatatgaaatttcactttatcacctattattctaagtggaatcaaattattccaagtagatagatattcttagtgattctggttgaaaatgtgtatgttgaagccttttgaaaaatctggctgaaagaaaaataatagctatcttttattgagtgattccgtgctggccttgtaatgagctcttttcaggaattgagtaatctaaacctcacaagaagaaagttctcctactgcccaaactgataaacttggtaagtagcagagctagagcttgaactcaaggttgccaagtgcatgttcttaattattacattatgtgaagttttgtattaactcctcactaaaaatactgtcttgtcttgctttccttttatataatttgaagatatattcaaagaaataacttcattaatgatatcaatttagattttatttctggagacttttgtaaactgttacataaaatgtaatttataaatttcccttcgacactacacggataaactcatcacaagatttcttgctagtcagcactgttctccactaaaagtgctttcacatccacatctttgctttttcccctagtgaatatagaaaactacttcaataatgcatattcctttctatattccttcaacagaatgttgcctatttaaatcattaagatggattcctagtacagaatcaaaatttaaaaaataaaaacttcaattgtaaatacctggaatcatagtcgatgtctaaatatattaagtacatccaaaaacatatttacaaatctagtattcatcacataatgcctctcaagaaagcagagatctcaagcagtttcattttcacacttccttcataaaagtattcgaatgcatgaaggccatctggctatgttactacctcccctttaacattaactaatgtggcaatcaggctagtgtcccactgttccctgaccactagccaatatcaaccctctgaacattacccacttcatgcttttttcaagtccttatctttacatacatttctactgttgacaacaagccataatgttgactaccattaggtttctactaatgttttccagtcatattcttccaagtcagagaatgtaactggctccaccaggaaataaaatagaggtcattgaagcagcagtgacttccaagctgtttgctaaatttagcagcacaatactttccactctaatgaaaactgtgaactgcaattttagaatgttggaacaggatgggactttaaaggtcattgagtccaatcccctcatttttctgatggaagtgtggaggcctagacgtagccagtaattttctggaggccacagagcttgttaattatgaagatggaactcgaactaagatctgctcagccctgcagtaatgctgccctcactacaccacagatgctctgcctcctaggatgagtttaaactaaccagatcttatagcataaacatagctgatattattggttgtggcttaccctccatggccattcaactgtttcgtggctgaatgtgaaatagcaaaggtatctgacttataagttgctgagagaaatgattccatacctaaaccctgcccccaactctaaaaacttcctgcttgatgttcatcaataatgaatggcccatccctgcaatactcagagggagcttacattgcacttttgagcagccggttagtaatgtacagtggatagagcctttctttcaaatcccagggcagtgggtccttcaaggctagcattgcattttcaattagctgctgagtgaatgcttggcatgtgtattagtgaagaggcacacaattagcgtattgttcctttctgtattgtgctgagaggatccaagggattggtgggggaacaggcaagccaggcatcaccgtggatgttgaagaagggggttactcaaacctcggcatcttcacttgctcgatctggaattacagctatttattacgaagcactctgtgtggcttagtggagtgtgtctgaggaaacacatcccggacaccacttagggttagt

SEQ ID NO: 25053 - DNA, 2300 bp, Homo sapien
acaaaattagccaggcgtggtggcacgtgcctgtaatcccagctactcaggaggctgaggcaggagaatcgcttgaacccgggaggcagaggttgtggtgagccgagatcgcaccattgcactccagcctgggcatcaagagcgaaactccatctcaaaaataataataataagtcaataaaataatataccattaagactttgagccatatgtttataggacaaaatgatacccaactcaataccaattacggtctttgaaaagtagtgaacttccaaaataaaagaccatttttgcaattgtgctcagttaactaaactaactaaactcaaaacaccattcttacaactttgtctattcctctcacagcatgcacattggtcttttagatacataaatcatatcacatcctgcttaaaataattcaatgacctgccattgcaaatatgacagaatccttccaaggcctgatattagcttacttatacctatgtttgcctcccaacttgggtcactctctctctcagtcagtatactccagccacatttggcctccttcctgttcctcaaacatgccaatactgatcatgcctcgggcctttgtacttgcccttctttctatctggaatagatagaacagacttcccccagactttcctataactaatacttcctcattgttcgggtcttaactatctgatcatcttatctaacatagtgtttcctctcataattaaccttatatcataattcttattttatttttagtctttcttttaaaatataagttctacctgataagggatcattctcattttttcaatttttaatcacttcatttagtttgacaataattctgtaatgtttaaacagtatggtgtttagatttataattgctaaaaaggcattttatttcattgcaaataggatttttacatgagaaataggactggtatgttctattaaatgaatattaatagagaactgagtctttatattctattttatttataacctacactggtagttatcacgcagcattcataaatgatggaaagatgatttcttatccaaaccaacagctacacaacacacacacacacatacacacacgagagagagagagagagagagagagagggagagagagagagagggaggagaggagagaggagagagagagcgagatacgtattttaaggaatgggctcatgtgattattggtgctggcaagtctgaaatttgcaaagcaaactggcaggctggaaaccctggcaggagtcattgttgcagtcttgatttcaaaggcgttctggaagctgaattcctttctctttgggggaccttaatcttctttcttaaggttttcaactgattagatgaggcttacccataatttagagggtaatctgctttattcaaagtctactgatttaaatgttaatcacatctaaaaaatactttcacagcgacatttaaattggtgtttgaccaaacgactggccaccataacctacctatggtgacacataaaattaaacctcacggaggtagttgttgccttttcaagattcccttttcaagttacacaatagcatattccatgctcttcccttaacacactgtcgtcctttatttgtgtgtccctaattaatccgtatcattatttctccctaaaattatatgcactttcttctcagtagatgacctcatgcatcacgactaaggatttccagcctcctaagtaccactctactatgtggaatatcccttccatatgctggttttgtcatgtttggtgagctctcttggatcatttatgagtataggacatatagccttaaagccatcaacatgaaatttactgtggaggaattggcaccatcagccaggtttctgtcattctaaggagattagctgacaaaactaggctgcagtggaatgcttggagcatggtgacatcacaagattacaccacaatgattcctattccacttgttctacctacactgtatctgatcactgcataagagatagtagaaatggcattatctttaaagtagtgatattttcaagccatgaagtttagtgacttgctgaaatgggctagggaatctaatttcaaatgggcaaaaagataaacaaactattttgctttaattttctagttcagtgttttaggggtaaatcaaaaccatccaaatgtcagatcagaaagaaagttaaaaatcatatagagtaagtattaatcagtattaacattcaactctaaatattttttatcgttatatgtatacac

SEQ ID NO: 25054 - DNA, 2300 bp, Homo sapien
tatagtgctttccataaagtgaatctaaactttctaacttaatcacagaaagaaaaaagaatataaacctaaggtaatgaagtatgttatggatttcctatgattaacaactttcagattcttcagctggtaatcaagcctttggacttcaagctatatttcatacttgcttgccgtttgaactgtaccttggctagatgtttattagtatttatgttgagttccctccattgtgttcatgtagaaattgtctcacatttccaattcaaaagaagacaaaatgaaagttaatttttaaaagttgatgggcttattattttcttgaattttccctcaggaggaagatttatgctatattaatggtaatataggtaaaccatgactacagaaattgaatgctacccacaaacgcaaaatccctcccagaagacctgtacaatgtgttatttcttatgtgctttcctaaatacaaagaaagccaaagcatatggtaataataaagcatctgcttcaaagatctgtatctaagtttgtttatacatggtcagtatatttaactgctgtatagcacacatgtgaatttatcattggtacttattgatcataaagagaacagtgacatagatgtcactacataactatgtaatatctatataaatatgttatacataatataaaatcatctttttatttatagcttccttatttatttataacagtacataataagtgtgtagtttttgaagtatcaggcatcataacttctatggcagtttctttgcaagaagcaggcgaatcagatttagaaataacatgatagtaccattaaagctggaaagaaatatagaattcaattaatattataatttcattttacaaacaagaaaatggtctcagacaggtcaagaaatttgcccacagtggcccggcatatttgcaatagaactaggactagaacccatttattttatttttagttcaatgctctcataatgattacatttcctagtttggattagaacggctcgataaaatccatgattcccttataactctcttctccttccttatctctcctcagggaggaaaataaaaaggtgatctttctccctggaagtatttggagagtgccaataactacagatagtatcctcctttgtgacatttgatctttatttttatggatcattcaactaaaggcatgcacgttactcatttttccctttttattacatgtatatattaaaaacattctaatcatgctttgaaatgatttagtttattacaaatctctgacctggaatcttatgacattattgactgaataggaactttgttagtgattcagatacaggaaggtctccaaaataagttacattaaaatacgagcattccctttatctggagctagaataagagttcccgcagtgtaaatctgtcttctaaaagaaaacaatttttaatatcatttattttcagctgttcacaaattcttttataccttcttttctttccttttacttttataaatccaaatttcatcacataatatataaaccataggctcccaggcactttggaggggctttttgttaaaaaaaagcatgtggatgtgtgtgtgtgtttccatctcttttttgcaagagatgtttcctcttagttggaaaccacatttgggtacagacatctgggtataatgtcaccagtagaaattagcaatttttgtttttctaacttttgtagctctggtcagcttcgcatgggcttctatcagttgatatggcatcttcaacttcagccaagaggaggttattagattataagtgctaaaaatgatgagtcgtctccacacttcagccagcatgaatacaagcaagattgtaaaataattataatctgaagcagagccagccatgcaacccgagcctatctttcttcattaatttgtatacagttcttattttaagagaacaaactttcagagggtactcacatggggctgctgaaccagctgtacaacttttattttgaagaaaaaaagttgagcctcagaacagtctgttttaaagacagggagggacttagcctttcggagcttgaccagcatgtggaaggagagctctcatggctgcaataacttagggagttcctacctggatgacactggggtaggaagttttctgtttgttttgttctgtttcggagggtcccgtgcacttctcttgcctggatcaacgtgactcttggtggtttttgcacaccctgctctgtgggggagtgccccaacgtgcctgtcttat

SEQ ID NO: 25055 - DNA, 2300 bp, Homo sapien
aactatgagaaatgagggacatacaaattggatcattttttactgtatttttatgactattttctcaattttcccttgcagaacttatattgaatttttttgtaaactaacaaagaaaaatgatttgaattctctatgttaacagaagtaactttttgatacttcctaaggatgaagattatcttggtcaaggatttaaataataagctattttatctagtttattattcaaaattttattttatgaaacatttaatgaaatgattaaggatttttttctagtaagtgaccgaattagtataccttgaggtcttaaatatcaatgtgtgatagaagttacatagtgaaagcaaagggcaaatgaattgtagtattgaaacaagattcttagacatatacttaagtagaatagttctcattctttatttactttgcaatgttattggtaagctggtcaatgtgaggtcttgacatttcatgtcatatttagaaaatcatctgtatagcctcaaggacttaggtatcttgattcataaaataataattatagagtacttgctatctatggagatttttggctgcaatatttctttgaaagcagaacatagatgtttgttgactgtttcattaaagaaatatcaggtaacagtttattacatgaatatagctaagattacaaatgaaggcacagtgagggtaaaattggtactttcagggcaaagattcacttatttctgacaactctggtaaatgcttataggaatgaagttttaatttcacaaagctgtctgctagctaaagacattacattcagattgaattctggaaatatcttgtctgagaaaggaaaatggaagcctcacttgatttaccctcttataatttgcaaatcagaagccattttctataacattttgcaaaggtcctttttacgtacacattataactgactactagatagcatcagtgtcatttgtatagacatagtaattttacattggaagactaattgttaataatagttcccatttttaagaattagctttaaatctggagaatgtctctgtttctcagttttctcaactgttgaacaggagtattgcctatctcacaggcatcttgtaagaatttaaaaaggtaatatgtaataggtactgagaacattgtctgaaacatcagaaatattcaacaaatattggatgttattaccaatctttgaatgtctctaccttaaaactcatagtaacaggcaagttttcttgcaagaagaaataaaactacatctgggttttcaaacaaacaagaagaaatattgtttataagtatattttctatagcagcttgcagatagcaagagctgttatggtgctcatacttaaggtctgtgcttgtttcaaagaaagctcgccatgtgttaggagcttggcagacgactcagttctgattccttttatgtccactctctctcatttctcttctaaaatgcacaagccgcaaaccatcagtttctctcttgtccctctctccctttctccttctctctctcataaacacacacacacaaatctattcccttttccttcaaaaaacacacacacacacaagtgcatttacactagtttcattttatttattttttaatccccaaaggattcatagagcaggctgtgtgcagctgccgtattttccactggttaaattggcagttacctactgtgtggagttgctaggagaaggtgaataagcatgcttacagcatcagttgatgtacatattcttgcaataacaacctgtggagctgtgttcttctgtatggctttagatgttattttctctttgttatcattaatatttgttgcatttattgttagatgatgatacatttttaagtgttagtttcagatcaatttagagaaaaaaaccttggcatttaaacaggcacttttttttctcatggtggtgctgctgatactggctcctaccatctgtttccttattacatcctgcccttgttctgttggtagagaggaattcagcttcttctggagcgcgaaagtcattcacgtttctcttgtgcataatagagctcgtaaactgtaggaattctgatgtgcttcagtgcacagaacagtaacagatgagctgcttttggggagagcttgagtactcagtcggtcagtagtacagtagcaggctcacatgtacggattgttcttgtgaggtcagagcatctgtttatactgctgtctgcttaggggggtggtgaggtggtgagcagtggatatatgcctgtcaaagtc

SEQ ID NO: 25056 - DNA, 2300 bp, Homo sapien
agaacagctggagccataacagtaaataaaatgaacaaaaatccaccttcatgaagcttagattctttttccgtgtgtgctttcattcttgatgttagaattccccaaggttttaatccttggtccacaactttacttattctgcacactttctttgggtgatctgatgatttttctcctattttttctccaatctagacattacccatgagttttatgcagggtatattcactaagatatgatctaggaaccttgaactagatatgtccaagtcagaaccctttatcttttccctaaacagatcttcattcagtgggtagtattcagccataagaagtcagaagttaaacttaaatctttcctttatctcccatatccaaccaatcaccatctcttacttttttttttcccccaagacagagtcttgctctgtacccaggctggtgtgcagtggtgtgatcttggctcactgcaacctctgtctcccgggttcaagcgattctcttgactcccgagtagctgggattataggggtgtgccaccatgcccggcttatttttgtatttttagtagagatgggatttcaccacgttggccaggctggtctcgacctcttgacctcaagtgatccacccgcctcagcccctcaaagttctgcgattacaagcgtgagccaccacacccggcccaccacctcttaaagcatttaccctatttgtctaacattctcctgttctttctccagttttgtatgctttgcatcctctctccaatagctgccaggatgatctaaaatacaatctcagtctcttttttaaaagcttcctcatcacctaagagatagaaatctatgtcttcatcttggtataaaaacctgtctgtgatctggtccctgcttcatcttccagttttctgtttgtttttcaatttactttaagattttgttacagtgtgtaacaaaatggttacacactgtgtcataatgcttaacatcatagtctctgaagccaggttgcttagatgtgaatcctagctctcaaatatttgcctcagtttcctcaaatgggaaatagatataggagccactatcttgtaagattatttggaggactaaatgagttactacatgtgtgcttagaccagttcctgagacatattaactactattacatcaggctgcttctaatgtttgcctttgttcattctacttcctcttctttcctaccaagtattagcttagccatagatcctgtgtagttttccaagtttttagaagctgacacttgatttactccccgaaactgttaccaatcacaacttatttcatgttagggttgatgttataagcaggtatcctctaggctcggttttctcttttaaatatagaaaatgtagtaaatataaccacttcaattgttatattgctgtgggacaaaatgcagttcctgtaccatagcagtaggagatcaaggtaagagagaacaacgataactccccagtttctagcttgtatgactcagaatccagaaaatattgtagaagtctcaaatgcttgttgatacacacgcttacacaaaattgtaaatgttttaatttccttcaagtttcctactgcctcttcagtccgctagcctgatactgcaatcagtgtcgcttcaggcaacttctcctttctccgccaaatttcgcctttcggtctcacccacccatcacccagacaaatcctccaaagctccgtcttccctttaaaagactctcagggaactcaaccccaaaacccaccctctgggtttccccgtcaccctggcaacggaagcaggaagaggcgggcttcgccatccaccctccccgcccgcggcaggcgccggccgcattggtgagggggcgcgggctgcttggccagggcagttccctcagctccgggttggagccggagccggagccggatcccgcgcacaccgccacgtcaacctaaacctacaccgccctctccaccccaccgccgcagcgcccgctgggcccgcagcgggtctccccaggcagcgtcctccacgcctttcccacaatgctccgcgccaggccccgccccggctcgccgtggagaccggcgcgtgaggaacctaccggtaccggccgcgcgctggtagtcgccggtgtggctgcacctcaccaatcccgtgcgccgcggctgggccgtcggagagtgcgtgtgcttctctcctgcacgcggtgcttgggctcggccaggcggggtccgccgccagggtttgaggatgggggagtagctacaggaagcgac

SEQ ID NO: 25057 - DNA, 2300 bp, Homo sapien
cttcgccatccaccctccccgcccgcggcaggcgccggccgcattggtgagggggcgcgggctgcttggccagggcagttccctcagctccgggttggagccggagccggagccggatcccgcgcacaccgccacgtcaacctaaacctacaccgccctctccaccccaccgccgcagcgcccgctgggcccgcagcgggtctccccaggcagcgtcctccacgcctttcccacaatgctccgcgccaggccccgccccggctcgccgtggagaccggcgcgtgaggaacctaccggtaccggccgcgcgctggtagtcgccggtgtggctgcacctcaccaatcccgtgcgccgcggctgggccgtcggagagtgcgtgtgcttctctcctgcacgcggtgcttgggctcggccaggcggggtccgccgccagggtttgaggatgggggagtagctacaggaagcgaccccgcgatggcaaggtgggcatgggcccggggctagggctttgctggagccggtggtggcctgggccctccggtcagggaggggcggaatggctgagcgcctgaacctcccttcctgtgcgctcttaagacctggatattgtgttctcgctccccaccttcctcctccctgttattcacaccacccttcctctgcccagcgattccctctcagttacttacactttctccctaagtccgacctgagacttcagacaccagcaacacttaacagccctgttcccccgtgtcttcatctttacccctctcccctctcccactctgcagtgatggcaatgcgaaagcttgcgccttgcatttacctggcgcttccacctgcccggtagctcgggccacgggcagttcggccacacccacgctgagaacaacccctgggcgagaaacatcttatcccaaagtgttgattgagactatgccctctctttttctgatggttgttttcttgtttggatacttgttaatctctacatcattatatttttcaaaggtatatttttgtggaatgaaaaggaagtattagaaatgagctgaagaccattcacaggtaaagagaaaaatttttaaatatacatttaggattaaatgaaaaacagaaatgaggtgcgaggagcgttagatttttcaaagcattacgatctctttggaactaaaatatagtggttgaaatgtgatatgatgaagtaatgattgtttttgccctgcagagagtatgtctaaataaccgattcccttctctttttgtgttttgtttctacttacaccaaacatgaactttgcaataaaattacactggtaacttacaattgtttttctactatttttaaaaaatggcctctacttaaattcagtataagcaccttctgaggaaactccgggaagaagatcgactgctgtgtagattgtctattataacaatatatttcactgtcatttctggtagggttatatgagaagtaaaaaaccctatgtttccttctagtccctcccaaggacatttcctacaagtgaattctgctgaaaatgaaaattagacagctttaggaggtaaagaagtagctaaaaggaagaggtattacaggcaacgctataactgggtagaaagaggaagcacctgtagctcattgccacctttgtgttctgatgctcgtcagaggtcttttctcagtgtataaattgctgagggtgtgtgtgcaagctacttactaccactcatgaccttttttctgctatcttcagtgatttcacaaatctagctacatggatgtagaaagagtgaaaaatagaacctggggcattcacactgatttgccatttaatggagattgtattgctgaccatgttctgtgataaataaattgtgctattattgtttagttcaaaatgtattttaactgcctgcttttctttcttagattaatatttttggggacagatttgtgatgcttgattcacccttgaagtaatgtagacagaagttctcaaatttgcatattacatcaactggaaccagcagtgaatcttaatgttcacttaaatcagaacttgcataagaaagagaatgggagtctggttaaataaagatgactatatcagagacttgaaaaggatcattctctgttttctgatagtgtatatggccattttagtgggcacagatcaggatttttacagtttacttggagtgtccaaaactgcaagcagtagagaaataagacaagctttcaagaaattggcattgaagttacatcctgataaaaacccggtaggtaaac

SEQ ID NO: 25058 - DNA, 2300 bp, Homo sapien
tttcttagattaatatttttggggacagatttgtgatgcttgattcacccttgaagtaatgtagacagaagttctcaaatttgcatattacatcaactggaaccagcagtgaatcttaatgttcacttaaatcagaacttgcataagaaagagaatgggagtctggttaaataaagatgactatatcagagacttgaaaaggatcattctctgttttctgatagtgtatatggccattttagtgggcacagatcaggatttttacagtttacttggagtgtccaaaactgcaagcagtagagaaataagacaagctttcaagaaattggcattgaagttacatcctgataaaaacccggtaggtaaacgtttgtttttaaaaatatttgattatatttttggtacattttgatatttatttaaattgctttaaatgatcaaatgcttaagaataatcatatgtcaaaattataattcaacttgtatgctagaaacaaaagcaccaaaatgttctggattatttaggatcccgtgaaggaatgtcagtaccaaaaattcagttccctcttaatttgtagacgattttccaacaattctattaaagacattaaccccaaaacaaacgataatatccgtgaagtagttgaagtagttttcttattaaagtaggttaagatcaagtgttttagaacaggaacaaaaatatttttttaaaactcagagggtatgacttgctaaaaatagaagtaatagctaataatagcatgttttaactttgactgttttcttctgtgtatgcacaagtccacaaaccagagttagaaagttttataaattaatacttcacagcagctgaatataatgccagtcataaatatttatgtacacattaatgtaaatctttcaaaactaaactcattttaatttttatggtgtttttgtaatttatttgattatttcttagtgagatttagcgttcatcattaacaagaagacatagttataattttctcttttctaggtagaagttttaaaataggattattttcattgcataaagctgagcaagagaaacaatatttctttaaatattgtttagttgattatcttttcctaagatccacattctatttaaggtttttatttttttttaatttttctttaaaatttcaaataatgatttttaagtttccatataaaagacagtagaccttctaccatccgagtattatttaaatgaaagcatccttcagaaacaaattttatgaagcacagtaacaaggaagaaacatttccgatccaattttggattgttttctttttttttttttttttttttttgagatagggtctcactctcttgcccagactggagtgcagtgacgccagcggcttcctgcaacttctgcatcacaggcttaagcaattcccctgcctcaccctcctgagtagctgggattacaggcgtgcgtcactactgcccagctagtttttgtgtttttagtagaaacggggcttcaccatgttggccaggctggtctcgatctcctgacctcaaatgatccaccctcctcagtctcccaaagtactgggatcgattttggggtgttttctgatactggcttttatgtaattagctgatagattggggcacatccttttttaattaagttgattttacctcaaatagaaaaataacctacaaatgtattgatttataattgttataggagtaaaaaatatttatgaaattaagagtttcaacaggcttattattttcagctgcattttttaggaagaataactcatggtctgataacgtctgtcaaccttttgaagagtcaattatttcattacttttcttacttttttttttttttttttgaagattatagtttcttaaaaaatacttcatttcaacccatggtaactcatgtcatgttgtattacccctccttatgttggtatatggtctcccagaagttactagattaattaaacctacatatatgttttgaagaaacttggattgtgtatctgaaataattgtattatatctaatattttttaacagaataacccaaatgcacatggcgattttttaaaaataaatagagcatatgaagtactcaaagatgaagatctacggaaaaagtatgacaaatatggagaaaagggacttgaggataatcaaggtggccagtatgaaagctggaactattatcgttatgattttggtaaggtgatacgatattacttatgaaatgtgttttatctgagtaaaagaaaagtgaattctg

SEQ ID NO: 25059 - DNA, 2300 bp, Homo sapien
gttaattttcacttattttggcatttgataaacctgtatcatacaatttttctggaatgcatactgtaggaggttatctttccattttttaaattcttatttctttatataagtaattcttggtcgttgtttaaaaatcaggacaataaataagtacaaaaataaagcaattatctaaaaaaatcacccatactcttaacattgttcataaccctgctatgtatttactctatataaccatttaaacattttgtgagtgcccatatgcatatgtaggcatatgtatatgtgtgcacatgcatacatattgtaatggccattgtaatagacatacacgtgtaaatttatatgtctgtgttttaatcaaaatggattcactgtatgcttttttttttaacttctgtcatacaacaatatcataaactttttcacagacctgtaaaaatgcatatatatttatatggatataaaatctctatatccatgtacacatgtatatcctccttattccctaaaggctacatagtggcttactatatggttatgccataattgtttaggaaatcctctcttactgattttatgttgtttcctttattttttatatcaaacgatgcagaacttgtctttaatatgggaaattttcttctcttttcttttgagacagagtcattctgtcacccaggctggagttcagtggcgtgctcttgactcactgcaacctcagcctcatgggttcaagtgattctgggttccagtgattccctccagagtagctgggactacaggcgcatgccaccaagtccggctaatttttgtacttttaacagagactggatttctccatattggccaagctggcctcgaactcctgacctcaggtgatccacccacctcagcctcccaaagtgctgggattacaggcgtgagccaccacacctggccacatgggaaattttcaactcaaggttatgttttcttaaatggtttttattctcattactagagtcctccagaaagttttatcagtttataatctcactgacagcacgtgagtggccatttctccacgctgtgcccaccatggtactatcgttctttataatcttcacaattccgataggccacaagtgatatgttaacaatattcactttcatttaattgctttcaactggtcggggaaaaatactttttcatgattattaacaaatcataattgttctctagttaattttctctttatatctgtggcccattttcttttttctgatgggatgtttgtccagctttttctttgtttttttttctttttttttaatgcagtgtagtgtcactctgtcagccaggctggagtgcagtggtgcgatctcggctcactgcaacctccgcctcctggattcaagcagttctgctgcctcagcctcccaagtagctgggactacaggtgcaagccaccatgcctggctaatttttgtatttttagtagagacgtggtttcaccctattggtcaggctgatctcaaactcctgacctcaggcaattcagctacctcagcctccccaagtgctgggattataggcatgagccaatgcgcctggcccttcttgtttcttaatggatcttctctcttaaatgccacagatttgttcctggtttatatttggctgttgtgcttacgctcttctttttcacactctttgaaaacatcacttttttcttcattatttctgcttctgaaagtgatctctcctctatctcaagattatataaacattctctacatcttcaaaaagtaggtttctggaataacttcatattttcttgggaattcctcaggttttttttaactctctaggaagcatttttttaactaaattgagtcttaatattaaatgtaaatgaattatttctgtctcttattttcgtagcctattagcttctgtttaaaaactgtgtcattagggcagtgccatttttggattatcatgaatatttacaaatcaaatgggtaagacagtgtttttatcaaatttgacctttttctcctttaggttggcaggtttgactgttcctctgcaccagacatctgtagtaatctgtatgtttttcagccgtctctagcagtatttaaaggacaaggaaccaaagaatatgaaattcatcatggtaagaatggaaaaaaatgataaaaaaaaacttagcttcattttcaaatagaagttttctaattgtgctttttaaacttattttttacggacatgcttattgtaaataacttttctcagtaaatatgaggac

SEQ ID NO: 25060 - DNA, 2300 bp, Homo sapien
aaaataggcaccatgttttaagttgtagaagattggaaacaaatcacttaaataccagaatggaaaatgcaattactacttcacatttgtttacaagataaaacactaaatctgagttaaagtgatttctagtatcttaacatttaggattacatatttttgtgctcttttcaataaaatttttaagttcaggtgtgagtcagtataacacattagacacctacaaagcttgttttcattggaaagaatactttgaaatattgcaaagactttcattagtttctagcactttgaattttagaagtatatagttttttctcatgtaacagttaaatgaaataaattgtttaatctgcaataattttagtaagtacttaattacaaaattagattacaaattcattagtataaatggtctattatatgttaaacccttatccatttttattgggtaaaagtcactgataaataatataataactgtttcaccataataatacaatgcttatttctttattgcaaacatatgtaaaaagttatggaggtaatctgttttttcttttacagacattaactggactgatcaacgtgggcagtatagattgccaacagtatcattctttttgtgcccaggaaaacgttcaaagataccctgagataagattttttcccccaaaatcaaataaagcttatcattatcagtaagtattctctcatatttgaagacatttattataattatttaattatacacttaacagttaagttacctgaacaaaataaaagttaacccaacaaatatttattgggagcccactacgtaaagatagtttgttaatgaacatttcagaagatgaaaagggagtattgaacagtctcactgtgcataaagcttatagtctagacaaaaagataaggaaaggaagagctaacatttattaagtccttaaacaccttatttggtttcaggtactatattagatactttactcaccttatttccaataatcctcacatatgctctgtgaactaggaattactacccttcctactattacagagaagtaaactgtgattctcagaccttagaatccaaggtctaggagttatctaaggcttagataacttccccaagtcacacagctgctaagttgaagttgaggtttgaacccaagtctgtctcagcacccatgctgtttccacaacaccacgtggtatttcaggtagaaaactcaaatgtaaggtacatatgatgaatgttattaaacaagtaaaaatgaaccatggatttcaagagaggaaagggtcacaactatgaggaaattatgaaaggctgcattttgtaggtagtttttgacatgtgtctttaaaaatgggtaggaatttgacagacagtaataacttgaataaagattcagaaactaaaacccttggacattctgagtttcgcaattcccataggtctacaggagatgtccagtagacagctagacattctgggctgtctggggcacaaagataccaagactagagaaaaatacatttgtgaggccttataaccagaatttgtagctaggtatatttgagaagagagataccagatgaaatcaatcaatataacttattttttaaattgctacaataagattgttttctgaatacatccaataatagagaatcctatttacaactaacattttttcttctctcagcagttacaatggttggaatagggatgcttattccctgagaatctggggtctagggtgagtaattaaaatatatatcattgtataaaatagattcaaagccatttaccccccttttatatcaatagttaaatttactgtgggttaaggttctagcattttaaattacttagtaaagtattatattaaccaagatagtactgtactttattacattgcccttccttgacatcatttttaacttagaaagtattacaatattattgcatttcatatgtttgctttggttttatataatgaaaaatgattttgatcatttgccacagatttttacctcaagtatccacagatctaacacctcagactttcagtgaaaaagttctacaagggaaaaatcattgggtgattgatttctatgctccttggtgtggaccttgccagaattttgctccagaatttgagctcttggctagggtaagtcatacctgtcttaaataagttgtagccacattcatgttttagtaattagataaaacattgtaagtatgtaatttttaggtttttttcttaaatgtttcctctgaatttaaa

SEQ ID NO: 25061 - DNA, 2300 bp, Homo sapien
aacagaaaaatgtatttagcaaacaatctactacatctactcctgatgttttttcttctaattattgaaaatctcagctatatttttcttatacaaaatagtcccaaaatgttctaatgttgactgtcttttaaagttgtttttcctctaaattttacttgataaatcattttaaattcgtttgtacaatttttgaatttgttctcttacatgacactagataattgtagaccaggcaaagtttgtatactaactgactccctgtctaccatctggtgttccccgcccccgccaccataagtggaacaaacttccttccaaaaaaatttacagcagtcacaaactgctgtttatgatcattttagatataaaattccataactcaagttagcattgacattttataagtgctgtcaagtcactctagggaatgaaaatgagcatctcactatgtgctctgaagtggggacatatttctctgcttgttatggacggtgagagatggctaaattgaagcagagaaatatttcagtgatgcagagcaaaggtgacttcctgttttgtttcaggttttgtttccttctcctctcaatgaaggctgtgttttctgacattcggcaatccttttgctcagtgatttcccattgagagggcatagtgtgaaggcctctgcaggtcattccatttacaatataagctgaaagggtagagtggggcgggggtggggggaagagggagctcattagtggaagaagcagaccaggaggggatctgttttccattttctcctccagattgaactcatctggatggaaaggttttgattgttgttataatcatcattattacctgcgtgatgtcgttttcctacactttttttttaagtgtcgggcagaattgttgctgagaataacaaataatatctgccatgttatccgtgagcaaaatcagaaaaaaaaagtccaagtgtattagagctgttagtttccacgttaacccttaaggagcaaagctcaagagttctaattccactaggtggggggggcgggaatagaaggaaaaaaccccttttccttgcttctggtggcctatttgtagtcatgaacagcatttctttgtttctctctctctttttttttttttttaaaggcaatcctccccccacctcctcccccgcagttattgaaaatggagacctctgtagtcactagctctgggttgatatggctccaccgttgctcgcaggggtctgtgttttccgctacttggacaaagtgacattgcttaagcctttccccccaccaggtctgactttctgcagagccagtgattgcagaggaaaagctgtagtttgcttaaaggaaatacctccaggaaggagggtctcgggtgggttcccaagtggggaactagggggacttttccgtagggaattggggtgggctcttcagtgaggggctaggggctcgtttctggggccaaagacgggttccctagtgtgagggcgcgctcgactcggcgctgtcttggggtctcgcactcgcacggcttcgcaccccaccgcctgcgactcccaggccttctcttccccgggcgcccactccattctcgggaagagcagccggcactggagggcagagactgccccaggggcggagctccctctcaggcgggaggtaggaaagtgcagagccgcccgggcagaggcacagacgtccctgcggggctcctcctgagcgtccctcctgccagccagggtcgcagccgcagcggcggccgcagctcttagcccacacaggacttgtaaactcttactgcacccttctctcccattaggagcttttcctccctccttccccccaacccctctgtcctcctcactttggggaatttaatgctttctttagcatctttttgtgtgcgtgatctaggggaggagacaccccagagctccaactagctctcagctgaattctacttttgtttttatgtcttcctcgcctcctctcgtgtccctcttatctgactgatctgcgaagtctgatgcttctgccagagggagaggaataaatagatgttgctgcttccgaaggcttagacgttgggaaagagcagcctgggcggcaggggcggtggctggagctcggtaaagctcgtgggaccccattgggggaatttgatccaaggaagcggtgattgccgggggaggagaagctcccagatccttgtgtccacttgcagcgggggaggcggagacggcggagcgggccttttggcgtccactgcgcggctgcaccctg

SEQ ID NO: 25062 - DNA, 2300 bp, Homo sapien
ttggccaggctggtgttgaactcctgacctcaagtgatccatccgccttggcctcccaaagtgctgaaataggcgtgtgccactacgcctggccatgaaattgttaaattagttatggtatctataaaggtattaaaaagaatattaaagacattttttctactactgagtgaaataagcagattacaggccagtatgtatggtatgatcacattaatgtagagaaaacaacaaaaatagtatgttgttgtgtaagtttagaagaaaataaaacaaacaagatattaaaaatagtagttgtcaatttacttttaactttttcctccaagttacctttgccacgcctcctcccccgcctttgctgtatgagaaaaaatttggacaaaaacttcaggtgactatgaggagcgatttttttctcagcctagcagtggtagagaatgccttattttcatccttatgccctttcacatatgattccaaagtgtacatatccaaattcctactttacctctccagagatcactgccaacaaagttattacctctctaagatcctaatatttcaaaacaaacggcattaaatcttagttttgactgctcactgtgtaaatcagactatttcaggtctgaactatgccattttaaaatttccctttttaaaaaatctttatggaacaagtacaatttttcgacagatagtgacaactactccctactttaaatataggctggacaaatcatacacaaaataatagcataatctcatagtacttcaatttcattctactctctatgtttgaagaaagaaaaacattataactgagttcacagcagccttcttttatcttaacacaagttaccagtgtatacataagaagctgtgaacagaagctctttatgatattcatatacaaagctgctgagaaacagcctcaacaatgccaatcaaagagcaaaacattgggttagttttcaaactaaatgagctgctttgccctccatgccaactattaagcaataggcccttttatgtctttcccattcattactgactaatgcagcagttctcaacattctcactagtcccatgatcactcaattttttttccctattcttttaaataactctatttggttacagataaaatgagcaagttgacagcatacaagttttctttaagttcttaatttttaagaagtattgtgtaattttattttctaattttggtatttttttcaataaaatgttttttaaaacatttaaacaaatcatataatagctgacctggtatcgaatgctgtacttagacattcctaaaccattattttttatatttcaaactaagtttaaacaaaaactttattattattgaacgaatatccaaggatcttaaagaaatcaatcgaagtgtgatacagtctagtgtttattttatgttatggcaggtacacttgaatttcaaaaatttaaaacatatataaaaagtggttagggactaacatttgtatcaacagttgataaatgtctaagattgtttattatacagcagggtacaatggtagtgctaatgccaacagggcaccatggaagttagtctaaaaattatcgctaggctttatacaagcaacaacatatgctgctgctcttagaattttgggaaatgatctgcttctaatactaagcagttctttaacatttttaaatgttatacagtgttacagtatttagtttggcaaatgtttcaaaataaagtagaaatgtattcataacatcacagaaatgcacatccaatgttgttttcaataagaaccataggtacagatcagaactcttccctatatgaaataatttacacacagatgaatactataatatcactatctaaaataatcactaaatacagttctttttcagaaataaacaagcaaagatttttttcattatcaaatatcaaaaacatgttgataatgtatgtttttcaaataaatgatactttaaaattataggaataatctcagtgaattcagtgaatgtgcaacctaaatcaaccaagtatactgtagtacaaccatattaagaaaccaatgatcagaaaatacaaccgtatgaaagaaatttataatccacaaaactttttcaggtcttaaggtaaaatagttccacagtctacaggtaaaaccaaggcaacaaaaatgcgtgcttatcttgattaagtaggtaattttatgcagaagatgtaacactttgtttgtagacagcatggtatgcatttctcagcaagacataaggaaaacaag

SEQ ID NO: 25063 - DNA, 2300 bp, Homo sapien
aacctctgtgtcatacttgattcctgcttctctcacacatctaagttactgaatcctttcaattttatctcagaagtctgtctcagatctgcccattaaaatttttttattacacttgcctatttcatatccctttttcatgccttgtctgaactatttctagcagctctgttacaattttcctttttcagtgttttcttctgccaatatcagagttatccttagaaaattacctcttcatggccaggcatggtggctcacgcttgtaatcccagcactttgggaggccgaggcaggtggatctcctgaggtcaggagttcgagaccagcctggccaacatggcgaaaccccatctctactaaaaatatacaaataaaattagctgggtgtggtggcagtcgactgtagtcccagcagctcaggaggctgaggcaggagaacccaggaggcagaggttgcagtgagctgagattgtgccattgcattccagcctgggcaacaagagtgaaactccttctcaaaagaaaagaaaagaaaagaaaatgtctcctcatgctgtggctattttaaaaaattgtcgctgtctttttgcctgcagtttacaatccaacctctagcttggcattcaaggcccttcctaatagttgaaacctctgtactttaccttacacgttatgctccaccacatagtagttctaactacagctctgaaccatcatatctttacacagtttttttccaaaggccatttaatccttccagtgaaatattctttttcattccttgcttgcctggtatgtttttacttgtctttttaatagtaatttaaataagcgtctatgaatttactctatgacgtgtttcttcacacaagatttacccaagatctacccgtttctgttttcaccaagctatgtgcattacccaagctagctaagtaagctctgtatctcacttatatttctgtcttttaatattgttgtgatatttgcaacacagcctggattcagctactgtttgcttgaatagttagtatgctttcagagtaattggtgtaatgtaagatttcattcttttctaaatttagttgctacccaagcattgtgccaaaactatcagtcaagcagtgaataagaaatcaaaaaagcagactggtaagaaaggggaacctgaaagggagaaaccaggtgttgagagcatgaggaaaaacaggctggttgtgaccaagtaagtatccacttatattatacctttttgctccaggtaaaatatttatttcatttttttctattgacattagtactgaggaaatgctaataattgtatattcttcattttccagccattttaaaaaatatttctgagcttaattaacctgttagttgcttatttcatctcaaaatacagattttggcctttagaagaaaatatatgtaatagttgatatttgtctttttatactaagtactgaaggccaattatatgtttaaaaaattttgtgtgttacattataagcaatctgtaatttttaatttatttaaagttagatagtggagactttattttggcatgtttttgatatattagaacatacccaatgtcattattataaaacagaaataacagaccaggtagcattcagggatctttgcttgcttcattgtttggaggggaggtgtaggtgggtaataattcggtaaatattttttgtttaaagtatagttcctactttcttgctaaattgagcaagccattgcccttttatagacaactttccttctctcataacagaaagtacttcaggaattgggcgtgattatctttatgagtgcagaataagctctacctttgtatattaagtcagtatattcattactacctaaaggtagaaacaaatgacgccatctttagaatattgctcttatgtgttagttataaccttaaagattttgaactttctcagtttaggagaataaaaagtcgaattctctaagcattatctccaaataaggttgatatatttataaaattaattttgtattgcctgtgatgacatgtgaacattttaactgtttattaatttttttcagccttgataaattgcacactgcactttctgagttatgcttctctataaattatgtaccaaacatggtggtatgggaacatacctttaccccacgagaatatttgacttctcatctggaaatacgctttaccaagtaagaaagaatattgactgtttttgtttgttgactcagtaatgagtttgttatttaattatacagtgttttataag

SEQ ID NO: 25064 - DNA, 2300 bp, Homo sapien
tcaagtgagccatccaccttggcttcccaaagtgctgggattacaggagtgagccagcgtgcctggcctcaatttctctctttctttctttcatctctccttccttcctttccttcctctctccctcccttccttctttctttcctttctcccctcccttcccctcctccctctcctcctccttccctccctccctcctttgcttgcttgcttccttccttccttccttcctctctctctctttctttctttctttttaagacagggtcttgctctgtcactcagactggagtacaggggtgtgatcacagctcactgcagcctctgccttccgggctcaagtgatcctcccacctcaacctccagagtagttgggaccacaggcacgccaccacccccagctaatttttaaatttttgtagatatgggggtctccctatgttgccaaggcttgtcttgaacttcaggactcaaacaatcctcttgccttggcctcccaaagtgtgggggttacaggtgtgatggagcttgagcctagcagttgaagaccagcctggacaacatagggagaccctgtctctacaaaaaagttaaaaagtttaagaaaaattcccgtacacttgttctttttaatgcaaaatgtagagaaagacaaaaattgtaattcatctacatctaatctcttttacgcaaatatatacatttcattacagtctagggccagtatgtctatgaattagtgacaataaatattgaataatgagactactatctacagcgttctcctattgggtacttcctgagttataagcagctactagtattcaagtttatatggcaacatgatagtttttcttggggagtaagagttgtgttcaaatttataatacagtgccattttcttgttctccctatacagcagtttttaaaaactagaaaatgagacaatcttttattggtagcactctgtaattctgcgtctagacttagttatttgtagtctccctaaaggagcacatatttccccaatgttcaacatttttaaattttcttatctggctaccccaaacccctcctcgcagcctccccttctcaggtctgcccttactattccaggccccacaaccttgcctcctctaaattaaaatgttaactatcaggctgagaagtaaccagataaattaaattccttgaccagttaatgactagtaatagctcgacagatgatctctctgaagtgtttgtattcttaagactctctaggtacaaagcattcattcaaggtactgcagctttgtatatagaatttcaggcacactggcaggtatgattatgacttcttttggtgggaacaggactcttttaaatgccccttagattaaatccattcagtccactccttctttcttgttggaatattaaaatgaagatttctttacgaatagtagatatagtagctttaaaaaatattttaaagctattcattacaatttccttttcttaaagagttttgataaatccagtgatggcttattactcttagaatgtcttattgaatgtggcgggacattttgttactgacttaaaattaatgaatataatataaaaaattaacatatcgagaaaaggcaaagccaaaaatattagaggcctgagtcctcttggctgaagtttctcacctcaattacgtaagtcctcagttagttcacttttggaatcatgtctaatacatttgacaagggagtagccttggagtgtcgctaagaagaaattgatcaggaaaaatgagatggcaaagaagaatgtttccaagaagaagtgggatttagggtggaggctgtaaaaaaatgggagcggttcctttaggcattgaacaaacatttattttttgccttccacatgccaggacctactgcgtctcctccggatgggtgctcctcgccgacaaagtctagattgtgattatctcaaggacttgagttaccctcacttccgacctcctctctcacaaactggttccaggcggggagactgaggatgggctggggaggctggcagaggcgatccccacctcgcggagcacaacatctgctgtgttctgcggcgagcgcctgtcaagcagtgggaggaaaaagcgcttggagccaccagcccactcttaagcgaaactcgcctggaaaacaccccgcctcccagcagagtttctgccggtttctttagaagggtggtgcggaaaagcaacttttgggaacttgaaggagtggggtgtggggcgaagtggaaagagcacacaacgcgac

SEQ ID NO: 25065 - DNA, 2300 bp, Homo sapien
ttttctttttttagcatttaaattatgaccgaacatggttatatgtatatttgtttcttgctctctccacttggatataagatccatgaaagaagggactttgtttttattcactgctgtatttccaatgactataacagtgccaggcacatagctgatgctcagtaaatattcgttaactgtaattattttggaagcagggccgtattctacagtaaataaaagataaggcactggactgaaacaaacataggttttatttgtgattctaatcacaaataggggtgaggtcaaatatgataatgtgtgtaaagcattgttaagcagctaagggataatactaagaatctaaaattgtttataagcgcagtgcctagcatgcagtgaatgcttaatagtacttatttttttgatcattattatgataaatatatggattgatttatggttagagttgttttttgatgagcctgtgattgttgtttaaatgatgcaaataatctcttcagtttttcattttaggacatcctgtagatagcctgagcttatatatatatatatttttctctctctttctttttcttttcttttcttttttttttttttttttttttttgagacaaggtcttactctgttgcccaggctggagtacagtggcatgatcatggctcactgcagcctcaacctccttagctcaggtgatcctcccacctcagcctcccaggtagctgagactacaggcacgtgccaccaaacctggctaattttttgtattttttagtggagttggggtttcatcatgttgcccaggctggtctcgaactcctgggctcaagcaatccacccattttggcctcccaaagtgctggaattacaggcatgcgccactgtactgggcctattcctttttcaagagggagaagtttggtttatatctcagtttgctcaggctgctctaacaaaatgccataaactttgttgcttaaacaaccgaaatatattttcttacagttctggaggctgagaagtccaagatcaaggtgctggcctattcagttcctgctgaaagctctcttcctggcttgcagacagccagcttctccttatgtcctcatactgtctttccttggtccatataggggagcaggcagatttctttcagttctcctgaagccactaaacccatcatgaggaccctaccctagggtcttagtctaatcctaaattacatcccaaaagtcccatttaaataccatcaccttgaggtttaaagctttaacatatgcattttgaagggacagaaatagtcaatccataacagttgaatttttttatgtcagaaagtttcaacaacaacacaaattttaatatgtggtattggaagaaaagttttcataagtgcaacttcttcattttatatatgtgtttatacattgtgttgaaattcatttaaaattacatttactttaataggggtttgaaaaatttctctttaaaggaatcttgtgatttcttttgcaaaacttttttttggtaatcagaatcatcgttctataatttatttatctgttttacaaatttggatgcttacacaattgattttcttaattcttcgtatggatggacttgctgcaattcttatttaggatgtatatttactgtatgaaatgaaaatgtaggctgaaagtcagaaaataaataaattttaagctcttgtcaatctacatatatgagcataaattttaaaaaatatatcttttttcccagtttatttaaattgttgcctcacaaatacgcacaacaactttatctagtaaacgttcctcttgcattaacagcaaaagcagaaggtgtgaaggatacaggaagcgagaaataacttttaacgtctgctctagccctcctggactagcctaaaagcagacaggcaggaaaggctttgggacatagggtgatttgcaaggtgactccgccggtctctttcaagcgggagcgatacacaggtcagcccggatcgtccatggtcactgccgtaagtgacactaacagaatatatcagaaaatcactgcctttaaagaaccaggacatatcattcctctctccaacgaagtcttatattttaccattctgcgtgtattagaaagctaaatttaaacagcaacaataagaaatcttccccagtggatccctcgagcctttcgggaaaatgcaggtttctggctgacaggaagaagaaacagcatccaatcggcacttgtgtctcaatgaccaatcaaatttcgccttacattgcatcgc

SEQ ID NO: 25066 - DNA, 2300 bp, Homo sapien
tttagtagagatggggtttcaccatgttggccaggctggtctggaactcctgacctcgtgatccgcccgccttggcctcccaaagtgctgggattacaggcatgagccaccatgcccggctggtgcaaatctttttcaacatcttcttttatttaaagaagtatcactcttttctctttctctgcatctgttcctaaataaacccgttattaaataaaaatggtgccgtatatgcatgcatgttttcaaattactttttttcattatatctatcacagaggtctttctaggttaatatttacactcatatcaaatccatctaattcattttagttgttgtatagtgttcttttgtttggctagatcataatttgtatagaaatttcttttttattttgtagagaagtggggtctcactatctcaaactcctggactcaagtgatcaacccctcagcctcccaaggtgctgggattgcaggtgtgagccaccacatctagcctcaatgtgtgtagaaatttatacattgatatacctttcttggtagcttaattctaaaaagtggattgccctgtgttgtgggctgactactccccaaagatatccatacactaagctttagaatctgtgaatgttaccttatatggcaaaaggtattttgaagatgtgattattaacttaatcacctctactgaatattgaaatagtaagattatcctggattacctgggtgggtcctaaatgtcatcacaaggctatgtgatggcagaagctgaacaaagcagtgtcagacagaccaaagatgctacatcgttggctttgaaaaagcaggaaggtggcacaagctaagaaatataagtggcttctagaagcttgaaaaagcaaggtaatagattctcccctggagcctccagaagaaaatagtccttctggtactttgattttagccctacaatactcattttggatttttggcctccagaactgtaagagatacatttgtgctggtttagttaaccgagcttgtggtactccaatgtgactttatctgaactttattacatctgcaaagacccgatttccaaataaggtcatattcataagtatgagggttaggacttgaacataaatttttgagggacacaattcaattcacacacccattttcaaaaagtcaattcgatctgtgagtggttttaaaatttgatttctgtgaacctaccatttaattctggaattgttactgcctcattccaaagacaaaattcttcctccatttgagattttaggaagtcctagaagaaatagctgagcatgggtggatattttggaaataatcctcatggtatggagcagagaacgtccccagttatacatatgtagcacattattttataaagttagtatttgagcaaaactaaacaatatatttttacacacacatatgcagaatatgtgtatgtgatttacgtatgactatgccctaaagaaaagcagcaaagtgaggggacgtggacggcagggatggcacatgcagaagcacgcaagattccgcggtgtggagggttcgtgggtgcgtataattatcttccattatttacatgtgtactttatgcgttcgttagctatatttttgtatgttttaatatgcaacaaaacggcgtatgagttacgctttaatgtaaaattgtctacataacacaaaatttaaaagaaatggcatacggatagtagaaaacatgctttgaggaaaaagcgtcatgtactaagtccagaaatcgacattgcaaagaggcaccaactgttttcatcaagctgacttttccaggtgctactcagaaaagctgaccgatgatagagcactgggtcaactcacgctaattatgaaaccgtgagtaaaataatctgtgcttctatgtaacttaagtacccacaaatcaggaagcattcccggatgaaaagcattcacagaaccatacgctggttcgccaccttcccggtgcaaaaaccctttcctcggaaattctcagcgcaaagactttgccctattccaaaatggctccggcgcctacaacttaagcatagcgcaggtccggaagttacgcaaccccataaggtagcacgccgttacccgtggggagcgtttccgccatttttgaaaattaattgggaaggtactggttttaagtgtagttgccgacgcaatggcagcctttgcagtggaacctcaggggcccgcgttaggtgagtgaaatattgcttttccttgctggcactgccatccatgctctgggcctggag

SEQ ID NO: 25067 - DNA, 2300 bp, Homo sapien
ctatgttttcttatagtgttttttaagtttttggtcttacatttaactctttaaacgattttgagttggattttttagatgttgagatataggggtctaggttcattctcctgcgtatggatatccacttttcccaacaccatttattgaagaaactgtcctttccccactgaatgttcttggctcctttgtcaaaactcaagttggctgtaaatacatggattcatttctgggttgtcctgttcctttggactgtgtgtgtgcttttatgctggtaccatgctgctttcattactatacttccatggtattggtttttgtgtctgtttttatgctagtaccatgttgctttggttactatagttctgtagtatattttgaagtccaatagtgtgatgcctccacttttgttctttttgttcattattacttcaactattcagagtcttctgtgcttccatacaaattttaggattattgtttctatttctacgataaatgtcactggtattttagtggggattgcattgaatctgtaaattattttaggtagtatggtcattttaacaatattaattcttccaatacatgagcatgggatgtattttcctttgtgtcctcttcaatttctttcatcagtgcttttcagtttttgttatagaggtcttgcacttgcctggttgaatgtatcttgtagtattttatttttctcgtagctgttgtaaatgagatttcattcttattttaagctaatttgtaattggtatatagaaacactacagattttttttgtatattgattttgtatcctgcaactttactgttcatcagttctaaaaggtttttggtggagtctttagttttttctctatataagatcatgtcatctgtaaagaaggataagttggctttgtcttttccaatttgggtgtcttttattttattctcttgcctgattgctctggctaggcgattcagtactatgttgaataggagtggtgaaattggggacctctgttcaagtccttagagaaaaagctttcagctttcctccatttcatatggtaaatgaaagctgggagtttatcaaatatgttctttattatgttgaggtttgtgccttctatgcctaatttgttgagagcttttattataaaggtgtgttgaattgtatcaaattctcttttctgtgtctatttaaatgatcatatgacatttgaccttcattctgttgatatgacatataacaattactgatttgtgtagattgaacaatccttgcatccctgggatcaaacccacttgatcatggtgtattaacttttggatgtgttgttgaatttaggctactattttcttgaggatttttgcatctgtgttccttagggatatcagtctgtatttttctttttttgttgtgtccttctctggttttggtagtaggcctcatagaaggagttaggaagaattcactcctgtttgtgtttttggaattgtttaagagcaactggtgttcttcataagtttgatagaattcatcggtaaagccatctggtcctggcctttttatttcttgagagtttttttttattattgatgcaatcttatacatcctgttagtctgttaaggttttctatttctttttagtttaatcttggtacgctgtacttcttcaggaatttatacattttctctaggtttttcaatttgctagcatatagtcaatcataagagacttgaatgattgtttgcattcatgtagtataagttttttttttttttttttttttttttttttgagatggagtctccctttctctcccagtctggagtgcagtggtgtgatcttggctcactgcaagctccgcctcccgggttcacgccattctcctgcctcagactcccgagtagctgggaccacaggcgcccaccaccacgcctggctaattttttgtatttttttagtggaaattgggtttcactgtgttagccagaatggtctcgatcttctgaccttgtgatctgcctgccttggcctcccaaagtgctgggattacaggtgtgagccaccgtgcccggcccatgtagtataaattttaatgtctcctttttcatttcttattttatttatttgggtcttctctctttaatcatttatgagtgtatccagaagtttatcattttttttattttcaaaaactttcagtttttttgatcaaattttttgtccctattttgtttagttgtgctccattctttttatttctttccttctactagttttgtgctaaattggtct

SEQ ID NO: 25068 - DNA, 2300 bp, Homo sapien
actttgccactagaagcacagtgtgacattccacgtagactatattctgttccatgggatgagtcatatatcagtgtttcccatttcctgaactggatattgagctttatcctgtagatgaaaattttagaatttcattagacgtattttgatagaaaaatattgcaaaaaacctcctaaattacattattataaattaaaaaaaaataacctacatcatctggtcctttcacacatggtgcttcttctacttccctacaagcttccttggtatagcttattaatactaacaatgttatctcctttctaataactaactttggaaagtttacaaaccttccaaagacatactagaaatcatacaggttattagttctttccaaagttgacgtgtccagagaatgcctgcattttcaaaatgtaaacataaaacaatatttttacgatagctggaaatggatttaatttccatgcaatatttagtgtagatcaattacatgtttttcctctgatagaactgtgttcatactgaattctaacaaattattgggtgatctgttccacagagtacagaagttttgcaaattctcgctttctcccgagacttgcagactcccccaagtggatatctgaaaaatttagccaagtgcctctaaacaactctgacccttcataatgagctttgatcaaaccataccaacttttttttcccctttgtttgaactgaagcataatacaggaagaatgactatgtaaatgtggtaacttcccctttctaccatctatgagttataatttactcacactactattgactctctttcttctcttttttccctctttcaaaaagtgaaatcaaactgtcggatttatttaaggagcttattatggattgcagggccactgctacataaaatcctacatatgagacacacagagtggaatgtattgcaatctcgattctcaaataaacaagtttcccaaataaacacagtttatatcaaagtgcagtttgttctgacataggggcatcagaatgtctggaatctgctttaaccaattaagcctttcaaggcaaaggaaaaataaagccttcagtaaatccattgaaggtaccatctcccagcctcccactgcctgttatcgatctttttaagtgccgactgatgaatcgtatatatatctgatgggatgctctcactccaccacctcagaggggctaaacttacacaaagagagaatcaactgggtgggaggcagggtgggagggcacagccgggctgatggctgccttggacccttgaaaaccaaccagaaagtctgtctccagggaatgctgcagacccggttccctactttccgtgacaaacccattagttcgtgtgcagatttttccattcaggtcgcttctagggcgaacgcttttgttcgctaccactctgtagtgcgagaggaactagagaggcatgtaaagcaagcttgaggcagcagcgcctttgccgcaaagcatccctttcccctcagctttagcaatttaggaagaactgaggttctcaggggaggtggggtgagaggattgccaggaggagggacatataaatcaggagtccctgcttttaccctctactcacttgtactcgcatcgccacaactaccctcccccgaaactatcatcaacacaagcacttacggtatctacaaatgtgtgggagcaggggtgggtggggggcatattttctttcctcgcctttccctaagactgaacagggtaccagcctccataccaaacacacattaaataacaaaatcaaataagccaaacccagtggatagcaattatcttgagaaagaagccgctgctggcaccggcctggattcgctgcagtcggaagcgggtggctttcggtattgaattattaatttatttatccccctcgcccccacccccacgccgactgccaggcaagaaatcgcggcctcttcgcttcctctccgcccccaccttccaggagtctcccacttggcggtggccgtcgcgtccccggccctctgcggcagcggcgccgcgcggggcgctcccactcgcgctcgggctggcgcggccgcgggtcccggcggcggggtgggcgggggaggcagcgggtgacagatgtactcctctgacagctctcagtatcagcccagtggctccctgccattggctcagtgcaatggaccggcaacgccgctcactataataacactcatgcctgccagcagcagcaactccgagtgcaggcgccgagcgcgggggatgctgc

SEQ ID NO: 25069 - DNA, 2300 bp, Homo sapien
gtacattggccctttttatccatggctaggatgcagggcagtaagtcctgagactgcacaaagtggcaaggctctgggtctggcccacaaaaccatttttccctcccaatcctctgggcctgtgacaggacaggctgctgtgaagaaacctgacatgcctcggagatatttttccccagtgtcttggtcattaacatttgacttcttgttacttatgcaaatttccgcagccagcttgaatttctcctcagaaaatgggtttttcttttctatcgcatcatcaggctgcaaattttccacttttatgttctgcctcccttttaaacataagttctaattccaaaaaataactttgtgaatacataaaaccaaatgctttcaacagcccctaactcacctcttgcatgctttactgcttagaaatttcttccaaaaagtttcacaaatctctagggcaggggcaaaatgtcatcagtctttttgctaaagcataacaagagtaacagagtaacatttattccagttcccaataagttcctcatctccatctgagaccacctcagcctggactttattatccatatcactatcagaattttggtctaagccatttgacaagtctgtaggaggtttcaaactttctcatatcttcctgtcttctaagccctccacactgttccaacctctgtctgttacccagttccaaagtcacttccacatttgcaggtatctttacagcagcaccccactacccagcaccaatttaccatattagttctcatgctgccagtaaagacacatctgagattgggtaatgtataaaggaaagaggtttaattgactcacagttgcacatggctagaaaggcctcacaatcttggtggaaggcaaaggaggagcaaagtcacgtcttacatggaggcaggaaagagagcatgtgcaaggaaactcctctttataaaaccatcagatctcatgagactcattcactatcacaataaaagtatgggaaagacccgcccccatgattcaattacctcccactgggtacttcgcaccacacgtgggaattatggatgctacaattcaagatgagatttgggtggggacacagtcacattatatcactagtataagtgagtcctactcaagattctgacatattacaattgcataataacatgaaccattagggaaaatagtacttttattatttttaataactgtacacatcatgaaagtacatagtgaaaatatttgtggcacaagataactttgatgtctccaaaattataccacacacacggctatttatcaattatgttcgagttggcatgctgtttttcttgccatcaacccagaaaatgaacttctttaacacagatgaaagataatacccaaggtagtaagaatttctagaaaaacaataccaattttcttccaatatcttgaattattctggaaacgtgcctgctgtttgagagaagggattgttttaaaccacatcaggagagatcatttgtcttatggattaacataaataatgtactctcagaacacacaaaaagggctgctctgcctatggagtagccactctttattcatttactttcctaataaacttttcacttacacacacacacgcacacacacacacacacacacagacacaaaggaccagataactttctaatatactgtacatcaaaatataagaaaacatattatatataacagaaatacataagcaataagcaagttgaatttttttgtaaatttgggatttataaggcacgaatccttcatctgaattacgcagagaaacagcaggaaatgatcaataagaagagattaaagttttcaattaaaatttgcctaaggcatagatataaatttcactatgatgtaataatatgctttggctttttcacaagccaaaatgcgagaaaatatttttgttagaagtggattgtcatgaatgttgtgtttacctctcgacaaggtcaaagatgatgcattggaaaatttcaacaataacaatgaaactttaaaactactatagaccaaaatacaattaatcattttccaacttttttttaacagaggctcaaggaactgaaacaaagggaatttgctcgaaatgtagcatctaaatccaggaaagatgaaagaaaacaggaaaaggcactccaacgcctgcacaagctggctgagctaagaaaggaaactgtatggtgagtatccaatgaaattgtaagttttcttaaaacatgaccaaaaaaggggtatagggggagtca

SEQ ID NO: 25070 - DNA, 2300 bp, Homo sapien
gggtggagtcctcatcaagggagataatgttcctatagagaccacagggaactctccagccttctttctaccatgcagggaggtaataatgaaaggacttcaaaggacccccacgagaatctgaccatgctggtgtcctgatcttggacttccagctccagaacaatgataaataaatttacgttatttctaagccacccagtctatggtacattgttataacagcctgaactgtataagacattaagcaagtatcaaataccaaggggttctatttatttctgatgacatcatagacattagaagggtaagtgggccacttagaattctttcttgtagaactttttgcaaaactgataaaagcaaccagtcaacaagaatgtactaaacctccttcagcattgactacttagtcaaaggctggggaggtttgggggtaggtgtggtgttaaggactaaaaacatgaaaaggcttaagggaagtacacactataatccagtatgattaactatggtttgtgtaagtgagatcacacaaatcaagggcaacgtgaactctaagcaaaaataagctaacgggggggctatcacagttcagagaatcttgatagctcagattcatagactggggagaagaagacaaggtatgccaggtttgggggcaaagttgacaaaatactgaagtattagcatggtatttatgggtaggtgtgaaagactcaacttgaagaagctgagcctctctggttggagacaatgctggatggaaaggctggggcaaattatggagtctcttcctcattgaggcagggctttctttcattaaagtaaggttaaagtactaaacatattaactcattttaagtcccactgtttcagttcttttttttttctttatgtgtaaaatagaattcaactcaaaacaaaataatgtttcccgtgaagagagtttggtccaagatactgtcagttaaaatcgtaacatatcattaaatggcagctatcactaataacctttcagcttctaaacatgtttctaagtacatcaaatcttactatataagtatatatgaagttttattataaggaatattaatatggtaccgtgaattgttaattaaggactaagaatctaaactttctggaatatgattatgtccaaaccattaagatgaaagtgcttcatatgcattctaaacaataccttcggtcagatgtgggattttctttttcctgtaaatgttgatgcaaattcctttaatgaattttgtatgatgcagcctttgagttaaacagcaagtagtaaagggtaaaggaaagaaagacgataaaaacttgttcaccttttcaccgaaattcgtagtatagaatacagcattgcttcctgggatcacaggcagcttgaccccgagaggtaggtccagtagctgagccggtccaacccctgcaaagtgggttttgtgcacgccctgtcagacacaattggagagttttgtctttccttttaggcagtattagtttagtttagaccaatctacttccattgcaaccaaagactccgaagaattatacaatcagggttcggggcatcctgaagtcctcccgttttccctggtcaccagctctcctggcgtcccgcgcctgccagttgcggccggtacagtccgagccaccgccaccgcccccgggcgccgcaagagggcagcctcctgacgggggacagttgggagcctcgcgacccgtgtgtggcgatccctgccccgctccccagcaggcctgcggccgccagagggcgacgccgcccagcttgcggccactcacgtctctgcactgctgggtgtccgcggccaggacgctggcgaccgtcttggtgacggcgactttggcaggcttggagcaggcgccgaggtacagctccatggccggcacagccccctcagccccttcctcacccgccccgctctccttctctagcaccccgttgtccctctgtccggacctgaccaggaatggccagagcccaacgacctcagccccgccccccgcgttccaggcttccaatggtagcggccccagaagggcggtggcctcctgaggggcggctcgcgccagcgcgtagagcgcccgcagagctgggaaaatcggtccgagaggcctgatctgagaggaccacagttgaaacttcatctttctctgaaaccatcacgccttagccaatcctaacgaaaacgtataagctttgttggtgggtaactggttaatttcccctggcttccaaggagccctgttccgttcaataa

SEQ ID NO: 25071 - DNA, 2300 bp, Homo sapien
agtatttgaatcaagagaaatcagacaacagttgttgctaaatgaaagtacttcttccttcaccttttttctttgtaatataaaaagattattgacaaataatttgagaatacaaagatatattattttcccacgtgtattatagccttctttctctgtctttaatggcactgtatacttgtcaagaattatgttccatatacttttaaaaacttgagatgaaacagaaacttagcaaagttcaatctgtcagaaccttgatagagtatattcttattggagtcgaacaatgttattacaattataatccaattacagctaattgaaattattactgtgataactaattgtgtgcactaaactccttttatgatataagtaatattaataaagtaatatgtatatattttttagagacaggttctcactttgttgcctacacaggagtgcaatggcgcaatcatggctcactgcagcctggacctcctgggctaaagctgtgttcctgcatcagcatcctgagtagctgggactacaggcacatgcctcccagctggttaattttttttttttagagatggggtcttgctatgttgcccaggctcatctcaaactcctggcctcaagagatcctcctgcctcagcctaagtaatgtttttggatagaaatttattgctgattaacaaatgcagagagatattacttacaagattgttagcagtttattactctttatgccaaaatgtcatcaaattttatgtcactgctattttttatttttaaatcaatttaatgatttaaaaatatatttaaaatatttatataatattaacatatcaaacatttttaaaatatccatctgttttcatttttgtttgtaggttgtatgtaccttgagagaattgaataagtacaggcaatatcttaccagtttaaaattagactttgagagaaactatataaaagaacaagtaagttaaatacttaaatttggtttatttacatagagtttggaagaaatgcttgattatatgtagagtgttcttctaataatattttgatcctttattattgacaaagtaattgaatattttttccaagtgaaaatttacagtaggaataaacaatattttaattttgctatagttggccaagaatgggaaagggactgggttatctatcaacacaccagtggtagctggcataattcaataactaaattgctagtcagatgtgttgtttccccctgagctaatgccaataacaaacatctcttgtggcagaaagattcttaaattgaaacctaaaacagtttgagccataggaaaagaacaataattatctgtagtgttctacagtgattcaagaatatgtacactctgtgtttgtactcatacacgtgcacctgtaaaaatgttgttcttgaatgtgaacaaaatgttgttcttgaatgtgaagtagaatgattgggtgtagagtgaatggttatggatagtgacttccttttgatttttgacttaaaggtgtgtgtgtgtggggtgtgtgtgtgtgtgtgtgtttgtgtgaattcagattttagggtcaagaggtttggatcaaagtgagaaaggtatatttacatgagtgtttgcaaatgtatgtcctaacaataaaagggttaaatacaaacaagaaagactttaatatatttctaagtattctgtattttccccacttcattctgtgcccagtgtttcttctctacttcctgcatatttttatttaacttatttagaataggtagacaaataaactgaaatgtttaccttttattttcagagataaatcttaattttggtttacttgtctgtgtctttaatggattcaaaatagatgtaaatgcaattaaacagaattaagcatttataaaatatataaatttaaatggttttatttctgggaaatgtaaaaagcattatatatatgtaatacacacatttcttaaatagagaatacttgcaaaacaactacataacataccggaaaacaatcaaatccctcaacattgtgatgttgcacaagtccaaaactggttgttaaaggagggcactgaatctattaaggaccaggagcggctgatgaggcataggtaagattaaagttgaggcatattttatgggtatgttgtggacccaaataagctggaaaatactagaaagaattgaagacaatttaagtactggacaccattctcctggatccctcagagtgtagaggaaggaagtgaaaccaagaggtggaagaattttctaccagaggg

SEQ ID NO: 25072 - DNA, 2300 bp, Homo sapien
caatcaattaaatgtcctttctctctcccactctaattttaatggcatgcctcacaatgttgatgagccaactccccaaacatctgttcaatttatggataaaatgatggatcctttactttcggaagcagatataaccatagtaacagataatattgttaggactgtatttcacaaactttattcagctgccatgacagaaagaaatgtaagggaaaataggtataaaactatcactttttcagcaaatgtttcttctcatgaacacacctataaaggaaagtcctctgtcacggctttggatgaaaatccatgtacttttcagtctagattcagcgttgctgacaaggagacaaaggtaaatctagctgaagatattgtacaggcaatattaacaaatttagaaacttttgctacttccaaagtaaaatctctcttttattctcaagtcaactttacagttccagtggctttacctattcagcaagatcacagtacattgagcaaagcattatcagccaaagattcatattctgatgagcaattttcctgttgctcagtagatcataccaagtcaggaaagaccaacttgtgccaactgtctttgtctaaattaaatacttatgcactacaagtggctagaagaaatttacaaggaatcaaacaggaattagataaagaaagggaaaatccttttttaactcatgacattgggatttctgaaagtattgcaagtcaaattgttaacgcattgttagacattatatcacgtaaaggcaaatgtgacaaaaacagttctgacaaagagatcgatttagatcagcaaaaaggtgttattgaaaagctgctcaatgagaccaaatatcgaaaagtacttcaacttcaaatacaagataccattgaaggtatcctatgtgatatttatgaaaaaaccctgtttcagaataatctctcatttgccacacccactctgaaatgtagcatagctgataaacattcagaagaaaattctgaaatgttcatggagggtgcaaataagattattcctaagctttcagttcctaaatcagatgtcattttgatatccaatgatatagtgaatattgttcttcataatctcagttctgctgccacgcttgtcataaatgcaaagaatcctacttctgcaagattgcccctgacattttgtgatacgtttccaaaaatagactgtcaacagcctcttaaggggtcaaaaactgaaagaaaaacagagcgtttttcatattcaagaaatcagaaatcagcttatgctgatgataatcagataactgtagtagagaaagaagacactcagaaatctgctactgactcatgtgaggaaaatgctaacttcattactaaaactatttttaaacgtttggaatcttttgccacagaaagaatagattcattaattacccttgctttccaaagtaaagaaaagtcatttgttatcccagaattggaaaattgtaaacaaaatgacagcatcttttatgattcaagccaagtggaatcagatgtaaatgtcctgaaaatatcagcaactgaaaccattctcagccaagagcttacagatttcacttttgttggtcgcagagaaaaacttggatccacaattcacctatcgcaagctaggcttaagacatatgctgacgtcattgccagtgccattttgaagcttattaaaaatgacttagacttagaaattcaaaagatatatccatatcaaaacaatattttgttccaagaaaacatcattgtgagtgaaattgttgacagtatgttaaagatgttagatgataaaagatctgtaaaggaaatttgttttaattcaaaagaaaattctaacttttcacaattagctttatcaaatgaaatattgctgggtcacaaagagaaggaaagaagtaccaaacaatctctatttacaaagtatccattagagcaaaaccaaatgatattggaaaacaaaaggcagataattgttttggaagaaatatttatgagaaatggagaatcaaaaaacaaagaaaaaggtgaactgctcattgcagtggaagaacttttgaataagttgtatcaaagagtaagggaagtcacaggccatttgcctccacttaatgaaactgccaactttatatctaattctaagattaaaacatcagacacaacacagaaaaacagttttcaatcacatattaacagtgtagcaaatgacatagttgaaagtgttttggggaaaatgtacttggtagttgtgacatcattatatgaaa

SEQ ID NO: 25073 - DNA, 2300 bp, Homo sapien
ccaagtcaggaaagaccaacttgtgccaactgtctttgtctaaattaaatacttatgcactacaagtggctagaagaaatttacaaggaatcaaacaggaattagataaagaaagggaaaatccttttttaactcatgacattgggatttctgaaagtattgcaagtcaaattgttaacgcattgttagacattatatcacgtaaaggcaaatgtgacaaaaacagttctgacaaagagatcgatttagatcagcaaaaaggtgttattgaaaagctgctcaatgagaccaaatatcgaaaagtacttcaacttcaaatacaagataccattgaaggtatcctatgtgatatttatgaaaaaaccctgtttcagaataatctctcatttgccacacccactctgaaatgtagcatagctgataaacattcagaagaaaattctgaaatgttcatggagggtgcaaataagattattcctaagctttcagttcctaaatcagatgtcattttgatatccaatgatatagtgaatattgttcttcataatctcagttctgctgccacgcttgtcataaatgcaaagaatcctacttctgcaagattgcccctgacattttgtgatacgtttccaaaaatagactgtcaacagcctcttaaggggtcaaaaactgaaagaaaaacagagcgtttttcatattcaagaaatcagaaatcagcttatgctgatgataatcagataactgtagtagagaaagaagacactcagaaatctgctactgactcatgtgaggaaaatgctaacttcattactaaaactatttttaaacgtttggaatcttttgccacagaaagaatagattcattaattacccttgctttccaaagtaaagaaaagtcatttgttatcccagaattggaaaattgtaaacaaaatgacagcatcttttatgattcaagccaagtggaatcagatgtaaatgtcctgaaaatatcagcaactgaaaccattctcagccaagagcttacagatttcacttttgttggtcgcagagaaaaacttggatccacaattcacctatcgcaagctaggcttaagacatatgctgacgtcattgccagtgccattttgaagcttattaaaaatgacttagacttagaaattcaaaagatatatccatatcaaaacaatattttgttccaagaaaacatcattgtgagtgaaattgttgacagtatgttaaagatgttagatgataaaagatctgtaaaggaaatttgttttaattcaaaagaaaattctaacttttcacaattagctttatcaaatgaaatattgctgggtcacaaagagaaggaaagaagtaccaaacaatctctatttacaaagtatccattagagcaaaaccaaatgatattggaaaacaaaaggcagataattgttttggaagaaatatttatgagaaatggagaatcaaaaaacaaagaaaaaggtgaactgctcattgcagtggaagaacttttgaataagttgtatcaaagagtaagggaagtcacaggccatttgcctccacttaatgaaactgccaactttatatctaattctaagattaaaacatcagacacaacacagaaaaacagttttcaatcacatattaacagtgtagcaaatgacatagttgaaagtgttttggggaaaatgtacttggtagttgtgacatcattatatgaaaataataaaagtaggacagaagttgaaatatctgaccacaatgattccttactaatgaaaccattaaggtttagagaaactaaacaagcaggaaaaataagtaattcccctagatatgcgatatcacaggcttattcttatgtcgacagtcaaaatatctctgtgatggaaaacactcttttgccatatttaccattgcaagtgaagaaagacttaattcaaatggttctcaataagatcacaaattttgtctcacttcctttaaaggtgagccctaaggacaaccctaagccatgctttaaagcacatttaaaaacaagatcaaaaattaccactttgcctaaatttacaaaaaaaacacacttaggactgagtgctgctaaggccaaaagcaaaaccaagttaggtcctggagagaagaccctaaaagacagcagatccaagactgccattgggttgtcacacatcatgtcagctggagatgccaaaaatttactggacacaaaattgcccacttcagaactaaaaatatatgccaaggatataataattaacatcctagaaacaatt

SEQ ID NO: 25074 - DNA, 2300 bp, Homo sapien
ttgttgattcagtatttgcaaatgttgtgcaaacctctggttctcaagaatcagctgtgcaaaatatcacaagcagtaatgacattcttatagatagaatagcaggtttcatcattaaacatatctgtcaaaaacatcttcagccatttgtgagtggaaaatcattatcttcatcagacacatattttgatgatgagagaaggcagttattttataccagtgtttactcttcaacattcttggaagatgtaatctctggggttttaagaaaaatattccacagggtagtaggcattgtacaaacaaaatccataagagattcagaagatgaactgtttgagaaagctgaagaactcatacatttgattacaggggaattctcaaaagcccaagttagcattatagataatactgaggaaagactgtgtttacctccagtggagagggatgtagtcaaaacaattgttgacatggtgtacagcaaagttttgcaagaatatgaaatggaagtcgtgcccaataaagattttctaaatgacacaaagacattggctgcaagaataactaatatcatcctggctgaaatttttgatttccaaattcatccagatcttatagcaaatctgccttttaaatcacattccaaactcagtgcaaatgttttaatacaaagagttcaatatgatataagtaaatcaagattccaaagacaagcttcaacaatgtataccactatgttatcacatagtcatttggaaaaaatagttactcagcttacatctcagataagtccattgaacaccagtgcagagcagtcagatactactaaatcagacttaagtaatacagtgataaaactgataaatgaaattatgtcaataatttcaaaacatgaaatatgtattattaaatatgggaataaaaaacagagtatgatttcagcaaaagatatccagtctatggttgattccatttatgctgatctttctcattcaaatatataccagtccattacaaaagataaaaagagcataagtgacatacctgtttcaaaaatagcgagttttataataaaagaaatctttaaccatcatattcaatcatttttatctgaagataaaactctccttttggcagcagttgatcaaacttataaattgaaagcaatagatcctaaacaaagagaattatcttttattgtgaactcatctgtctttttggaggaagtaatttctgagctcttatgcaaaattctttatgcattttcacataacatgttggttactgaaaatccagatagagtgaaactgaaacttaccaggattgttacaacattggtaaattcaattgttctggagttcaccacatcagagattttagttgcagataactttgataaaaatttgtgtttctcagaaagatacaaagaaatggttcaaaaaatagtcaactcagtatatggaaaagtattagatcaatataaatctctgattcaaatacatagggttatacaaagtgacacaatatgttttggtaggaaaatatattatttgctattggaagaaatatatgattatcaagtgcagtcattagtttcaggagaattagagtcttcttcttattcgtatccccaagctgataatatcatcagaaatgtgcttaacataatcacaaaggatagccatgccttgccaccatatattactgtgttgcctcattctcttttagaagatatggtttacaggcttctagggcatgtcttcccttcaactcacactgaaaatgaactaaaagagaaaaagtttccaccggatgatgaatttgtggaggcagcttcaaaattgactgatgaaattataaaagaaatttctgaacatgagattcgactttccatggcagaggataatgcagaaagtatgcagttagaacctattgaaaatttggtcgactccatatgtaataatattttgaaaacatctgaattccaagctgaagtacaaaaagatgcagacaaaaaaggatgctcattcctcagtaaattagctggttttattatgaaagaaatcatgtatcatcatttacagccatttttacatggtgaagaatcatctttcagtgacttatctgattatgaccatgtctctgaacttgctaaatctggtaaagaaaagacacagccttctctctattcagctacatttttggaagacataatcattgaccttgttcacaaattttgttctctcctcattattactgaagattctaagaaaaatgaaatggcagagctagatattatg

SEQ ID NO: 25075 - DNA, 2300 bp, Homo sapien
actcagcttacatctcagataagtccattgaacaccagtgcagagcagtcagatactactaaatcagacttaagtaatacagtgataaaactgataaatgaaattatgtcaataatttcaaaacatgaaatatgtattattaaatatgggaataaaaaacagagtatgatttcagcaaaagatatccagtctatggttgattccatttatgctgatctttctcattcaaatatataccagtccattacaaaagataaaaagagcataagtgacatacctgtttcaaaaatagcgagttttataataaaagaaatctttaaccatcatattcaatcatttttatctgaagataaaactctccttttggcagcagttgatcaaacttataaattgaaagcaatagatcctaaacaaagagaattatcttttattgtgaactcatctgtctttttggaggaagtaatttctgagctcttatgcaaaattctttatgcattttcacataacatgttggttactgaaaatccagatagagtgaaactgaaacttaccaggattgttacaacattggtaaattcaattgttctggagttcaccacatcagagattttagttgcagataactttgataaaaatttgtgtttctcagaaagatacaaagaaatggttcaaaaaatagtcaactcagtatatggaaaagtattagatcaatataaatctctgattcaaatacatagggttatacaaagtgacacaatatgttttggtaggaaaatatattatttgctattggaagaaatatatgattatcaagtgcagtcattagtttcaggagaattagagtcttcttcttattcgtatccccaagctgataatatcatcagaaatgtgcttaacataatcacaaaggatagccatgccttgccaccatatattactgtgttgcctcattctcttttagaagatatggtttacaggcttctagggcatgtcttcccttcaactcacactgaaaatgaactaaaagagaaaaagtttccaccggatgatgaatttgtggaggcagcttcaaaattgactgatgaaattataaaagaaatttctgaacatgagattcgactttccatggcagaggataatgcagaaagtatgcagttagaacctattgaaaatttggtcgactccatatgtaataatattttgaaaacatctgaattccaagctgaagtacaaaaagatgcagacaaaaaaggatgctcattcctcagtaaattagctggttttattatgaaagaaatcatgtatcatcatttacagccatttttacatggtgaagaatcatctttcagtgacttatctgattatgaccatgtctctgaacttgctaaatctggtaaagaaaagacacagccttctctctattcagctacatttttggaagacataatcattgaccttgttcacaaattttgttctctcctcattattactgaagattctaagaaaaatgaaatggcagagctagatattatgggcttggctctaaaacttgcaaattctctgataagggaatttaagaaaagtgatattaaagttttaccaaatgctgaaaaaatgttttcttttccaccaattgataaagagacagttgataaaatatccaattttgtatatgaacagttcatagaaaaatgcacatctcatgatattcaaaaaggtgatgaaagtaacattgctatagggatgattgctgctctaacccagaaggcaatatctgcattcaggattcaaccacttttttcaggagactggtcttccaccttcttttcatttctaaatccagataatatcacccaaagggttcaacacctaccacaaaacacctttacacaaataagcagatgtgcaaaagagaaccaactttctttaccagatcaatcatataaagatacttcttccaccccagattgcaaaaacatgatgagcactttggaaataaatagaggtacaatgaatagaaagaaaagttttaaaaccaaggacacatcagtgaaaaaaggtgacatccaaaatccagtacttagctctataaatgcaattatgaaaagcggcatgattaacctaacatcagggttggctacaggtgtgacaaataaaaaggaagtggatgaaaataaagtgggaatttgtactcaaaaacatagtgagaatgtatcaaaagttacttcaactaccactgtgaaaagtaaagatactcaggagccaaatttgagtgaaacatttaataataatgaaattga

SEQ ID NO: 25076 - DNA, 2300 bp, Homo sapien
gtaataatattttgaaaacatctgaattccaagctgaagtacaaaaagatgcagacaaaaaaggatgctcattcctcagtaaattagctggttttattatgaaagaaatcatgtatcatcatttacagccatttttacatggtgaagaatcatctttcagtgacttatctgattatgaccatgtctctgaacttgctaaatctggtaaagaaaagacacagccttctctctattcagctacatttttggaagacataatcattgaccttgttcacaaattttgttctctcctcattattactgaagattctaagaaaaatgaaatggcagagctagatattatgggcttggctctaaaacttgcaaattctctgataagggaatttaagaaaagtgatattaaagttttaccaaatgctgaaaaaatgttttcttttccaccaattgataaagagacagttgataaaatatccaattttgtatatgaacagttcatagaaaaatgcacatctcatgatattcaaaaaggtgatgaaagtaacattgctatagggatgattgctgctctaacccagaaggcaatatctgcattcaggattcaaccacttttttcaggagactggtcttccaccttcttttcatttctaaatccagataatatcacccaaagggttcaacacctaccacaaaacacctttacacaaataagcagatgtgcaaaagagaaccaactttctttaccagatcaatcatataaagatacttcttccaccccagattgcaaaaacatgatgagcactttggaaataaatagaggtacaatgaatagaaagaaaagttttaaaaccaaggacacatcagtgaaaaaaggtgacatccaaaatccagtacttagctctataaatgcaattatgaaaagcggcatgattaacctaacatcagggttggctacaggtgtgacaaataaaaaggaagtggatgaaaataaagtgggaatttgtactcaaaaacatagtgagaatgtatcaaaagttacttcaactaccactgtgaaaagtaaagatactcaggagccaaatttgagtgaaacatttaataataatgaaattgagaagaaaagaaatttaattccaacagataaaaaagggaaagatgatgagatatacacacatttttcattaataattgatgatacagaatatgagaaggaagtacttggatcagattctgaaataggctataaaaagaagattgacaatgcaagggaaagctcatttaaaaaagatgacaagctctttcagttatcctccttgaagtccaagagaaatctagggactacaacagatactttggaaataagaattcgaacatcaagcaatgaggggagaagagactctccaacacaaacgtgtagggatgaggaacaccactcagattatgaacatgttcaaaatgtcattgaaaatatttttgaagatgttttagaactatcttcttctccagaaccagcatattattcgaaactcagttatgaccaaagccccccaggtgataatgtattaaatgtaattcaagagattagcagggattcggcacagtctgttacaacaaaaaaagtatcctcctcaactaacaaaaatatctctgccaaagaaaaagaagaggaagagagagaaaaagagaaagtaagagaggagattaaaagtgaacccagtaaaccagatgatcctcaaaaccaacgagaaagtaaacctggaatttttcccgctaagtttttagaagatgttattactgagatggttaaacaattgatcttttcttctataccagaaacacaaatacaagatagatgtcaaaatgttagtgataagcaaaatcaagccaaactctatgacactgctatgaaactcatcaattcactgttaaaggagttctcagatgctcaaattaaggttttcaggccagataagggaaatcagttccctgggggtaaagtgtcttcagttcctaaagtacctccaaggtataaagagccaactacagatgaagcaccatccagcattaagataaaatctgcagataaaatgccacctatgcataaaatgatgagaaaaccttcttcagataagataccatcaattgacaaaacattggtcaataaagttgttcactcctctgtttgtaatattttaaatgactatggatctcaagactctatttggaagaatataaacagtaatggagaaaatttagcaagaagactaactagtgcagtgataaatgaaattttccaacgtcag

SEQ ID NO: 25077 - DNA, 2300 bp, Homo sapien
atttggtttgccagtattttattgaggatattcacatcgatattcatcagggatattggactgaaattttctttttttgttatgtctctgccaggttttggtatcaggatgatgctgacctcataaaatgagtcagggaggattctctctttttctattgtttggaatagtttcagaaggaatggtaccagctccactttgtacctctggtagaattcagctgtgaatctgtctggtcctggacttttttttttggttggtaggctattaattgctgcctcaatttcagaacttgttattggtctattcagggattcaacttcttcctggtttagtcttgggagggtgtatgtgtccagaaattcatccatttcttctagattttctagtttatttgcatagtggtgtttatagtattctctgatggtagtttgtatttctgtgggaccgggggtgatatcccctttatcattttttactgtatctacttgattcttctctctttttatctctattagtctggctagtggtctatttgttgatcttttaaaaaaaacagatcctggattcattgatttttttttgaagggctttttatgtctctatctccttcagttctgctctgatgtttgccacaaagacaataaattacctagagatacaacttacaagggatgtgaaggacctcttcaaggagaactacaaaccactgctcaaggaaatttgagaggacacaaacaaatggaaaaacattccatgctcatggataggaagaagcaacatcatgaaaatggctatactgccctaagtaatttatagactcaatgctatccccatcaagctaccattgactttcttcaccgaattggaaaaagacacttcaaatttcatatagagccaaaaaagagcccgcatagccaagacaatcctaagcaaaaagagcaaaactggaggcatcacgctacctgacttctaactatactacaaggctacagtaaccaaaacagcatggtactggtaccaaaacagagatatagaccaatggaacagaacagagacctcagaaataacaccacacatctacaaccatttgatctttaacaaacctgacaaaaacgagcaatggggaacggatttcctatttaataaatggtgttgggaagactggctagccatatacagaaagctgaaactggatcccttccttacaccttatacaaaaattaactcaagatggatcaaagacttaaatgtaagacctaaaaccacaaaaaaccctagaagaaaacctaggcaataccattcaggacataggcatgggaaaagacttcatgactaaaacactgaaagcaatggcaacaaatgccaagatagacaaatgggatctaattaatccaaagagcttctgtatagcaaaagaaactatcatcagagtgaacatgcagcttacagaatgggagaaattttttgcagtctatccatctgacaaagggctaatatctagaatctacaaagaacttaaacaaatttataagaaaaaaagaaacacccctatcaaaaagtgggtgaaggatatgaacagacactcctcaaaagaagacatttatgcagccaacagacatgaaaaaaggctcatcatcactggtcattagagaaatgcaaatcaaaaccacattgagataccatctcacacctgttataatggcagtcattaagaagtcaggaaacaacagatgctggagaggatgtggagaaataggaatacttttacactgttgggagtgcaaattagttcaaccattgtggaagacagtgtggcgattcctcaaggatctagaactagaaatacaatttgacccagaaatcccaatactgggtatatacccaaaggattataaatcattctaatataaagacacatgcacatgtatgtttattgtgacactgttgacaatagcaaagacttggaaccaaccctaatgcgcattaatgatagcctggataaagaaaatttggcacatctataccatggaatactaagcagccataaagaaggatgagttcaggaggagccaagatggccgaataggaacagctccggtctacagctcccagcgtgagcgacgcagaagacgggtgatttctgcatttccatctgaggtaccgggttcatctcactagggagtgccagacagtgggcacaggccagtgggtgagcgcaccgtgcgcgagccaaagcagggccaggcattgcctcacttgggaagtgcaggggtcagggagttccctttctgagtcaa

SEQ ID NO: 25078 - DNA, 2300 bp, Homo sapien
attcacagcctgtctaccaaatcgaagcagtcaggtttgacagtttttcttttagttcttttacggtgggcatttacctcaggtttaacactgttcccacaacttcctaatgtatttcactcatcctgacgctcaagtttatagccctgctttcttgggtatatgaattgtaacccttggactatgccttctaagcactgttttgtgaaagtttcgtttgaattgtaaggtcaataaaaatagcagtagaagacataaaagtcccagccctgctaccatttgctatttgagaccaggaaaaaccatgtaccttatttcaaaaagtagtgaattcaatgagttggacttccttatttctaaaatgtatgaagaaatagtgtacgagggagagtgctataagagcatgtactatattcagaaatgtgtattttccacttgaggcaagaaaggatctttgttctctacctgggctacacttcagaggaaaaaaccgaaagcaaaggtcaggagacagaagaagttatgaaccatgaaactggagccattatcataacattatgagactctagattctttgtaacttccccatatttgttacttataattcatttgcctcataataataatcagtaaaattactcaaaatcaaaggcccaaagggcatctttggggcactaaaagtaggaagttaagacaactacattccatatgcaaacaaagtctcaaaggagacgatccccaaataatcaaatggataataatactgagtaaagagggggctggctgcatccctccatcctctgacaagaactatgacaattacaaaaaataaagatgaaaatatgtaaaagggggggagcccattaacctgccaatatgagcccaaatgaaaaaaagtgtgtcaacatacacctgccattctcgacacaattctttttagtagctatcacatttcttctacacacacacatacacacacaaaacatacttggggttccttgacattatcttacgtagaaaattactaagcaaataatcaatttgactaagtaggggggcttatcgttttctccctattcaaattaatgaaaaagataaaaaaacttttatctataaagatgattcttggttccacaatgcttcttaacagaaatagtttaaacaataatcattttaaaaaataacagctaagcattgtacatttttaaaaaatagtattttcgtttgtacaaatatcaatgggtcccattcatcattcaagtaccttttcaaacaggatctaagtttgtaatgttaggtaataggcatataggctgaagccggactgccaagattacaattgctggctctgtccttaatataactttgggcatctttcttcctttctctgcttcatctataaaacgaaaacagtaacaactcccacctaagtgtcgttgtgataactaaatgaaatagtgtgtgtaatgtgccaaggaatttctggagctaccaagcacttaaactaagttctaactaagtttggttactttcacgttataaaggaatttttaggaatcacctaggcactctcctaaagtctcaaaataacttaatacagtacttctaaggagttcaagtgcctccttatctgggacgccatctcagatgctcttcaaatgaaagggaccctgcaaatgaaagttaactttttccattttttaaataatccttcgcaggaatctgaagcacgcgacactcacgggccattcagctccgcctctccagggaacaagaaggttaactgagtaacgtggtcacggagcaaccccgagtcgctgcggctgcttagtagtcactcaggatggggatggtacaggggaccattaactggcccggcaggaaaagtttcccggtgaggtgacgatggacaagagtcgccccatcgtaagcgaaagtggactgagaggaagcacaaacgcatggactcaaccagctcgcccagattcaccctcaggccttttgccatctgaaaagggcctatcggatgcgcgacatcacgagtgacgcgtagtcattttcccacgtcccgtccctgccccctcctagtgggacgcagtgggcgcgcacgcgcagctccgcttccgggagccgctcctcgctacccactatgctctgcgacatcgacctgtcgcaaaggccgcgtttgcggggccaatgagcgactcgctttccgtgcggtgcggcgagtgaggccccggtcttcctcctcgtcctgccgcagggccagaacccctgacggtattcagctgcgcgtaagt

SEQ ID NO: 25079 - DNA, 2300 bp, Homo sapien
tcttctgtcttccttacctggatggatttccaggtagactggttgtcatgtttttaagatataaaagaccctttgggtttatgcatacatatcaatagcctctttggtgtattaggaaagaaggtgagaaataagctgtatttgcatttatgtgtaaggatttgtgtaggatttcttctctcaatcagtaatttctttcaggcagatgctagaccatgccttgtaaaacatgccaaaggttttgctgcatatcttttagtcaaatttaaaaatggaaatatttaatgcattttttttttgagatggagtctcactctgtggcccaggctggagtgcagtggcaccatctcagcttactgcagcctccgccttccgggttcaagcaattctcctgcctcagcctcctgagtagctgggactgcaggcgcatgccgccacgcccggctaattttttgtattttagtagagacgggatttcactgtgttgcccaggctggtctcgaactcccgagctcaggcaatttgccggcctcagcctcccaaagtgctaggactacaggcatgagccacctcgcccggccttttttttttttaaacacagggtcttgttctgtcactcaggctggagtgcagtggcaggctcatgacttatcataacctggaactcctgagcctaagcgatctatctacctgccttagcctccggcatagctgggactacaggcatgcaccacactcccagctaatttttaaatttttgtagagatgaggtctccctatgttcccctggaactcccggtctcaagcaatcctcctgcctcagtctcccaaagtgctgagattgccagcatgagcacctggacctggtccaataaatattacaaattcgaattaggcatttcactttcatttatatacatatcctttcacaggattatttgatagttattaatgtatattatgattgagttttaatagttactttgggaaaacagaaattactgttccagtacttacttgtaagttgtaagtccacacaatgcacttaaacttcaccttgttcaacagattctgtagcacatgaaacacttgaaatatggaagagtcacttctctgggcactttgctcatttcgtctgctattcattcactgattggacattttattgatcgactactatctgcttggcaaggtgctagaaataagaacactaagaaaaaggtcaaggttcctgtcctcaaggccctctctctcagtccagtgttgtcaaggcttgatgaaacacaccagtggcaaacaagcacgcggggccttatttcaccggtgtgcggtccttcttccagctctgaaattatgtctatccaaacatcctaaatcaacaaatcagtgtttctaaatcatacaaccgcagctaacaaactgggaataaggcttcgattattctgacttgatttaaaacgatcactgccaattctttgccctgcgaatcctttctttgactactaagttaagctttacatacctcacttgcaagaggctatgctggctttctggaaatccgtaattaagttcagtgtttgtggaatggagtgtaattaacgaccattaattaacagggtttcgttcgtgagagcctgccaggctaagcagcagaaacacgagaaactgataaaaagctttcctcatttttaaacaacagtcgcacggaagttcccggcgggacaagggaacgtgggtgcccttgctactcccgtggacgcgggtagattgggacgctggaccgtatctccccgcccccgcccccacgcctcctcaggtgctcagcctgaggccttcgtccaggagcgctgccgctgacccaggctcaggagctgggggcccctgcacagacgcccaggtctcgggacaggcggcgactgcactcacggaagtacgctgagctctcccctgtagaagggcgcctctcctcccccacttcctcctccagctccacagcagcctcccgggccggctcctcctccttccaggtctcctcccagtgccgccgcggctctcaggcctgaggtgcggcgctcaccccggcagtccccagcctcagacgctgcgtggagcggcggagccggagggaagcaaaggaccgtctgcgctgctgtccccgccccgcgcgctctgcgcccctcgtccctggcggtcgctccgaagctcagccctcttgcctgccccggagctgtcccgggctagccgagaagagagcggccggcaagtttgggcgcgcgcaggcggcgggccgcgggcactgg

SEQ ID NO: 25080 - DNA, 2300 bp, Homo sapien
ttttctttggtcattgtttagagtctcgagtcctgatcatgtctttcttccgattccaaactgggagcacaaggagaaccctgagactgaagaagatgttgggccagttgttcagcacatctatgaggtttgcagttgttagattttactcaaacctcgtgagcaagccaacgaagagaggaacaactaagctactttaaaaaaaaaattctatgtaatttttatgtaaactctacattggttaagtatgtgtcagagatttctttgaatattttccctatacataaattcatttttatttgacaaatagacttgtttaaataaagcagtttatataatttgttgtttaaaataaattagttctacttgaataaagaaatgtcattggtactttctcatgggcattttgtagttctggctaaaaattgaaaatacctatggcaaataatcaaaactatttctataggaagaaattttctttgtcatccttcattaataacttttaaatattttgccttttgtttatacatacatacatatatatatatatatatatatatatatatatttttttttttttttttttttttttttgaggtgaagtcttgctctgtcgcccaggctggagtgcagtggcgcgatctcagctcactgcaaactccacctcccgggttcaagcgattctcctgcctcagcttgctgagtagctgggattacacgtgtgcaccaccatgcccggctaatttttgtatttttagtagggacagggtttcaccgacaggtttcaccacgttggccaggctggacatgaactcctgacctcaagagatccgcccgcctcggcctcccaaagtgctgggattacaggcatgagccactgtgcccaaccttgtttatatttttatcctgacacatattactctgtgttagagacaaatgttgagtttgatcatttttgcataaaaatggtcacattgtaattagaggttaactgtggaaattgctgttatttaaaacctattgctaacatgatttctaaagttgatgtaggggaaggattatggaacagatttttgcccaaggtgtagatacattttcttttttctccttagctgagaaacaatggtccaagttcattcagcaaggcaatgctccatcttcagtggccttacaaatataataataacactctgttgtatatccttcattatgatattgatggaccaatgaactgcacttcagatatggagatcaaccctttgagaattaaggtaatatgcttaatagcagctcttcattacaatgatatttcattgccttctttctaaacctgtaaaagaaattcataaaataaaacaactattttaatataaaacccactctgcaaaaaatggtttagttcataagcagtacacttaggataagttcatttgtataatgggtaagaattgattctgtgatgtctagtgaaccacatcttcatagagtgcttactgagcctcatgagatgtgtccttcagtgactcagtttgaccttggctccatcacgttgttgtttcttcagggcataatatcacatcaagggtgttttgttgttaaaatttctacctttgggataagctataccattttactcatgattatcttgacttttggatatagtcatctccatcatagatttgcactagaaactattacacaatatgatctaaggaaaggtgaagaaacaaaataaaagatatacccatgattgacatcacaaatgtactgtggaatttcaggccatttctgtatgtttcatcagtttccactctagctaagcaagggctgaaaataatggttagggagagctaacttttttggtacatattaaagactctaatctttattttctgtccttactgctcactatatactgagtggtaaatattctgtcatactaaattttcattcactattttttaatcatatctaagagtttatatcaaaatgctgatgtaaaatgtttttcattatcatttaccaccattttattaatgtgattgcattagatctcatctttgcaaacaactgaaaagaatgacacggttgccgggcaaggtgagcgggaccatctcatcactaagcgggatcttgccctcagtgaaggagatattcacactttggtaagtgccatttcaaatatgtgcaccatagacatttaaaaatatgtgactatagaactgacgccaaagaacatttcaaaaataacaacagctgtgcttgaacaactacatttatttttataccatgcattcctc

SEQ ID NO: 25081 - DNA, 2300 bp, Homo sapien
ttcgggtgacataaagaaaagcggtttactttaggtcagttctgctggctgtacaacgcaagtgtggtgctggcatctgctctggtgagaccttagaaagcttacaatcatggtggatggtgaaagggagacagcgtgtcacatgacaggagagggagcaagcgagagagagaagggagttgccacacttttaaacaaccagatctcttgtgagctcagagcaagaattcagtcattaccatgaagagggcaccaagccattcatgagggattctcctctatgaaccaaagaccttccactaggccccacctccaacattggaggtcacatttcaatatgagatttggaaaggacaaaacatctaaaccattagttatatatacactattttcatttgcttaaccaaaaaatacttttccagtactgagaagtttgttgttttccagcatattgaaaacactgggagggacaaggtaagaatgataagggtggaaaaggacaatgaactacaatggtaaatggggtgatgtcacagcaggtgacatttatattgcactatgagatgtcccacagttactccaaatacaaagagaccacaactgaacaaggcagggctcattactctaggccagttaatgttgataaggtcataagcagccacctaagatctcaatttgtcaatttaggtgtcacactaggcatatctcctcctcttccaattaaccgtatctgtttattgtagtcttatatactgtgtctcctactcttttcttctccttttcagtttcaatgacctttggcatctcctatgggttttggcaaacacctctaaactggcatcttctcttccaatttatccccctttaatccatctgccatactgagagcaaagtgatcctcctaaaatgcacaactggtagcaagtttcttccctgattaatttctttcattatcatctactgtgtgaatttcaatttctgtatacagcatctaagtttattacagaagttaacaaatgtgaagtacttgagcacacagtaagtactatagaaatgcttgttattattatttttttaatgacctggtctccactctccttttcaatctaaaacactgtcattcctccattagaataattgctcacacttttgcaagcccactgtgcttacacacatctgggcttcacacacacacacacacacacacacacacacacacacacactcttccacgttcctgatttctcctgtgtggaagtcttactcttttttatattctacctctcctggtgtttcatagcccctacatacacaagatattttcttccaattctgagacctctggacttgtattgcttttctgtttgtagccaccacattgggttctaatttgttcctgtgttcctctcccctaatagatgttgagctcctggaatgcagggattgtattttacttattccaagcacctgaagaaatgctggcacatggtaagcaactagtatttagtaagatttttttgaacaaatgaaaaggataggctagaattagataaaatgtaattaagaatatttaatgatatggaaagaaattcccactagggcagagaaaagaagtttagtcaaaatctggcgcgctgcagtttaacttctagctaagcaatgatggcggtgatgcagcaaagcctatttgtttgagatcctggctttttgatccgttggtgccacccacgctatgtgctggatgggggtaatcaatataccaccttctctgctactttgggctcaggtggaaggaattttattccactctctgcaaatcttcccggtgcctcagtgggaagtggacgctgtgagggtctaccagctcccagaaggcctcccctttctgtttcccctagggccctccacccgggctgcagccccagcatcgcgtcctctcggagcagcctggccccaggtggctgcggggcgcgggaccgcgggccccggctcgcccctccccgcgcgtcacatgcgcgaggatgcgaactccccttccctcctcctccgccccctccgcctcccgggcctcttcctcctgccggtgagggagtgcttggcagattgcgcgagggggagcgagcgagcgggcgctgccaggagcccgcagccctggcgcccgccgccgcccggagccccgcaatatgccgccgcggccctctggctctaggccatggcgaggctctgccggcgtgtcccctgcaccctgcttctcggcctggccgtggtgctgctgaaagcgcggctggtccccgcggccg

SEQ ID NO: 25082 - DNA, 2300 bp, Homo sapien
ttggccaggctggtctcaaactcctgacctcaagcgatccgcccatctcagcctcccaaagtgctgggagctgccatgactggccttgccagaattttgagctagtgatttttgctgtgtatggcagaatggtggatgtggagctgtgtgtgaaagaatggaaagtaaataagaattacaagtatacagagaggctctgtttaatgctattggggccttaatgaaattagcttcttcacagtccctcttcagtgtttgttttgatgcatctctgcccctcactggcatcttcaaaccccattaacaatcatagtttctgctggaatacatgaaatggatctgtgtgaccatgtcccgtaccaatcctttgccactgtaccaagcagtggtaagcactcatttgtctggaaagtactggccatgccttggcaggtttccgtgagaacactgtgagtcctcttgaattctcagatcacttccttttactgtctcattttcctaaaaggtgacccatttgtaaggccaggcaggaaagtatgaatgtttcataatgatgttaaatctttctgtaaaaaatacatatccttactgctgaacttccataacatgtttcattaggtttgtacagtggaaattaagcctgtgtgtttatgtatttatggcaaaaggagaaactagaaaatttaggaatgtacaaaaccttacagaagctcagctagacattttgtttagtgtgcatgtgttcagttgtaagaaatgtggtcttcaaaataattaagccacgtattttaaaagagcaagtcataggtagtacctgtgagtgatcagaaggctttagattgtatcctcaacaaccaaacagcatataattatgttacttttcttaactgttttccaggtattatttttctagcttcacacacacaaaaactataaactgagaagtcttacattgtttcatttatcatttattgtcatgtagctctttaaaaactgatgtcttttctattctaataatttaattgattgcttctgtcttcatcagtgaccttactaaagttcaaagcaaaagctgatgtttctgataattttcaggtgtaagagttgatctttgaattattaaattcaaaatctgttgattacagaaatatcaatattgtcactgaattatcacttgataaataatgttagaagatactgagatatttatacttaggaaaaattcagttactgagatatttataaattgagtacctggcatttgaaaggcttttaatgcatggttagttaactgatagagaaacttacccacttaagtatgtggctgaatatcatcagagacacttttctgttgcaagttactgaaaacccagtcctaatctggcttaagcccaaaataagcatttatttatttctcttatagatgttaagtgtaggaataggacgaactttagacatggctcgatcacgacttcagtagaaataattgaaaactggttctctattactcaactctccactatttgaatgctgcctcgatttttaaacaagctttcatttttgattgcaagatggctgttacaactcctggatgtatacctgctcacattaaatccagtccaagcaaaacacacattgtatctcattaactgtgcttgggacagggcccatcattgaacaaatcactgtggccaagagaatgagatgcttttaattggtttcagcccattctggcatgcaccatcaactccactaccgttacagaaatgagaccccaaatgaaacacatgggctaaaaatggtcagtttggggttccccagagtggaaagaaaagggtgaggaaattctgggcagcagaatcaatcagtacaaaggtgccttgtgtcatctaaagaaatgaaaatttcttagttctgcatttaaaataattacatgagaagatgctaatgatgtttagcaataattataattgcttcttttaaagtaagacatcctgaccaatgctgctatgcttaacatgcctttatctctttgttaatgaggtttccttttttccagatgccaagtctcaaccaagtgttcagttttcaaaagccttaattaaacttcctgacaaccatcatattagcaacgttactggctatcttacagttctacaacagtttttgaaagtggacaattttctgcatacaactggaattactctcaataaaccaggtattatctactttttgtataatatagttataagaaacattagtacacaaatctttcatcaaatatttagctatctataata

SEQ ID NO: 25083 - DNA, 2300 bp, Homo sapien
gctgggattacaggcatgagccaccgcacccagcccacagctttgttttttgcagtaatcacctccctctcacatggggaaatatgccacaaaatatacctgaaggaggatatttaattctccaatttaatattttcaaaatattacccctatcacacactcttaagagatgaagcaaacatatgggatagtcacctgactataaaaatgtttttaaagtcataactgacagatatcaaaacaaatatcttacaaatagaatgaagttctgtctagcaatctgtgctttcactttttaacttctatgaaagcataaacaccattatttttaccatcccccaaaatggaatttatgaacctatattccattgatataatgactattgtgtcttaaacatgcgaccctttgaaaatgtttatcacttatacatggagcaagtaaacaagtatcactagctataactaaaacacaacagctttaacaatttttgctgtttgcttttaaaaattttataactttattttatatgtacacacatgtatataaagagagagagaaaaaaaattgatggttgaataaaatgtcctcactctgaagcccaactcatcatattatatagcaaatatggagtcattaatttattgagtttttaaaattatacatatcaatatgtaaaataatttaatccaatttataatttcttttgctcttgatatgtgagtttttttctaatgttataatgtatttctttaacatctagtaccattaaattgattctaaagttgggagtatggtagtatgaatgtgagttgttattagtcagaataggagaataaaaataaaatttagtaaattaaaaccttagaccttagacctaagactttaagggttggatgatgtttatccaggtgtctcacctgtgaaagctgccattaccatcatcttctttcatcttttgcccttgccattttctgagaactctcctgctgttgacataatctagttatgatttctgcccatgataaaataggacaaatatgctctatctttggccaccaaggcaaaggttactggacctccaagtagtgctatctcctgcttttaatttcctatagagattctagtaatgtggcttcttttttcagtaattatgactcaaaatgttgacccatactttattacagttttccccctaaaatgtggtaaacaaacctcagagacaatttaaattattggaggtacaaacattgcataccttgaaactcttattccttagtatacagatttgtaagtttcatgtacccatagtcaatggattctgtgccaccattcaggacgtaccaccatccaccattctggctgtaccatccccaacacccacccctacccaaacatgcaattaaaaaatgttccctcacttggaagaccatttcccctccaacacacacacacacacacacacacacagagagagagagagagagagagagagagagagagagaggcagagagaaatgacttaaggatctggtttcctcccaagtagctgggactacagccggcgccactaccggtgatgcacttcctagggtttagaactcctgtcttctacatctttcccccagagactcagtcaatctatgcatatagtgagcaatcagaaaatgttcgtggaatattgtggaacgtcaaaaatcactctgggctctgtaacctcggctttctgttaaagatgatgaatcatcacaggataatttcagcatccagagcccagactgcaatcgggtttgcaactgtcctaacaagtagatttcaccatctctgccccgaggaagcagaaggaacgcaagaaaattgacagctatgccttcggcctccagcttccaagtcggccagatgattattaaaaacactcctcagtcaagggcgtcgcttcgaaacgcagtggaggctggggagagttgcagaatccatgccatcccgcacctttgtcgcccgctcttcttcggcgcagggcacaccgggacaccccgagcccaaccaccgtcaccaaggcaaccagcctgcacgccgtcgtcttggagaccggctggcgcctcagtgagccgagcagaggggccgcctccgcccgcacccagcatgcttcgccgaggctataaggcctctgaaaggcgaagacacttgagcgagaggctcagctggcaccaagaccaggcgctgagtagcagcatctacctcctacgagagatgggccccactggcttcctgctgagggaggaggagccggaatacatggatt

SEQ ID NO: 25084 - DNA, 2300 bp, Homo sapien
tacagcaataaaaatacaaataaaaatatagtataacaattccttatatagcatttacattgtcttaagtattccaagtaatctagagatgatgtaaggcatatggaaggatgcgcataggttatatggaaatactacatcattttatataagggactatagcatctttgggtctgagcatccatggtggtcctggaaccagtcccatcccccatacaatactgtaaataaaacatttgtttttaaaggtacatcagcattatgaaataaattaggcaaagttacagatttttcttggattttaaatagctcaaataatattggaattctctgttccttaaaagttagaagaggttagctgaaagccatctggtcttcctttcattttcagtggtagattactaagcaatctcctcatcttgtcagcaataagcagtttatccaagatttccaattctttatttcttggttagtttatgtcctgctaatagacaactggcttttcattatttttaaatttgttgccatagatttgtatgttgaaatgtctcatgttctaataacttcaaattttctggctatgtatcttttctcatttattctgtcccatttttttccttcaaatttctaagaggtttacctactttattggctttttcaaagaactagctattggagttatctattctttatacttttttattttattaatttctacttttatctttattgactacttcctcctagttcattcactcatacttcactcctagctctgtgtgtgtgtgtgtgtgtgtgtgcgtgtgtgtgcgcatgcgtgtgtgtatttatattttgtgaggtttttttgctggactctaatgtaatgtatttttatttttctttgctagatcattcatgatttttcaaatgatttccttttttattcatgtattatttagaatgatgactattaaataccaggtggttaatatatcaagattaagctattaaaactatttctaattttatgtgaatatgaacaaataaactgccctataaaaatgtccatactttaaaatgcatttttgaggccaatacatgttcaatttttaaccaattcatgcaaaaattttttttaaaatcataatatctaaggatttagacattttgtatatttattaagccatgtttttgaaataatgtaatgaaagtcagttctgctttttgagtcactatcttttaatgggtaaatgcaattcattcatatataacataatgactaatatatattattctatttcttctatcatattttattttctatttttctttattgtgttcttgtttttcttttccttaatattgctaatttatctaattgttttttccttttctttctttgtcctttattaatgctgtttagtttggttactatactttcatcagtccctttctttctttttcctagcataataatcagcaactatttaaaagaaaaagatcctgtttttcccctataaaactctcataacatcctactcgcaacacccttataagatgaaactcttagaatactttatttttttatcctttttcatttactattttttctggaatagcatgatggtattccttgcagcatattcctccatttcaagggttcctgtttggtcttatactcccagcctataacattcagctataactatacacatatatacatttttaacctcagcacctaacagttgtttcctctactcatcctcttcacccatgattagaaacatgttttgattcatttgttatttaattagttatttacttggtagtttgcctcagatgatttctatggatgatacacactttaaatatgttaatattctcaaatattttcctttctcctggcagctaaatgtaaacttggcttgggttgggctctagctgtctttcaaatagtctgtaatttattgtaaatatattctaacagctgaagttgcagatgagacactattcttattttcttttctccttttttgcaaatgaaacttgtagcaccagaaaacactaagtaggtacctcttattatgaaaaatgtagactatttgtctttcttcatctgaataaaattttcttctattaatttttgaattattgtctcttctccaattgttggcacttccatttgtggaaccctattattcacattttatgttatattacttattactttattatatattctttaccttattttattatttattattgagctactcctgtctgccactattttaggtcttaatgttaatcattttgct

SEQ ID NO: 25085 - DNA, 2300 bp, Homo sapien
ggggctcatgtctgtaatcccagcactttgggagaccaaggtgggcgggtcaccttaggtcaggagtttcagaccagtctggccaacatagtgaaaccctgtctctacaaaaaaatacaaaatgttagctgggtgtggtggcgggcgcctgtaatcccagctacttgggaggttgaggcaggagaattgcttgaacccgggaggtggaggttgcagtgagctgagattgcgtcattgcactccagcctgtgcaacaagagcaaaaactccatcaagaaagaaagaaggaaggaaggaaggaaggaaagaaagaaaaatgaatctttggaaagacgaaaatatcaatgcttttataaacatattgggaaaagttttagttttccatgatttaattaaattcaaaaactatatattaatctctttataggattcatatattacacttagcatggaagatgagaagacatgacccattattactttcatattaaatctagtatttgtttttctctgaatttcaagatgggaacatgaagcctaaaaagctttgtcaagatcacaccagacagtatcagaaccggttcaccagtgtaactcagtttcttacaagtcttttctattaaccataattatagagatgaaagtatatctattttttatatgtctgtattttgtaatcaatattgatctcactggtcttaaaatcaaagattgtataaacattttcttccactaattcagacaataaaaatgtcaacatgagcaccctgctttaaaaacatgatattcctgaatttattttgcctttacctcctttgtctgcctacaaggtgtatggcacctcattttatcctggaattgcactaacaatttactaagagttgaatgatcctcaccgtatcttatctatttcaaaatgttatgaaatttgtcgattcaaagccttagacataaaatctatctcttctagtttatagatgagaaaatttatgccctgataaattaagtgacttttagtgctgtttaggttatagggattataattattgcttcatatcgaacatttaccaaattataaaaatgataaaagcattttaaatttacattttcccctgatcatatccaatgatgtattaaacatattcaggaaaaactatgctttgagatgaaattttgtctaagaaataaagtatcctttgtatttatattattttataatattatgtttacaacatctatattttctttaagattatattgacttacaaatattgtggtataaattattttatattataaataacataattataccaaatatttttaaatgtgtgcaataattttaaaattatgaattattcaaaaggctattttgtcaaatatatatacttatatattataaaagaaacactctatacacacacatacacaacctgaatttataacacatacactcatgttcttatgaagaaggtaaaggaaaaaataaaagatttaaaaactgcaggataaagtttcttgatctaattaactgattaggaactgcacttaggaactgatggaggaacagcacccaattagcagagctccaaattaagaagagccaaatcacaaaaccagttatgatgaatacagttaatttttttttctgtgttgtgctatgaacacagatttgttagattttttttcctggatactttgtaagctataattcaacacacacacacacacacacacacacacacacacacacacgcctaactcctttgattctttgagcagaatactatattcagatttccttcaaatcacaagtagcttgtttggcaagttctaacagaactcagtcaaggtgaaagccagccagctttttactggtaacaatgtattcacacagcctatgatctctctctgttcaggctgcttcttgctcttgtctcacaataagaaaggagtgctgctttcctggggtatgctatttgagaaagaaagtaacctaacactaactgcaggcggggtcagagtgatgtaacaggaagctctgatgtttcccttctgctgctgatcacttacaatctgacaacacttacaatctactcagaacaacctctctctctccagcagagagtgtcacctcctgctttaggaccatcaagctctgctaactgaatctcatcctaattgcaggatcacattgcaaagctttcactctttcccaccttgcttgtgggtaaatctcttctgcggaatctcagaaagtaaagttccatcctgagaatatttcacaaagaatttcctta

SEQ ID NO: 25086 - DNA, 2300 bp, Homo sapien
tttttagtagagacggggtttcaccatgttagccaggatggtcttgatctcctgacctcgtgatccacccacctccgcctcccaaagtgctgggattacaggtatgagccaccacaccccgcctttttattttgttttcgttttctgtttgttttgtgataggaagacaaaatagatctgccctcttaagaaattttgaaacacaaaataccatgttgttaacaataaacaatatgttgtacagcagatctctagaatttactattctagcataactaaaactttgtacccattgaacaacaagcactctattttccccactctccaggccctagcaaccactattgtattctcttcttctatcagtttaactattatagttactacctgaaaatgtaaaacttctagacaaaagcataggggaaaatcttgacattggtcttggcaatgattttttgaatatgagaccaaaagtacaagcaacaaaagcaaaaatagacaagattacatcaaattaaaaagctctgcgtggcaaaagaaacaatcaacagaataaaaagacaaactgaaatgagagaacatattttcaagtcatatatctgataatttccaagatacataaggaactccttcaactcaatagcagaaatttttaaaaaatgggcaaaggagttaaacacatttttctccgaagaagacgtacaaataagatatataaagatgctcagcagcattatttaccaaggaaatgaaaatcaaataataatgagatatcagtttatgcctgttaaaatggctatttttctaaaaactcgaaatgtaacatgttggcaaggatgtgtggaaattggaatgctgggcctggtgcagtggctcacgcttgtaatcccagcactctggaaggcagaggcaggtggatcatgaggtccgcagttggagaccagcctggccaacatggtgaaaccctgtctctactaaaaatacaaaaattagccaggcatggtggcaggcgcctgtaatcccagctactcgggatgctgaggcaggagaatcacttgaacccgggaggtggaggttgcagtgagccgagactgcacctttgccctctaccatgggtgacagagtgagactctgtctcaaaaaaaagaaattgaaatgctggcaaattgttggcggggatgtaaaatggtagagtagctatgggtattaatatgaaggtttctcaaaaattaaaaataaaactgccatacaacccagcagttctacctctgggtacatataaaaaaagaattaaaatcagagtcttgaaaagatatctgtattcccatgttcactgaggtattactcacaataaccaagatatggaaacaattcaagtatctttttaaaaatgaatgaagaaatgtggtatatacatatatacagtgaaatattattctgccttaaaataggagattctgctatttgtgacaacatggatggtatactaagtaaaataagccagtcacagaacatattgatgtatttaaagatagtatacctttacagataggatagaatatacacatatattcctttaatctgccaaaaagaaggcctaaaagaaatgacatcccaataacaatgagcatgcctagtgcccagatctgggtttctaataccaatctctagtagaaggaatcagggcttcttggagaaatgtctgtgattataagagtggggcataaaatatacaatatgagactggggcatctagtagtgacaaaaagtaaggcactcagaaaaaattaaaaactcatattgatggagctatctcaaagaagtacaggagccaactgaatgctctctcaaatttgccaaagccaggagaccatttgagcaacaatgtaagtaaagtcatagtgaattataacataaagtatagaatatatatccatgagtccatacttatataaataaaggattaaataatttaatacagagagacaaatatctggtgcaaaagtattccgaacaatttatatagatactctcaccttaaggatagggaccataattctccattcttttaaagtgctggctatatgtagtgactttcttccaaagtacagtacgggtggctggcaagatggccgaataggaagagctccagtctacagctcccgcagagatcaacgcagaaggtgggtgatttctgcatttccagctgaggtatctggctcatctcatcgggactggttagacagggggtgcagcccatagagggcaagccaaggcagggtggggcattgtttcaccag

SEQ ID NO: 25087 - DNA, 2300 bp, Homo sapien
agaggcgctccccacatctcagacgatgggcggctgggcagagaggctcctcacttcctagatgggatggcggccgggaagaggcgctcctcacttcctagatgggatggcggccaggcagagacactcctcactttccagactgggcagccaggcagaggggctcctcacatcccagacaatgggcggccaggcagagacgctcctcacttcccaggcggggtggcggccgggcagaggctgcaatctctgcactttgggaggccaagggaggcggctgggaggtggaggttgtagcgagctgagatcacgccactgcactccagtctgggcgccattgagcactgagtgaaccagactccgtctgcaatcccggcacctcaggaggccgaggctggtggatcactcgcggttaggagctggagaccagcccggccaacacagcgaatccccgtctccaccaaaaaaatacgaaaaccagtcaggcgtggcggcgcgcctgcaattgcaggcactcagcaggctgaggcaggagaatcaggcagggaggttgcagtgagctgagatggcagcagtacagtctagcttctgctcggcatcagagggagactgtggaaagagagggagagggagaccgtgagagggagagggagagggagacggagagggagagggagagggagagggagagggaggagaggcgaaactttcaagaaagaaaatctgattggctgagcttgcctctacctgagctacagattcctcaaaagtttaatcaaggtccatggtggtaccaagaaaaaaggactttcctctacaatctgagtgagatgatagctttgattgtggttgaggggcagggcatgaggtaataggagataagttattaacatgatatgaaatccagaacatgagtgagaaggcagcatggaggaggatttatgcatttttgctctaaaggcagactgcatgacattagaatcacagctccacatactgaactcgatcttcctagacatgtgaaatgggcatacaaagaggaccttctttataagctagttgtgagaattaaatcgataatttatgttccagtcaccaccaaataattattcaatatgtattaaaaacactcaagatgaaaggttaccttttacagagaggtctaaggaaagcaagaaaaattgaaggcacaaagaatctgagatgcagaagcaagaaactcctacattttctgaccaaatgtcttcagccttcctggcaaagtagattctgcccatttattagatctctagtgatcttagtctgatatgaccataattccaatacagagacagtacggatgaacctcaatgatagggacatacagcagagactctggttgacatctgtaaatatttacatattttgtagaataataataatagaaatacagaaaacagcgataatgatagccaacaattattggaggtttgctacatgctgggtcctgccttaagtactttttatgtattaagccatttagtacttacatcaagcccagaaacttttattatcgacattttaggaacaaaggaactgaggcatagtgaattcaaataactgggctgagtagccaagttagcaagtagctaaggtagggctcaaagcctgacacctgcaatagataatgcattacattgtctcactaagagagacctccaacggtagccctcagacttttaaaaaaaataaatacattgacagtgggtgaaacaaatgaaataacttgaagaagaaacaaactgcaaaaaagcttattaacagtgtaataataaatatgtaattttttaaaccctaactctagggggaaaaaagcattctttttcaactgattacaaaaacaatcctggaaagtaaaggaaatagctattcaaaatgatcgtatctgaaatcttggtgtaagctgtttccttcatctgtttcctccactaaaaaaaagaaagaaagaaagaaaaaagaggtttagactaaatagagtcagagttgcagtgacctaaacaggaagttgggctattcccaactgccagtgatctctgaagccgactctgaggctccctctttgctctaacagacagcagcgactttaggctggataatagtcaaattcttacctcgctctttcactgctagtaagatcagattgcgtttctttcagttactcttcaatcgccagtttcttgatctgcttctaaaagaagaagtagagaagataaatcctgtcttcaatacctggaaggaaaaacaaaataacctcaactccg

SEQ ID NO: 25088 - DNA, 2300 bp, Homo sapien
ttgctatggcatttgtaaactgtcatggcgctgatgacagtgtagcagtgaggacgaccagaggtcactcttgtggccatcttagttttggtggtataatgctggcttctttactgcaacctgtttatcagtaaggtctttatgacctatgtcttgtgctggcttcctatctcatcctgtaagttagaatgccttaaccatctgggaatgcagcccagtaggtctcagctttattttacccagctcctatttaagatggagttgctctggttcacatgcctctgagattttccccatccctttcttttatttatttatttatttatttttgagatggagtttagctcttgttgcccaggctggagtataatagcaagttctcagcccactgcaacctccacctcccaggttcaaggttcaaggcctcagcctcccaagtagctgggattacaagcacctgccaccgcacccagataatttttgtatttttagtagagatggagtttcatcatgttggtcaggctggttttgaactcctgacctcaggtgatcctaccccctcagcctcccaaactccttggattacaggcatgagccaccatgcccccatcccccactccccctaccctcgccacttttataagacaactgttaatcctaagggttgcagagggacaaagctccatcttctgtaactacttcaggctgaataggggcaatcatattcctgcctaactattagggtctcttattttcagggtagaggggagctcagtcagaaagcattggtatggtgagggccattcataactcccagttcagacaaaagataatatctggaagattaataagtgttcaatttaagaaaacattcagtaagcttgtcctgcattcctacacaaagagtacaacagcagtatattccacaagagtaaacaaaatgagtaaaattattccaagtaaactagattagaaggctttccatgaactgagcaactgttggaactaagctgatatgaggttgctagctgattccaatatgcccaagattagaatattgatccagatttttacatcacttatccctcttgtttcttctgaatagcatccagaaatcactggttggttcacaggaataagcagggttaacctaaattgcaaaaacaaacttaaaaacaactcatgagactagaatttaataacaagtgtgtcatagtttttgaaacataattcctctctccagtttcccatttttactaaagacaaatcatgataggacagatttattttattatacttggcctaattatttgtaaaagtgcaggaagaataattatttcttacataagcttttttgaaattggctttgatggaactctgttccttagaaggaatcttagatgagacttttttttagcgctgagccctgccatggggttgtaccctcaaataactatgagttgggaaaattcctctcctcttggggtaccaagataacccagggctcctagacctgttagaaagtgacattctttacttatcacaggtcagaaaccctgtacagggattgtgtaggcaaggtatgaggccagttctccaaagggcttttattggttttacaagtgaagtctgattccttaaaggaaaccacaccattccagtcaaagccttggtaaaatatccagtttttttcaattgtgtcctgttatcacagcaaacagatgcttactgcacttatgcaaataactatattgtcataaattaagaacactcacaaatagtttccaaattttggagaaatcaggtagagagaaacaaatatgcttcaaattttattcacagaagtatacattactcagttgttaaaagctgtaaatagcttaaaatagaagtttccatgactctgaaaaacaaaacaaaggatcagaaatggatttgttttgtttgtttttgagaccgagtcttgctctgtcacccagactggagtgcagtggcatgatctcggctcactgcaagctctgcctcctgggttcatgccattcccctgcctcagcttcccgagtagctgggactacaggtgcctgccaccatgcctggctaatttttttttgtatttttagtagagacagggtttcaccgtgttagccaggatggtctcgatctcctgacctcatgatccgcccgtcttggcctcctaaactgctaggattacaggcgtgagccaccgcacccggccaggatcagaaatgtttaaagcaaaatcacaaagattacttcagacttatttagtttatgccatg

SEQ ID NO: 25089 - DNA, 2300 bp, Homo sapien
gtgagtaatctttagcactgtatgtaacgattggaaaaagacagttatgaggactcatctatcttcatttatccattcatgatggatgtgctttgtagccatatttttttttccctctttaggatcttccaagtcttatggataggaaagacagatctctaaagaggctatgatatgcctttaggaaactgaggatgaggccggagtagtaaataactcttacttagaaggagtatatagggtctcatccctgagaacatgggagttagttatgtaaatgttcagatgattttcaacattgtatatggtaaggaagaattttttaaaaagaccttcttacaggtactagaggcaaatgaatgagaaataagtacatgctatgggattttccattatttcacaggatggaaagtttgatctctgtagcctgattttgttctttggccttgaacttgttcaagttgaattgtgtgtcctgaacactgatctagttgttcacaaactagggtcagccaactgtagtggtatgttgatgtattcttgggaatcgagagttattataatcttttaatattatggctaaaaaacccaaaatatctatgtgtaaatatataatgtaagcatggattcgttcatctcatcaacctccttattcctaaatactggactaccatttgttttatttttataatcacattgataccaagtgatcatctaaatgacattatttaatttttaatgattgttcataaattaattgcttaagagttatttacagaaaaaaactagcatttgtcctgagattaatatttttaatataattatttttatgtgtgcttgactattgtgataaagagaaaaacagttaaaagaggaccccagccaagttattatgaggactgatttctgatattagctttagtacctccaaaccatgagatttggggaaagtcacttaagagccctagacttcagttaccttgtatttaaaataagggagttcagctggaactagttaatctgtaaacatagtttccatttcaaaaattgtgaaatgatgcctttttaaatggaaaaagcattaaggagaagaaaactgattcagttacagggtctttgggggaaaatttctagcaccaccctctctcctaattacagtaaaacatggtgggatataagaaccaaatatttattgagtattttctctgcgcctatcacaactctattttaactcctgtaaatgtgactgtgactccgtgagctagattatagaattcctgttgacagttataattggtaggcacagaaagcgtaaagatggagtttggaatggaatctggcctgtctgactctaagccctggatccactgtaatacattataactgctagctttgcaaaatgcctttttccttttctcatctattttcacactcaaactaaaatttagtaaactaaattctgagcagcagaaaaaattttagtaaaggtcctctcatccttgaagaacttcttatataaggatactccttcttgctccctttcccacgcagaactttaccaaaggtcagtaagaatgggctgttgtgttttctctcaaatcctatacagaagtccttaattccgaggtaaacatctgaatggaacaaatgagtatgatctgggggttaaggcaattttcaagtgtgtgtatgtgtgtgtctgttttaaggcataacaaagtccagagattaaggccgagttaaaaaacaaatgaggacaaaccaatgaggacaaaccagtccgctgaggtgcggccagagcagcagcaactgtggctgctttcttgataaaggctgtgaagacggcacgttttactcttattcgtgtatttcttttgacactttacccctctatgaagcctcagaggtgttttaaaattgtgttaggaaacacacagagataagaaaaggcaaatggtcctgatctagtgtctcagggaagaggctggaaaggaaacgcggcgcgagtggggtgggagagggggcctgtggttttgcttctgtccgggctgaagactgagtaaggtagggcccctccttctgcggatgggtttctctctcattccaccctccacccacctccggttccgcgtgcacgcgcgagatagtccagtgggcccacagataacgaccatcagagattaaagaaggaaagtcagcgagcttgaacacaggcgtcccgtgtggaaatgtccaaggagaccgccagaagtgcgcaagccggagtcggctagagtttccttctcaccgagagggggagc

SEQ ID NO: 25090 - DNA, 2300 bp, Homo sapien
agggagttcagctggaactagttaatctgtaaacatagtttccatttcaaaaattgtgaaatgatgcctttttaaatggaaaaagcattaaggagaagaaaactgattcagttacagggtctttgggggaaaatttctagcaccaccctctctcctaattacagtaaaacatggtgggatataagaaccaaatatttattgagtattttctctgcgcctatcacaactctattttaactcctgtaaatgtgactgtgactccgtgagctagattatagaattcctgttgacagttataattggtaggcacagaaagcgtaaagatggagtttggaatggaatctggcctgtctgactctaagccctggatccactgtaatacattataactgctagctttgcaaaatgcctttttccttttctcatctattttcacactcaaactaaaatttagtaaactaaattctgagcagcagaaaaaattttagtaaaggtcctctcatccttgaagaacttcttatataaggatactccttcttgctccctttcccacgcagaactttaccaaaggtcagtaagaatgggctgttgtgttttctctcaaatcctatacagaagtccttaattccgaggtaaacatctgaatggaacaaatgagtatgatctgggggttaaggcaattttcaagtgtgtgtatgtgtgtgtctgttttaaggcataacaaagtccagagattaaggccgagttaaaaaacaaatgaggacaaaccaatgaggacaaaccagtccgctgaggtgcggccagagcagcagcaactgtggctgctttcttgataaaggctgtgaagacggcacgttttactcttattcgtgtatttcttttgacactttacccctctatgaagcctcagaggtgttttaaaattgtgttaggaaacacacagagataagaaaaggcaaatggtcctgatctagtgtctcagggaagaggctggaaaggaaacgcggcgcgagtggggtgggagagggggcctgtggttttgcttctgtccgggctgaagactgagtaaggtagggcccctccttctgcggatgggtttctctctcattccaccctccacccacctccggttccgcgtgcacgcgcgagatagtccagtgggcccacagataacgaccatcagagattaaagaaggaaagtcagcgagcttgaacacaggcgtcccgtgtggaaatgtccaaggagaccgccagaagtgcgcaagccggagtcggctagagtttccttctcaccgagagggggagcccggcgttcccggccgggagcgacccggagtccccagccccgcgtcccagctgccgccagcgccagttttggattcggcggattaggaagaggagggaggggggagagagcgcgaagagggaggggaccgaagctggagggtcccgagtccagcgccgtgttggcgtagagaaactttccctctcggcctcggagacggcgccccggccgtgccggagtggagatcgccaggctcggaggaaccggcagctctccacgcccctgcccgaagcctgacccgactgcctctctcagtgaggtacggagatttatctaggctcttccctggctgcgaacccaggctccctccaggtagcgtggaatcgcttagaagctgatatcccgaggggcggtgggggtggacagctccggccaccagtgcccgggaaggagggcgcggggctgcgcgtagccgctggccagcaggttgtaaaaaattaggacagctaaatgctcagggagtcgtccagcactaaaggaggctaagacctgttgacgcctgctatggcagcgcttgagaaatgactgggggagtccagcgaggtcggggacgcagcggtctccgggctccagaaacctccttagccttttgtggtaactttggtccggcggcggggggccggtgagcaggaactggagggaggcggtggggaaaccgtggatccgtccggctgagggtgcgtggatcagactgggctgagcaggcaagtcatcgtcgggtcacagcgaggcgacccaggagcgaacttccagggcagcctcccttttgttggcgctgggagagaatgtgggcatgggggtggggaggcgcgaagctccgaggccgggccgcggatactttaaagctcagagctgggagggcccaaaggaaggggcggcgtccacatggttacccttctgctgcgcgggtcaagtagcttcttctggagggcgcaaggcgcggcgggggtgatga

SEQ ID NO: 25091 - DNA, 2300 bp, Homo sapien
cagtgggcccacagataacgaccatcagagattaaagaaggaaagtcagcgagcttgaacacaggcgtcccgtgtggaaatgtccaaggagaccgccagaagtgcgcaagccggagtcggctagagtttccttctcaccgagagggggagcccggcgttcccggccgggagcgacccggagtccccagccccgcgtcccagctgccgccagcgccagttttggattcggcggattaggaagaggagggaggggggagagagcgcgaagagggaggggaccgaagctggagggtcccgagtccagcgccgtgttggcgtagagaaactttccctctcggcctcggagacggcgccccggccgtgccggagtggagatcgccaggctcggaggaaccggcagctctccacgcccctgcccgaagcctgacccgactgcctctctcagtgaggtacggagatttatctaggctcttccctggctgcgaacccaggctccctccaggtagcgtggaatcgcttagaagctgatatcccgaggggcggtgggggtggacagctccggccaccagtgcccgggaaggagggcgcggggctgcgcgtagccgctggccagcaggttgtaaaaaattaggacagctaaatgctcagggagtcgtccagcactaaaggaggctaagacctgttgacgcctgctatggcagcgcttgagaaatgactgggggagtccagcgaggtcggggacgcagcggtctccgggctccagaaacctccttagccttttgtggtaactttggtccggcggcggggggccggtgagcaggaactggagggaggcggtggggaaaccgtggatccgtccggctgagggtgcgtggatcagactgggctgagcaggcaagtcatcgtcgggtcacagcgaggcgacccaggagcgaacttccagggcagcctcccttttgttggcgctgggagagaatgtgggcatgggggtggggaggcgcgaagctccgaggccgggccgcggatactttaaagctcagagctgggagggcccaaaggaaggggcggcgtccacatggttacccttctgctgcgcgggtcaagtagcttcttctggagggcgcaaggcgcggcgggggtgatgagcccttgggttctcgctccgactgctaaattcgcttggccgggtccaccttctcgtggcctcactcgccacacggatcagaatccggagcaggcagttctctctattctgaggctcctgcggctgccgcgctgacttccctgtgtgcgggagggaactctgggcaggctggttttcttggaatgtgtttacgatgttgaatgggacttgaacaggaagctggacgctgcagctggaactagcgtgccaaggtagagtaaggaagacttagctggtgttgggcttggcgggtccacttggtacgctgggcaaactccaagtaagtgagggctggcagtcaaggtacccctccctaggtcctagtagtgtttcccaactgagctcgccttactcatttgcaatcagacattttacatgcactatttcaatctgcaagtttgacaaagtgtaatgcagtcaattaggaaggatttaataaatttattttgtgcctgcttttaaaatacgttacaccaacatttgagaataaaaagttacggagaatgttcaagtcatgactgatttctaggactagcaggagacaatactgatgattttgtgtctgtattacaaaatgggtgattaggtgctaaagtaagggagattattagacagagtgaatgtgaggaagtggaaaactttcagaggaattggaaattcttcaaatttgcaaattgctccctttctctgccagtctttcccttttccccccatatgaacaagtagccttggctggaaaacccacaaattgggagagtgcagtcgctggtgactacaggctttgctggaaacagcagacaggctaaggtactgccccactgcataattaaaggtctccttgagctgtccaggagtgttttccaagtttttacgactgacaaggaaaaaaagagaggaacctggccggcagccaaactagactgagctcagtagccaggcatgaaagagactgggcaagttgcaggggctaattggaaaggggctgtcggttgcacttggggtttaaacaagaggtttcttttgcaatgagaatttttaggtggctaagatcagtcttcttggcaaaaaaataaactaagcatagagtgcagttggatatgaccgaggaaattacaaa

SEQ ID NO: 25092 - DNA, 2300 bp, Homo sapien
atacaatggtattaaattgaattttatttgcatatacaagcaccaaataattggtcatattaaactaaaataattccactttaaatggcatgcacaactgctaagtaaagacacctgaactagctaactagtaaataagaccatgtggagaagaaatcagtcatccacattctgtataaacttcctacatgtgagaccaacaggtgaattgctcagacaacactcccttttcctcaactccaactgtggagccatagaattatgagcaaagaatatggtttttattttaaacaactaaattttggggtggatcactacacatcaatagataagtgatagaattctttcagctgttttgtgcaaattctgatttcttctttgactcttgggttgattaggagtgcattgtttacaaataattgggagatttctaactttcttcctttgtagtcagggtttgtactatgaatgatttctgttgttgaaatttattcagacttgtcttatggcttgaaatatatatttttagtgaattttttttctacttaaaaaggatatttattttgtagttctttgggatagagaccttgtattttaattagttcaagtttattgtgttgttaaattattttgtatctttactaattttggtctacctattgtagaggtggtatttacatctctgatgataattttacaagtttatcgatcatctctttatttcaataatattttgctttatatattttaagaactgttattccatataaatatggaagtatcagccctgtactttttaggtaaatgtataatagaaaatattaagtaagtttaattattgagatataaatacttcagtctgtgctgttctctctttttcctgttcaactactaaaatcaaaataataatacaatagtcactataaactgccagtcttctttgtgtcacatattttatacattgtttataattattacatttaaaaatagatattacccttcctatttcataacgtagtcaatttatgacatgtaatataaggtaaacaatgttacagggatttgagtgagcaaaaatttgtctgaatccagaagtcttctctcaatgtccatgactacaattagttccattgtattttccaatgcatgtttaaatatcttacattcagccatcattgactattgttgaagttgatttttaatcatttgttgcctgaacttcagaaatcctcttaagattaatcatcaccgattgtccagactgagctctaaattgcccatgcctatcatagcatgttttccaattcatcacttcttgaactgtcacaaactatagtattacgaaaagtgttgtatttcattgtaaatgtgtgagctaatatgttgggttttaatatgtcactagttttagcttggggaccagtttggcacacatgtaaaattttacacagatgtgttaattcctctaaacattttaatttattcctaaagcttgtatttgtccacaatagattttctcttaaaacaatgtttttagtatcatgccaagtgttagctttaaggacagccagaaaaagagaaaataattatgtaaactaaatttcaacagcatttccctgccttttgagatcagtaagattgattcaatgtattttccactgagttcaacctgtatctcaagaattttcaaatttcatcagaatttatgatcactttcagctcttaagtcctgcttagtgtgaatcagtttagggataatctaaatgtccaatatgtattattatgttttgcattatattgttttagatgtggatcactatactttttcttagttatgccaaactacttatagaaactcttatatgtgtaaaggactactgagttataggggatgtagagatttacactgccaaaaggctcaagatgtaatattctatgttagatattgatgttcctaaagttccctctctccttccaaatcttgggcttcagattccgatcatgtaggttaaatcatcttttgttgattactcatgtttttagtttctctctccaaattcctattgatttccaaatacaaagcagtttagttgtgtctcttgacatgggcagagtttctcttgcccttaaagtcttactttccacttctaaataccttccaagatgttttcctccacaaacacaatatcttccttaaaagatagaccctgcatcagttgttaagctaacacatctttctcctcactacaaatgtatcactattgaatttctctccacaagtgtgaagatggctggagtag

SEQ ID NO: 25093 - DNA, 2300 bp, Homo sapien
ctaatgaagaaattcaataaatttcagcttttatagaccacctaaaacaatgagagaaatctaatatagatatatgaattctacgtagatacaaagacatcatgagaaaaactatgtttctgaattggtttgaacacaggaaatattttttgtgtacaggacaaagatgtctgaaagacagaaagatgcatataacagcctttccccagcatctctactgtgatccagtagaaaagcttatattcatgaccattctcaacagttacttttctcccacgcccccaagcagtgactctccaatctaaaataaagatacacaagaggttggtctcgttctagttttcctttcctgtcatcaaatgatgtcatctacattgagatgtcttggtttgtgtccttgtgactgaagatataagaaagcttgggaggccgaggcgggcggatcacgaggtcaggacatcaagaccatcctgactaacacggtgaaaccccgtctctactaaaaatacaaaaaattaaccaggcgtagtggcgggcgcctgtagtcccagctactcgggaggctgaggcaggagaatggcgtgaacccgggaggcggagcttgccgtgagccgagattgcgccactgcagtctagcctgggcgagagagggcgaccccgtcgcaaaaaaaaaaaaaaaaaagatgcaagaaacaagaaagcaagtttgccactgtccatgcttacaggattcatgtacacctgggaatatacatatgacatgagttgagtgaaaatttagtaacacaaattagaagaaagagaaagatgaaaattagtttaaaggaggtaatttacttaaggaggaaagttttgcattgaggcataaggaagtgacttccattaattggtgtgaaatggggagaattttatgtgcacaggcatagagacggacatgtttaggtgaaggtgaagaaaattagttcaagtgaccttgattagaattgaaatgtccaccgtagattatagagatagatgaactaactatgaactgatgattagggtgtaaagagatatctccattgccagatatagccttatactgtggacaagcatatttttcctgcagagatttatcaaagacctataaatggtatttgcccctctttcaaatatgacacaaaaattactgcttagatagatccagaaatacattggaaagttttgtggatgaggatctggaaagtatacacataaaagtctaaattagaaatatttatactaatctttagagtaatgcagaaaaaatgaccactttctctggtactcttttgctattctatgtgataaactctttctcttccagtttcctaaaaagttatgtcatgaaaaggctgaatttttctctagaaaaatctgctctgtctttcccaggcagcataaaaattggaaatctcacaagaaagcactctggcttgctaaagaaatttgtgagaaatggaaacagctatagataagtatctaacttttaggaagccattcaaacattgctgaaatactttgtcttttgatatttgcctgaaacttaacttctaggacccagggtgggtggatgagtcgaaggggcatacggtggcatttctttccgtgagtctcttacagtctcctatttaaattgagttaggattacttctggcaaaatcccaacataaaaatcttctaggaagatcagttctgtaaattagacatactagataaatgggcatcaagcagtttttcaaaattatgcagttgttaacttcataaggggaaataaaaatgtatgcatttacattgtatgtattaaaacaaggcagagcatttctatacgttcctaagttatacaaacatatatgtaagagtgaaatatgtaaaaaaacttttacataagcagatgcatacaaactccagatgtgctctttttcttactgtgggttgtgtcttctataagggaaaaagaaatatttatcatttcttttactgctgaggggatgggtgcggctctcatatttcagaaaggggctggaaagtgagggaagccaaactttttcctatttaaggccaaagcaaaggaatctcagtggctgagttttatgacgggcccggtgctgaagggcagggaacaacttgatggtgctactttgaactgcttttcttttctcctttttgcacaaagagtctcatgtctgatatttagacatgatgagctttgtgcaaaaggggagctggctacttctcgctctgcttcatcccactattattttggcacaacaggaaggtga

SEQ ID NO: 25094 - DNA, 2300 bp, Homo sapien
tcagggaaaccctggatcagatggtcttccaggccgagatggatctcctggtggcaaggtataataaacacatgtgcaattgatttgtgttatcaaaataagtgatcatcatgtttattttgtacctatgaatttgttcacagggtgatcgtggtgaaaatggctctcctggtgcccctggcgctcctggtcatccaggcccacctggtcctgtcggtccagctggaaagagtggtgacagaggagaaagtgtgagttcccaaaagcagcatctgtcttgtttgtctatttccttcaataaagacatttgtaggtagaaggtagaatgtcagatctgccaaccaaaatatccactgtcatttgttttacagttttaatgctagttgttccttagacaaatgtgtgaataagtcaataccagaagtacttggcagtagtcaataaagaattcattactgaaacccgaaatcatattaatcagaccaactatctatatgctgggtaaatgcaaggccaagttaacagggctcttgcccaacttttctgtctagatcccctgagaaagctataaacagggctttagcactttgaaggcaaaaacaatattaacttccaataattgcatgcatactataattctattataatgaaattatttacttttgaaaacgaaattgtgtcaacacataaaactagttccgtgtatgtcttctcaattgaatgttttcatcttagggccctgctggccctgctggtgctcccggtcctgctggttcccgaggtgctcctgtaagttttgtcattttttggttttattttgttttgttctttttttaactcattctacagtgtaggaaatattttattttccagcgtgttcaggaaaaaagaatgaatatatatatatatatatatatatatatatatatatatatatatttgttctatctatagatagatgatagatagatagatagatagatagatagatagatagatagatagatagaacaaatataaactttcctttaatgacaatgatatggaaagcagttcaggatctaaaagttctttggagccaaggatagaaacatcagttgttagggatccatgcaatgatcagtccaaaatgaaaacaaccacagaaacaaatctcatttcctatctgaagtgtctgttgatgggggattttttagctgatagaaagccataaaatagatttaattattataaattctattttatttttccaatatgtatgtgtgtatatgacttcaattcaaaatatgtttctaaagggtcctcaaggcccacgtggtgacaaaggtgaaacaggtgaacgtggagctgctggcatcaaaggacatcgaggattccctggtaatccaggtgccccaggttctccagtaagtgcattcattttgttggaaaatcccttcaatgtatacaaattttagagattaagagaagaaagctttccatctctaaaaatatgtactagaagagatgagaaatggatttgaaggctaatttgaaacaacaatcagcatgacacaatgggaagattaaagaaagaaaaaaaatttcatcatgatccccatgtttcttgatctgatcttgaatgtacagtttcccagtgctttttaaggccttcactcctatgtacacttcctttctttccagggccctgctggtcagcagggtgcaatcggcagtccaggacctgcaggccccagagtaagtagcacagaaagatattacaggtccacatgtttcagatgtctgcatttcagaaagatattctggcattgtgatgtcatgatactttcttagggacctgttggacccagtggacctcctggcaaagatggaaccagtggacatccaggtcccattggaccaccagggcctcgaggtaacagaggtgaaagaggatctgaggtaagacatcacttatacgtatgtgtatttaatttgctacaatcttccaattttcagaaacacagcgcattatgtttaaattgaaatagagagacgcaatgcatccactcaatttagaaactgaacaatgactttaagacattctccatcacattaaaaatgtttctaccacactataacaggagaaaaatacctttttaaaaatttgatcaggtatccatcgtatcagaataatgacatctgcccaattaaccaaataaaccctgtccacattgctatcccactagagatctcagaattacaacattcataattatctgcgtttatgtagtgcattttacttctcaaacagcttccat

SEQ ID NO: 25095 - DNA, 2300 bp, Homo sapien
ttgagatcgcgccactgcctgggcgacagagcgagactgtgtctcaaaaaaataaaaaagtcacaaaacagatactgacaaggctttggagaaaagggaatgcttatacacttattggtgggaatgtaaattagttcagccactgtggaaagcagctggagatttctcaaagaacttaaagcagagctaccatttgacccagcaatcctgtgatttggtatatcccaaaggaaaataaatcgttctaccaaaaagacccatgaattcatgtattcatcactgtgctattcacagtagcaaagacatgaaattgacccagatgcccatcaatggtagattggataaagaaaatgtggtacatatatatgatggaacattatgtggccataaaaaagaatgaaatcatgtcctttgcagcaacatggatgcagcgggaaaccataatcctaagcaaattaatacaggaacagaaaaccaaatatcatatgttctcatttataagtaagagctaatgagcacacatggacataaatatgaaaccataaacactgcaggctactacaggggggagggtgtggatgggagcaagggttgagaaattacctattggatactatgctcactacctgggtgacaggatctgtaccccaaacctcagcatcatacaatatccccatgtaacaaatctgcacaggtaccccttgtatttaaaataaatgttaactttaaaaaaaatgtactataatagatgatatatcctattaataatccagtttcatgatggtagttccattttcatccagaaatcttaaaatattgatatttttgtggaataaaagcatttcgtggaaatgtggaaaatgcttgcttaagtattgttcaaaatatttatttacttgcatgacctataagtgtcttaatgttaacatattgctggatcatcaagcatatatttcccacatttaaatatgtaattcctttcatgtagtttaatgttctatgagtcatacttttggaatctctgctggcaggattatattattatgaggttccaagacattttggaatcaaatagttgttctgccctagttgcatgtaccaggcttaaagtttaccttattctgtcattttaattaatccaatatgacctagagaagagggatcctaagtcacaggagacaaatgagctacaaagagcctaagaatttaagttaactttgaaatgacattgacaggaatagctaaaattattatcattgaagaaagggcaattttattaactctatacattacattccgacactttcatttaaaatgcaattctcacatactatttatataatatacacacaaatatatgtatacacacacccatgtatgcaaatgcatattaaattgtgtatttgactgtatgcctaccaccaggcactgccttggtatttcctattttaagagtctcttatatatgagaagagtaattttaaaaagatctaatgaaatgattcatagcattctaattgtaattcaacttatttattcactttactcatagttttgatgttacattattttattacattatttacattattttgttacactcattctaatttgctttaaaatattggaaacacatctattttggtaaagccgcttactatagattttctcttttcggtatggttttctcatctataaaatgggggtaatgatatttccttcatatggatgttttgagccttaagtacatggtttggcaaagtgccttacaatagcgactagaatgtagaaaggcccccaatgcataccggttacttttttcgtaaggggcactctcacttaaaagaatccttaatcagtgagtgtatattttcaaaccctctgttaattcttttggagacttatagtcatgattgagattgtctttatttagtaaaatttctattttgaaaaataggtgaatactggattgatcctaaccaaggatctgttgaagatgcaatcaaagtttactgcaacatggaaacaggagaaacatgtatttcagcaaacccatccagtgtaccacgtaaaacctggtgggccagtaaatctcctgacaataaacctgtttggtatggtcttgatatgaacagagggtctcaggtaatttaatatgtttacttaaaattgtattctttactttttactacttattacatatttttgatttatttaggactttgctatttttttaaaccaggcttattttaccatgtttattttgaagtgatatagtctcattagttacaattgtaata

SEQ ID NO: 25096 - DNA, 2300 bp, Homo sapien
ggtggtgacagacgcttgcaatcccagctacttgggaggctgaggtaggagaatggcgcaaacccgggaggcggagcttgcagtgagccgagatggtgccactgcactccagcctaggcgacagagcgagactccgtctcaaaaaaaaaaaaaatgaagaaaactaagtcaggcatagtggcttgtgcctgtagtctcagttactctggagtctgagatgggaggatcacgtgatccagggcaagcgttcaaagatgcatgtgctgtgatcacatctgtgaatggctactgcactccattctgggcaatgtagagtggagaccctgtgccaaaaaaaaaaaaaaaaaaaaaggaaaaaacacctaaaatgccttaacacaatttcaatttttaaaagtaaaaaagtgatattttgctattataatttaagaatataatattatatgcaaaagaaggaaagcctcttttcaatttgtggtcaaatgtccgaataaatattagcaaagctaattatgctaagaaatagaaacatttttgtagcttagcattaatgtagtgctaatgcctgaaaacagttttatgtatgcatgaattaggttgcatgaaagagattaaaacactgtgtggagaaaatatggtggaaatggtattaaactagacagaaaactcttgaaaatatatagattatatcatttattatagataatgatttgcaaaggcagccaaattataacaaaatagtcgtttcttttttgtttgttgatttgctaagcatgaagatttctgtgcattttttacctcaatatgcctatgttctgttaattgacagggtcttccaggtcctttgggccctccaggtccggcaggtcctactggagaaaaggtaagtcacaagttgttaatttgtacactcaaaattatgagtcctgaatagcaggctctttcataaatcttttcattttataacatatggtatctgagcaagatcatttcagagttcttttccactatctcctcctacacagtgaccaatgtcctaaaattatgtttagctactgttttggacagtaaccatctaaaatctgctttctagggtgaacctggtcctcgaggtttagttggccctcctggctcccggggcaatcctgtaagtgacagtattttggtgttctttagtgtgagattgagcaataaaacaattaatcattttgtttttatatttatataaaacaatgcttattggttttaggttatgtataacttcctggtttttagcttttgcttttctaattaaacttaaaaattatctgctatacaatctattaagtgtagttaggcagcttgtttactaactaatttggaggctcctttgagacttctgaccttgggaattttgttctatgacctatatctttatataatccttaaggaccttccttaagcaatatgtgtaatttttctatatttacatgtctaactatcagatttatatgatcatattttaaaatactgttcctgtttaggataatgtgtgaaagctacagtaatctttgtctcctcctagggttctcgaggtgaaaatgggccaactggagctgttggttttgccggaccccaggtataattttcaaatatccctaatttacaaataaacacttatcttgttataataagtttaatgatcattgtcatatgttttgaagtcgtattctggaaaatttacagttttctagacaatattctcattttcaatacatttttttatagactggcacaaaacttgtttgtgctagttgagcttctataattatttgttaaaataaaaatgcagtgggatagcttattttttaggctgttttgaaagatctcatcagagtactttttttcctttagtatgctttaatactgattataaagcactgtttcacaatatatgattaattgatacattagtaataattactctaaagtaatttgtctataagtcttataatcaattgcttgtttgtataattttttatagggtcctgacggacagcctggagtaaaaggtgaacctggagagccaggacagaagggagatgctggttctcctggaccacaaggtttagcaggatcccctggccctcatgtaagttaacaagaaaaaggcataacttgagtcaagtgccccatgtttggagtgtacattcagcctcttttgcttcactatagtgctcttttgtttgtttctattcagggtcctaatggtgttcctggactaaaaggtggtcgaggaacccaaggtccgcctgtaagtt

SEQ ID NO: 25097 - DNA, 2300 bp, Homo sapien
attcctgtatagtgtaataggtgacatggtagagatagagagtactaggtcacagaagggacccagtctacctagacttggaaagcaatagaatgccttccttattactgaagataattacgatgtaactattatatattgtttacatatgtagaatctatcatctatctaactatcataatatcaaatagtgatattcaatcaatatacactggcctctgttttgagtagttgagattttgattaagatgtctgctgctatactcattattaagtattttgaacattcaccttgaatacaaatgatattttataacaatatgaactctgtagttatgtgtttcctctaaagccactgtaaggtttttatttgtagctacagattaaatttctatgaagtcacaagtgtttgaagggtgagaacactgcaagctgaaaatgttatttaaaggtgaaaactctaattttccttgaataagctttcagaaaagtttgagaatttgaaagtattttgagcaacaactttaaatttgatattcatttttataaggcaatttctgcaagcttatttttggttcttatgcctttgaggattgaaaaaaacaggatacaaatacaaatttacatttttattctcagggacacaaaggtcttgaaggccctaaaggtgaagttggagcacctggttccaaggtaatcttataattatctcactgtaacctcactttggcatcttagttttgcttcaaatgtttacacatttttcagaaccaccttaattcagcaggagagagggctacaaacaaatggttaggtaaataaacataatttttcaaagatgagtggcaatggctttaccatgacatgacttgatatgcctccaagaatagcctccatagcactgggtgtctgccagtgtaggatgagtgttgtcttcatatgaagatggcactatgaatctatcttttaaaatacaatcattcatttttctttttaaaaaatatctgaaaggtttagatagttcattagtcccattattgagtacccctttaataccaagaccttctcctcattgtttcttctcaaaatttatttgtatttctacagggagaaaaaacatcaaggaagtataaaggaatttctagtggaaagcatcatgacctaatgtggaaaatcatttggctttaaaattttttttatttctaagtctcctagaatagatcttaagatagtgttacaatcaattttagctttgtaaagttttacttgagacgtatcagacatagccagataagtcctttcctgagactagttactgtggctaggtatgatagtttccgtcaatcttaagtccccaatattattttagatgtatttctttaaaactacactactattgcattttgagaagaggtaataaaacaacattctgagatcctatatcaaaagtacatctttcatatgtcctctttgaaaatatgcttttaaaattacacacacagaacaaagtgatgtatcggttgtaggcttctcatactgtaatgtattctcatttttttttagggtgaagctggccccactggtccaatgggtgccatgggtcctctggtatgtgctcgttttcttgtttcttaaatttctaaggttatatttccttgccttttagattacaacaagagaatttttaaatgaaaaataaaaataaatggacaacatatgttggctagtaaaataatcttgattaccagctgatagacaagcacaggagagttgagcccttctaacagaaaaggtttcccacatttcactgtttctcttaacggttgaatgcccttattctttttctatactcagtgatcaaatcaagattatcgcagatttagcccattaaagccaggttaagtgaaatctatttatgtaagaggtgataggttatttatctccacatggggatagtttttcaaacccaacattgcccctggaaatactactgcttggtggccaattatcttgaatctcaattggattgagtggggtagtcagactactctacatttcaaattaggtgcttcaagagacatttcttctctatcgtctatagggtccgaggggaatgccaggagagagagggagacttgggccacagggtgctcctgtaagtatatctgcttttacttatactgctgagatgtgtatttcaattcattttcagatttggtttactgaacttgccttttaaatgaaagtaatagtactggtcaccttttttttttttctttttcttttggaataaagtcagg

SEQ ID NO: 25098 - DNA, 2300 bp, Homo sapien
aaatatttgctatgcttctgtcataccatgagctttcagtagggtgggaagaggagattgaaactggtggcaaccatgagagactgcatggtggttttaacctttcttatataagccatgtttatagttaaatttaaaacaactttattaacaaacagataacagatactaaactactgatctgagcagccactgagtgttccatacactgactctgctacaagtcctgcaatcttgcctaatcattgttttatctccagcataggatctgagagttgtagattctccataaatgtctgccgtcttgcacttcagtaaaaatgctgcacaaggtgcctgaaaattgtgccagcccttcggtatcagggtggtattggtctaaaattgcctcatggtagaataggactggcaagctcagagaaaggttaattcctcccccccacatttacttatcttcctgttatctttgaatatatagtcagatggatttcaagtcctagcctctctaagatattctagaaagaattaactgaaaggtgatttttggtccttacttagcccattcattaagtggaagggcacccctgagaacagtgtggtggtgacagaagtcattgaaatgggacatgtctaaatgaaaagataaactgagaggtacagggttagaagctggaaacaaccgggaaaattgacctccactggaatatttatccagagtctagttccaaagctaaaatgcaaaggttcttggatttcttctattaagaacagtaataatgtcttgcttgcctaatctcatttgataatttctcctttctccgggcttaatgcatccctcacatatttatatgctctggcttatatatctttatttcttgtaaatttagtttctcaacacctacatatgttccttgaaggtgatgggtatgtcttttatttcttttatgtcatcctttctgcccagtgcttagcacagtgcaaggcacctgttgcccaataattataaacaattgactcacttgtattgtatagaacatccatcctgattctagggagactcaaggtggcaaatacattagattgtatagaactctctgaggtcattaagatcttggcaagtgtgagggtggcacaaaagttcatcgataattttccttaaaatgcatgttcaactggggctatcatattccctgcaaagctggcttaaagctaataataccaccatctgcttttatgtagctctttgcaatttggagcttcattaataatacattactcattttagtgtcactaaaccctgtacactggtcagggtaaagcccttttctcaaatgagaaaattggagtgcacagagataaaggactatatgcacatttacaaaattattgagtggcagaaccactcacaaaaggcagaagcaagccttttttcatccaaaggtagagtacttcccattcctctgcactgcttagtagactatttttcaacatggtaaaactctctgggacaagaggaacctgaagatgtggccccttaacaagagatgtggagaaattaggaaaggacatgctttcttaattcaaattacaatgtatcacaaattcatttatccaaaatggttttctaacctggactttacctgggcaacattctaataatctccttccagagtatgggaaaagaaaccgaatctgagaaggggataagaatactccctattcagtcaaaagaaagggttaaaatgtgattgtttaaagatttaaggtggagaagagagtcttgaattatctaaatgtaaaaaaactagggtaaaaggctggatttccttcggaatgtctttttcagcttataggggaaaagttaaagggtgtgtgtctggggggaagggttagggaggggaaaatagaacccttttcttctaacagcctttcttaaaaaataaaagaaaagagaaacaaatgtttgtttctgttattaagccccatctatgcttaaaagttaaatgaaatagggaaagttcaggcacagagacgcgtgttctgatttggttgtttaccatcaatcagaccgttgcttggcagacactggatggttatgagcctgaacaagctgaaaaggggcaggaaaagaagtggaggcagcattcttcctatttaaagctgcatcgcttgaaaaaagttttcgcagactgtgctggagctggtgctgaaaaagggggtttgcagaggctgccctggggctggtgctgaaagaagagcccacagctgacttcatggtgctacaataacctcagaatcta

SEQ ID NO: 25099 - DNA, 2300 bp, Homo sapien
aaatatttcctggatggaagatgccaaataagtgtttctggaaaatccttttccttctgtatataggctatgctctttcttgctattcccttatttcttctaactgaaaggaacatgaactgtgagcataaggacaaaaccaatatggttaaggacaataacacaaagaacaaagtagagaaagcacaggtccctggtggcatgaatgatccactgcactagccctattctgcctacctcagccttcttgttacatgataaagacaacgcactattaattaaacagctgtaggtgggattggttccttaaaaattatgtaaaaagaaatcaaaatacaaatgacttatctttctgggcacttcagtaaattaaaactctgtgtaaaataatcctcctatacatttatcaatccagctagtttttgtccatatcaggatttctgattcttttctgaaaaatctaaagttaccatacagtaacatacaactaaagtcacactaatttgagtgaaaatatttattttgtttcttggctcaggccctaaggaaaagcctgtatcaggttacaaagtacccaacaaagtctttaaaagatttattgtgcatacatcaagagactaaacaaaaagaggttaaggctgcagaatcaaaagtgatattttacactccatccactgtgacaaagggtatcacagtcatgaaagagaaagctggttacagcttgagataaaccaaaattattaaatatctccctttctagttctggctccccaaataataaagttttgagcactttaataagctagactcctcagtaaaaagtaaatttatccctgatttttacagtggtgctgtcccaggatatgtcttgacctttgtgaatattgtatttctccaccataaataaacttataggtataatcatgtgtggcttaatgatggggatatgttctaagaaatgcattttaggtgatttcatcattgtgtgaatatcacagagtgtacctacacaaacctagatggtacagcctactacacacctaggctgtacgttatagctgattgctcctaggctacaaatctgaacaacatgttactgtactcaatattgcaggcaattgtaacagaatagtatttgtgtatttaaacacataaaaggtacagtaaaaacacagtattataatcttacggaatcaccatgttatatgcattgattgaaagatccttatgtgacatgtgactatatttgagaccttggtaattttgtggtaaatccacaaatcaagaagcgaaatcaaaataggcaacataatatacagggtccaagaatatgatacgtgtaagtttacaaaggaaaactggagataaactggcaaaaataaacatgttgagattttaggggttcctaacccacagattctattcactaatgggaaaaggtaaaactcaggaaaccagagaccagcgccctgaaacctggcgggactggccgaatgtcagattagcccgagcagctacactgaacgctgcggaagatgcaccagaatcccggagtaggagccagatttccaaaggaagaaagctaggccctaggactgtggagattctgtagtaacctaagcgatgttcacaagaacagaagaacggctaatgagaggaacaaaaagctgtacaaggaagagaaagctacctttccacccaataactcaacgctgcgaccgagaaaaccagggacgcgagaggctcgcgtcatcctgcagcgccgacaccacagacactagaaagcgacgcctccggtgggacgactggaggtcacgtggtacactatacgccacctttcccttctggcggaaaaagccatagagtcaggttgacaaggcctgagagaaatatgtctgtattaaataattgtgtataggtatataataaaaactgattgtctctaaatctctgttttgctttcaccttttcttacaagtgtcttagtttgacattgcccacacaaaaggtgcctgcacggaagcggagtcctaccaccgagtctcaggcctagaagggcccgggggtgggttctgtgggctgggaacagccttattacccggctcaacgaaggaagttcagggcgggaccagagattggccattccgctactgcgcaaagatggtggaggaggagaacatccgcgtggttcgttgtggcggcagcgagttgaactttaggagagctgtgttctctgcagattctaagtatgaggggcaccgcgctttgtcggctgaggggcggggcgtgagtttctcgag

SEQ ID NO: 25100 - DNA, 2300 bp, Homo sapien
tactagtccatatttatgattctcatatgcagtaattgtgatataaatttcctagtttgtataattttttgacttggatagataatatggttttactccaacatttttacattcctcttctctgagtccatgtctctatttgcagaaatcctaaaattgccactttctttaaaaatattaaaattctttgtaaacattataagcaaagtattttcctataacaacgacaacaaaatctagcagaaacttagtattaataaaactaagtacactgggacaaaagtaagcctatgtgttagtaaggtcttctggtgctaccaaagtatggtccacagaccagtgtcctaaaccattagttaccattctgtataagagtacagaatgtgagtgtcacaaaacactttgacattgcctcagcatccaagcatattataatttctattgtattttatgaaagtattggtccttgatggattggaagaaatttttttaagcagaatattcttcagtcacttgagaagcactcccttaatgctcatataaggtaaaaggagtttggctaataaaactgagtaagctgagttctggcaggaagagcaacaagctcttgtgtgggtgtttttgttttgttttgtttggttttggtttttttttctggagagtctcactctgtctcccaggctggagtacagcgatgtgattgatctcagctcactgcaacctcagcctcccaagtagctaggattacagggatgtgccaccacgcctggctaatttttgtaggggtttcgtcatgttggccaggctggtctcgaactcctggcctcaagtgatgcacccacctgggcctcccaaagtgctgagattacaggtggcagccactgcaccttggtgcttttcatatctcattcaaaaccttaccatctccctcttcaagacagaaagttggcttttttcctctctcttttagttaaaacttgaaatggatggatctgcttcttgcagaaagctgtgaaaagattgttttgcagaagcaatataaataaatgactctacctctttaaggttaacagtgaattaatgaatagaaaatgcccctgatcaacatttaattattcatttgatatcttgatgaatttcttttttttaaatcaattttgtattgttttacccttttagctgtattcttgttcccttgatggcacaattaaactgtgggactatatagatggcatcttaataaaggtatgtggattgatctttacttttcgttatgtgaataaaaaaaggcaatgtaatttaatggtagatgtactgtttctataaggccaaatatttaaatagacttcctaaacaagttacaaaataacatcaaaaaaattaatttgactatataaaaattttccacttataaaagacaaggtaaagctggaagaagatatttacaaaagatattattccaaatatacaaaaatcttcccaaaaaccaataaggaaaaactaatagcctggtagaagaaattggcataaagtaggaatatgtaaattcacagaaaagaaatacaaatagtcaataaatatgaagagatgcttaaactcattaataaagaaatctaaattaaaacaaatgacacaatatttcccctcataaatttagccaaattgtagattgaaaaaaaatctagtgataggtaaagtatggagaaacaggcacttttttacccaatgagagttaaaactgaaaatcaataaacacgttttgctacagcagtctcacctcggaataatggcctgtacacaaagtccttatagcattgtttatggtaggaaaaaagttaaatatgaccttgatgtcagttaaaattatgatacattcagtacaataccatttcagatctatatgtaggaaactcgaaagagtatttaacaaatatgtattagttgtcttctgtaggccaggtactctccttatgttgggaatacagcaatgagcaaaatacataaaaacccctgccttgatggatcttatgttccactggagggaacagacagtaaacactatggtgctctttatctttcagactttcatagttggatgtaaacttcatgccctctttactcttgcccaagctgaggattctgtctttgttatagtgaataaagaaaaaccaggtatggtataattaacttactatatatggcattgagtggctctttacattttacagttcctcaaaatttaacattttggttttaatctgaagccaacagtttttagaatgggcatttaaattgctttt

SEQ ID NO: 25101 - DNA, 2300 bp, Homo sapien
tgtgcatgctctgtgtctgcctttctctctctttcaaaatatctttttgtactgtacacagctattttcagacctcagttgacccctaggaactgaaaccacagaaagtgaaccctcagataatgggaaactagggggaactactgtagcattctctagcatttacacaatttctgaacattatggcttatatttccacagaaaaagctgttggctggacctgtgactttgttggtagttatcacaagtatcaagcaactaactgttgtttctccgaagatggttctttactagcagttagttttgaggaaatagtcacaatatgggattctgtaacatgggaacttaaatgtacattttgccaacgagctgggaaaataaggtaggtaaatcttcgggaagtatgtagtactattttttaacttatttaaacaagtcttaaaactttagtagtcatttatgccctctccaaaagtagcctgaaggtcagtggggcaagcagctaatcaaaatgctggaaagccaaaaattctgagtccacaaactgtgccaacatttctgaaattcaggttaacatttaactcttggcctacatattttttctttggaatactttcatggatgtgctgaatggtaacagaagctatacataagcctcaggggatccaaaccttcttattttctgtgtattcccataaaaaccgtgttatgcgccaacctcattgtttccgagaggtgcaggggaaagtagcagcagcattttcaggtcctgcttcaggtagttgggcctgaggacagaatcagatgcctaatgagatcgtctctaattcccagcatgtctgattctgaatttactttgtaaaactttcttcacaattgaaatcgcaagttttcttcttcttggtaaataggatttttgtcagatgactgtacgtttcatgtacattttctctgttagatgtaaattggtataccgcacagtgtgttaaagaattggtcatccgttctgttttcctaaagaaatagctaactagacccttccttttgtactccttagacacttttttcttcaggataattataaacaaaaatatatatgtctatataaaaatctgcattacatagaacagccgctggaagcctgcagttctttgtaactgaatttgctagaactgactgttgctaacttccttgtggttttaatctaggcacctttgctttgggagattgacgtgttcaaagtatctacttggtgctactgaaaatggcattctttgctgttggaatctgctgagctgtgcatgtaagatattttttactctaaagtgatctggcaaagcgcataaggagttgacattaaactttggcattttaggacttagggatcatatcatcaggtctgtacttggaatagtcagttttttacgtgacatatgatgccaccaaaatttggaatactgggcctgtaatagacattatttattaactgcttaattgttggtacgtcagcttccattatccttacctttttctactgttttcagtgtgtgtgactttctgatgccctccatattccccatcctcgtaacaatttgaataatgttttctgctcatttttaatacttactaatctacattatccctgacagcttaaattcaaatgtagtctatcacagtcctaacaaatgtgaacttagtggcattttacccatttgagtgtatgtttggaaggcatagtagctgcttataaatgaatgtgtatggtaacttttttcagtattctttacagttaactctggttaacatactgtacacatttagcagcatcagaaaagcactagacataaatttcaatgaaataataatcttttcatagtttgtacaaggagcactacagttccagtatgtttttctttcggcctctcactttagtgcagcattctacaaatcatttcagtgtgtctccatgtgtgttagttggaagcataagattcctcttcctaagaataagagaagttttttaaagcttttggtaaatctttccttagaagtgaatcacctttgtttttcccctcagtggagtggaatgcaaaattaaatgttagagttatggaacccgatcctaattcagagaatattgctgcaatctctcagtcttcagtgggttcagactgtaagtacaaaccacactttgtagtaagagaacatctatgacctaagttttcttcttaatataatttgagccaaacttgccttcacatcagatgttaattggaagccattttgcttgaggcacggcc

SEQ ID NO: 25102 - DNA, 2300 bp, Homo sapien
ctacttggtgctactgaaaatggcattctttgctgttggaatctgctgagctgtgcatgtaagatattttttactctaaagtgatctggcaaagcgcataaggagttgacattaaactttggcattttaggacttagggatcatatcatcaggtctgtacttggaatagtcagttttttacgtgacatatgatgccaccaaaatttggaatactgggcctgtaatagacattatttattaactgcttaattgttggtacgtcagcttccattatccttacctttttctactgttttcagtgtgtgtgactttctgatgccctccatattccccatcctcgtaacaatttgaataatgttttctgctcatttttaatacttactaatctacattatccctgacagcttaaattcaaatgtagtctatcacagtcctaacaaatgtgaacttagtggcattttacccatttgagtgtatgtttggaaggcatagtagctgcttataaatgaatgtgtatggtaacttttttcagtattctttacagttaactctggttaacatactgtacacatttagcagcatcagaaaagcactagacataaatttcaatgaaataataatcttttcatagtttgtacaaggagcactacagttccagtatgtttttctttcggcctctcactttagtgcagcattctacaaatcatttcagtgtgtctccatgtgtgttagttggaagcataagattcctcttcctaagaataagagaagttttttaaagcttttggtaaatctttccttagaagtgaatcacctttgtttttcccctcagtggagtggaatgcaaaattaaatgttagagttatggaacccgatcctaattcagagaatattgctgcaatctctcagtcttcagtgggttcagactgtaagtacaaaccacactttgtagtaagagaacatctatgacctaagttttcttcttaatataatttgagccaaacttgccttcacatcagatgttaattggaagccattttgcttgaggcacggcccttctttgccccaacactttgtcattgtgtgcgtccatacttagttctaggagagctccaatatgtttcttatttttccacaagccaattcgtactcaatctttaaaattcaagagatttcaccagtttgacatatttccaactgcccctgagaagctttaattggtcatcctctatgttcttgaagcagtttctacatatctcatttctagtacttacagacaaaatactactgtaataatattttggtttctgtcttctgcagtgggccctggcctctggagcacgaattcttctttctgtttttcatcctcatagccctcattcctaacctgcctggcccatagtaggaacacagtagatacctcttgaatcaaagcctaaaacagtcatgacttgggccagttactcaatggggtgagtcccaggattagtgtgatctgccagtctgaggctagaactaaccttttcaggcaaaatgttattgtttctttgttttttccctctagtgtttgtatttaaacctagtgagccaaggccattgtatattcaaaagggtatctccagagagaaagtccagtggggagtgtttgttccacgagatgtccctgaatccttcacctcagaagcttaccagtggctaaatagatcccagttttacttcctaacaaaatcacaggtaactgcctccctcaaaaaaggcgatcactttgtacatggaattttagactaatagcccatgactattggtgtgagtttgtttctaggtgaaacagcttcattaaaggattatttcccaaaaaattgtctaatatgctcagtacagcagcattattaatgtaaatgtattaccgttttaccccacacttttgaggttccttaggtattgcttgtattaactctgtgacagcaaaaaagcagaagacaactaaaatactttaaattgcatgattcttttttctttttcttttttttttcagtgtttgatttgcaatttttaaaatggtggcttgagttttgtctgtcagttatattttttattcattaccatttcttaagtatctctcagacataatcttgtaactctcatcgtggttattaaataggtttaaatcttttattccttttctgttgtcaaatatatatatcaaagtgaaaaatttgaccttctcattttttaacaccctgtaacaccttgtttagatttgcactctacagtttgtcttttgcatcattaattctctc

SEQ ID NO: 25103 - DNA, 2300 bp, Homo sapien
ttaattaattttttatactgacacataattgtgcttattatggagtacatagtcatgttgtgatgagatgagatggagatacatctccatcatctcaaacatgtatcatttctttgtgttggacatttttttaacttcctctttattgattttgtcctgcactctgactcaggaatacattcccgtagtcaaactctagactttgttatcaccactaaattctctcctcccataatctcagtcttaggcatccatattttgagaaatcaccttctgtctttccaccaacttcttcactaccacagcctcaacaatccatgtggttggcacctacaaaccattcattccacggccttttcactgtccatgatctctctcttgtctctttcttacccagcttaaaattcaaggccagtcatgattatatgatcatctcttggcatataccctcagctcagttggccccctctcgttttgtcacttttgtttggtaagactttggttaaatccaactttccacagtagagcatggctggaaaaaaatgcacgaacttgctcagcattctcacttgaggttcagggccacagagttggtcctttcatgcttccagataatcacactattttctctgattctttccttctccactttcctagaggaccattcacagttgtttctcctctctcatcacatgttcaagtcctcctcccccatcctcactttcgtcaatgacctggctttgtattttgctgagaaaatggaataaatgagaagaaagcttccatgtgattccaccatcatgtctctcttcctacctgtacctgaagccatatatgtggtctctactcttgttactattgatgaattgtgttcctgtctaagagcaactccttcagttatgcggtagattcagattacatcccttatctactgtatcattccaggcagcacataatcctgctctaattttgctcctcttaaaaatccctatctttagcacacttccttctctgctactctatttctttgttcttctttttgtcaaaacatatccaaaagacttgtctatttccaattccattttttgggcagtaccttgctttccataaggccatgggaagcattcacattgtgctccagggtatgactcactgaaaatacaaatggtgtcccctggggttggcaccagtctcttaaatcagctttattcaggcattgcccttatcgttctcctttttttgaggtctccagaatctctcttgtgaccaagctagtgtttcttttcagtgcttctcgttgctgtgatgctctttttttcagtgagtcctctgacctcgccttatttagaacattcccctgggcactctctgcccttttgcttcattacttttcaccatagtatttaataaacatctgacatatgcagtgtttgtgtgtgtatacacacacacacacacgcacacacacacacacatatgcttgttgatttattgtcttttctttcctgtgagaatataaactctgtgaagacagggaagaatgttacttttcttctttatagtgttaagaattgttgagaataatgactagcttataataggcatttaagatatatttgttgaaaaaaatgaatgtagagtcactgctgtattcattttaaaaagctattagactgatttatgcaattccaaggggattatcattgttgaggcaaatttagtgggacttgacccaaacaacaaatatttttccaacaaaatgtctttcttacaaatgtacttttagaaaaccacattttaggaatctatactcttggtttacagctttgtattgtgtaaatgggcagtctctctttgatgggtttgcacacttacctgcctctttcacctgcctctctagatatgaatgccacaatacgaaggattgaccagttaaccaacatcttagcccccatggctgttggccagattatgacatttggctccccagtcatcggctgtggctttatttcgggatggaacttggtatccatgtgcgtggagtacgttctgctctggaaggtttaccagaaaaccccagctctagctgtgaaagctggtcttaaagaagaggaaactgaattgaaacagctgaatttacacaaaggtaaactgaacacaatgatctctccttttgttctcatgttcagaccttaaatgttggtgaagatcaaaactattttgaatttgtatcaggttttattaccagtgggggccagatgaggttaaatatatcgctttggtagacgaggcaagagcag

SEQ ID NO: 25104 - DNA, 2300 bp, Homo sapien
agcccgaagggtcttgtgattaaagcggtgctttgtaacctagcatgtcaaagccaaaagaattctgtcattttgcactttctgaatagtttgaggatttttattctattttcattttcaatttctttccatttcataagccccaactaacatatctcaactattctcattaattaggatttaagattccccttccacagctcactcactggttttaatgtcatgaaccttgcttgttttctttccaaagtatctttcctacttgcttcactgcagtatcccatttgttctttataacattctctcggttttggcttctggggactccttggtgacaatggagaacagagactccatatcacattttgaggtatatgctgacttagccactctttccacaaatacttcttaaacagtgtctacgggaagtaattttttttttaaccaaccgaacttttaaaaagccacctggaagttggggacagcatgacaccccttcttataatatgtaataattaatgtaaagcacttggaggtccttgttgctgagacacactctgacaaatgtgcaaactatcactatcctttgtgccttgttgaggacctgtcaaaaaattcatctctaataagggatcgccataaagtggaggggtttatttaccagttcactccttcactttagttcactcatctgagtatactttggtttattctcaaggatgcatgtataaatgaccctattctccacggttagcaaaccaaaacctctctaaattgggagaaagaacttgaatgtcgtgtgaaagaaaggaaaaaagagggcttgaaaaggcaaaaagcagtgaaaagcagtagttaaactgtaacccctatctctactcaccagaccacatcccaaccgaatccagctgcacccaccccgtagacctttggggctcctgattgagagtgcagatacagggcacatactcatgcgtggctcccttcactactgggtgtcagtctggcctgtgctcaaggtgtggcatctggttggagtttcaatatgtaggatccactaccagggttttcgtgagattaagaagggtaaggtaacctactggcaaaaggggctggtatgccccaggggttggtttggcacagcaggattaaaacgaagtcaaccaaggctagagtctggtgttctttagtcattcacctcaccctccaggaggccaccgaatggctttatctggacagggacagatccagggacacaactgggataaccggtattcctggtaagcctgtcactggggcatttggaggttaggtggggaagggacgcgcgcgtgggggcggggtgagagggtacagagggagaaggaatgatggtgaagggtttgctggggctgcagcatcctcattctgtctccaggacggatttggaggccccagtttggggatacgggtaggtctgtaactcgctgcgggacttcacctttgcaagcctccgtttgctcctctcaagagggatggactctgatctttgcgcccccttcctgccctttgattctggttctttgagggaagccctgctatgcagtccggggaaggaaaggcattctctgctgcaggcgggccggaatgggacggccaggaaagcggcctctgtggcatgaattatatttatttagatacctgtattaaaaattattttcgttaaaaaaggaatccccacccaccaagctcgcgctggagctttgcactgcgaccgtccggcggccgccctttccctgaactgcggggtagccggtgcgcagcgctttcttccagcacctgacgcttagtttcgcgcagaatctccctacgccgccccgccggctccacgcgccttcctccttttcccagccccacggccgccccccgaggttgccctcgcggcttcccggagagcaggaaaacccggggagtggaacgcgtcgaggcgaaggtccccgcaagccgcgcagggtgtctgcggccggttggacgcttgcgcccggggtgggcgactcctccgggcaagggcgcggggacggcccggcgcgcaaggttgacgggagctcgtctcgcgccgcggggacgcccgggcggccctgaaggggacggggcggccccagtcggaggtcgcagggagctccgcccccgactcggtataagagctgggcccggcccacggcggcggcggcggcggcggagagagctggctcagggcgtccgctaggctcggacgacctgctgagcctcccaaaccgcttccataaggctttgcctttcca

SEQ ID NO: 25105 - DNA, 2300 bp, Homo sapien
tatatatttaatcaagctaaaatttgcataacataaaattcaccacttgagccattttggtgacttttattatttcacattgtggcaaaaccattgccactatctagattcagaccattttcatcaccccaaagggaaactacacacccataaagcagtcactacctattcttccctcctcccaggctctgaaaacaaccaatatgctctctgtctctatggatttgccttaggagtatatttcttttggaatcttctgaattctgtatttaatttttccaactagaaactgtagactactgtgtatatgtgtgtgtgtgtgtgtgtgtgtgtgtgtgtgtgtatgagagagaggaagcaagagagcacccccaatgagagccagcattcataagaaacttcgcaaggtcaaatctatttgaaatgttcaaacaaaatgaagacctgggaggatatttatctttcaataggatgtctgtaatttaaagtagatgttgaacttaaacttctcaagagccattcattcatattatagaaatataaaaccgttcttgaaatttgcctgtaacactgagaaagatttttgaatggaaacgtggctttatagctcctaagttaatgtaaaaaggttcacatccaacagaagcacagtcctggattggagcccttcctgtaatagttggtgataaccctattactttttttcttcagagcagtggaatagtgaccattctttattctgcctttgtcctggtgagcacatctgatatggcagaggaaactgaggatgcctggccggtaagtgaaaagacaacttaaaaatgaaatgataaaaccgtttttatttcccaactataaacactttaaatgaattttaaatagccatatacattttattctggctgggatttttaaaaaggtggttaacctagttacaaactttaaaacatgttgaaaatgaattggcacatggtctttagggtatctactattttttgtaaactgacttaaaacttgcatgactttcttagttagattaaattgatgggaatgttgtatgttctgtgttctcaaaaacatatatatgacttttggaagaaatcttaattttcaactggtcaaatgttttctcagaaggaggaagagcccgaagggtcttgtgattaaagcggtgctttgtaacctagcatgtcaaagccaaaagaattctgtcattttgcactttctgaatagtttgaggatttttattctattttcattttcaatttctttccatttcataagccccaactaacatatctcaactattctcattaattaggatttaagattccccttccacagctcactcactggttttaatgtcatgaaccttgcttgttttctttccaaagtatctttcctacttgcttcactgcagtatcccatttgttctttataacattctctcggttttggcttctggggactccttggtgacaatggagaacagagactccatatcacattttgaggtatatgctgacttagccactctttccacaaatacttcttaaacagtgtctacgggaagtaattttttttttaaccaaccgaacttttaaaaagccacctggaagttggggacagcatgacaccccttcttataatatgtaataattaatgtaaagcacttggaggtccttgttgctgagacacactctgacaaatgtgcaaactatcactatcctttgtgccttgttgaggacctgtcaaaaaattcatctctaataagggatcgccataaagtggaggggtttatttaccagttcactccttcactttagttcactcatctgagtatactttggtttattctcaaggatgcatgtataaatgaccctattctccacggttagcaaaccaaaacctctctaaattgggagaaagaacttgaatgtcgtgtgaaagaaaggaaaaaagagggcttgaaaaggcaaaaagcagtgaaaagcagtagttaaactgtaacccctatctctactcaccagaccacatcccaaccgaatccagctgcacccaccccgtagacctttggggctcctgattgagagtgcagatacagggcacatactcatgcgtggctcccttcactactgggtgtcagtctggcctgtgctcaaggtgtggcatctggttggagtttcaatatgtaggatccactaccagggttttcgtgagattaagaagggtaaggtaacctactggcaaaaggggctggtatgccccaggggttggtttggcacagcaggattaaaacg

SEQ ID NO: 25106 - DNA, 2300 bp, Homo sapien
gcagcaggctttacactgacaccctccgacagcccctggtattaagtggttcccacacaaccaagggggtagtggtacctcccaccactacggccctggttttatgctggcctccaccatcagcgctaagttacttctaacgtctttttggtacctgagtacctgtcatctttaagggagccggtagggaggaaaagccatatttatgcttattggcatcacctgtgttgttccaagcttattagacaggtaagagacagaataacaaagcaaaaagaacaaaggccttgcaatcagacaagtctaggcttgaatcccagctctgctcctctctagctgagtgacctctagtgagttatttaacctctctgagtctcagttccttatatgtacactggggataatatcagtattatttcatagggccgttgtgaaaataaaataatatctgataagcaccttgtgtcatatcttccacttgtatagtgctccaaatatatggtgtctattgttatatatgttgattcagtgtagataacactgcaatgaaatatttctgacagacatccttgggaggggccttcatactgtatttttaacttttcttaaatgctgatataattactgtagccagtatttcctaattgcatcagagaagagggctttgtccaggtcacatgataaaagtctttatagttctaggattttccttattacactattgtgtgagcacaaattaaggacccaagactaaggatattgtctagggattttatgactgagagacatcattatcttttactatgttgcactcataattgacatgctgtaataattgggtattttgtgagacttgataagggaaaaatcagcagtatggaagtagtatttactggaaaaaaaaaacaaaacagaagaacaaacacaaagatcataccactaagaggttggggtggggagggagctggaaacagggactcttgcactggaaacatgaactatgtcctaaacaaaacattaaggaactctgaactttttgacagcagtgcaaaatgcaatcttcatgaatatgtttatggccagcttagtagggatcagcttcaaggtgctgcttagaaacagtgtagagtgtctgaaaaggaagattgaagatatgagaatgtgttaacaggaactctgcttagatggatgaggtgttctgtgctgtcttctgtgaggggcttgcaatcaaattgctgttgaaaagggcatcgagaataccagctaaaataactgaacacttgggaaatccatccctgtttatacaacctgaggaaggcaaggctgagcagcatctggagaacgtgaaggggatactgttgtggtgataccaagcatttgttttgcgctttaatgaattcagacagaatacaggagaacagacttgacattgtaacatgagagagttagattagacagcaaaagtgacgatccacggcaaaagttaagagactgaaatatttattaaatagaattttatgtattttctggctgtatatggagaaaactaaacagttaacttagttccatgttttagtttccagtcagcgtaatggacaagacttctctttttttctttctacagtctctttctatttgattaagatctcctgagactacatttggcctacatttatctcaatcaataccattattgaaaaatggcaaactttccttttaagaatatatatatatttaatcaagctaaaatttgcataacataaaattcaccacttgagccattttggtgacttttattatttcacattgtggcaaaaccattgccactatctagattcagaccattttcatcaccccaaagggaaactacacacccataaagcagtcactacctattcttccctcctcccaggctctgaaaacaaccaatatgctctctgtctctatggatttgccttaggagtatatttcttttggaatcttctgaattctgtatttaatttttccaactagaaactgtagactactgtgtatatgtgtgtgtgtgtgtgtgtgtgtgtgtgtgtgtgtatgagagagaggaagcaagagagcacccccaatgagagccagcattcataagaaacttcgcaaggtcaaatctatttgaaatgttcaaacaaaatgaagacctgggaggatatttatctttcaataggatgtctgtaatttaaagtagatgttgaacttaaacttctcaagagccattcattcatattatagaaatataaaaccgttcttgaaatttgcctgtaacactg

SEQ ID NO: 25107 - DNA, 2300 bp, Homo sapien
acatactgaaaccccatctctactaaaaatacaaaaatcagccgggcatggtggcacacacttgtaatcccaggtacttgggaagctgaggcaggagaatagcttgaatccagaaggcagaggttgcagtgagcagagatcgcaccactgcactccagccagggcaacagagaaagactgtgtctcaaaataacaacaacaacaaagtgaagtgatacttcactttggagctctctttttcctaaacttggattcttaaaatgtttctaagctagcagttttgtaagaacttttttccttaaaaatctggcacatttaaagtattggaaattctgggcttttaaaaatattgggattataccagtgcttatttttctctataaactagtcagaacagaggccctttaattagagatactatagtgggatttattaatacactccagaagtagggaaatatttcatatttacaaagggagacataaagcctgttctaagttacagacacacagacacataaagaggttattgcttctgtcttacaacttcaatctcaggtcaaaagtaaacacaaaaccacaaaaattcaccagttcttctgcttgagcggcctttatgttaaaacaaacaaacaaaaccttactagcccacatctcaaatagctgtcctccttccctctcagtggacacaaaagtaattaattaatttgagctcacaaacaataaacaaaaagacttacaaactcgcttctctgtcacctctcttatttatttatttgaacccctggcctcaagtaatcctcccacctcagccccgagtggttgcgattacaggtttgagccactgcacctatctacctctctaccaatgagactagacgtccatcatccaacagataccaccaaatggttagaccacaaaaccaaactcccaatcattgctgctatcaatgtatcagtaatgtataagttatacctgaataacttatcaggaatgtacaaatcagaaatgaaaacacaatctttaaaaatcaattataaaggaaaaatatataaccacttgggttttctgtaagagcaaataaaaaacatgcctggccttaaacaacccatgatgtatacatttctttcgccagatagtttgattcatcacataaatccagttgggcatctctgtggaaacttaagatttccaataatatagtataattatcaaaaacctaaaatcatgtctctaatgtgaacataaaatatatacatgtcaaacttttattcaactcattggttagtgagggaaccgatgactttaaaaccaatacagaatattagagaagctaggcatatgttaataaagaaatgttaggacagaatgcagggttagatacaaaactgactaatgtgttgcagaacaataaatcataacctgtgttggtatctggtacaacaaaaaattatttgcatctctaccaaaccaaaatctctaccaaagttaacctttgcccctacagaattgtaaaacagcccagtcaatataataaagtcaagtccagagcagcactgaaagagcatccagtaaataaatctcttttgcctatttccaagttttagtcattttttccacagaaatgagatattgcaaatattgcacgggacatagatgcactaaaaaactattaattcatctgaagttcatactgtattttatccggcaaccctaaccacgagttaaccaaaactttaccaagtctgtacagttcttttgccaacacggtatctcttaaatctgttccttagcttcatctttccctagataataaatatcatattaagcgctgtttctattgcacgactattcttcatatttaccactggagggcgcacagaactcgtagtatactagataagaggtcatgaagaaaccacctgagcgtttctgcatctcaaccacaagaggccagtacaggaacctcagattttgcaaccagactgtttactcgctccctaagcagccatgcgcaggcgcgaaactcctccccaggccagacccggcctgcgcatgcgttcaagtgagcgcgcagacgctattggtaagactcgcgggaaaagaaagggtgagcgcggctggaagcgcgcatgcgctgtggctaatgccgtaggctccttcagggctgagccatcccgcgtgtcttgcgctcggtggaaatgcccagccgagggacgcgaccagaggacagctctgtgctgatccccaccgacaattcgaccccacacaaggaggatctaagcagcaaggtgagtgtg

SEQ ID NO: 25108 - DNA, 2300 bp, Homo sapien
ccgagacagccccttctcctcctcagcctactcaacctgaagacaagaataattacgtcttcctctacttactatgtcttgcctctcatccacagtcactctctccacctttttgtctatttactccaacctgacatccacccacattactcaactgttaactgccataccagtgtcactgtgaaatctgtccattaggatcgacaccatttctggatctggccaccctttgattctttaatcacagtagcaaataaattttaggatccggacaaacaggtcagtaacctggcaaaggctttcacatgccccgaatttattccctggaagatgcaatgttcaaccaaaatttagatactgcctacatagctttcatccctcaatctgaaagcagacaacttcaagtgtctgtgtgggcctgagcactaaattgacattgcttatattgggagtagatgaacttaagaggtttgccccacggcctagaattgaatattataacaccaatacagtttaatactgaaaatagctataacttacataatgctatattccaggtgctactctactctatgagatttaaatgtattaatcagtcaaacttttataaggaatttccaggtcatctgctccaccagaatactgagagagacagagagaggatacacatgcatgtgtgtgaaccccaagagggcctgggcatttacaaccttctgctattcaatcccattagctctgggatggagttctgtgttgatcctttaaaaaatgaggcatctctttccgaagatttgagacacatggaacaaaccatttggctacccagggggaaacaatccttgaagtaggagaatgtacatatatggttcatatttcttaagtgcaaacatgcaaatctttgtaaaaaaaaaagccctggaatagtcctcataaatttattaatatttatttccatagtagctaaaataatgacatggttactggaagagaaattctgccccaaacagtcaccaagaacttccaagctgctgcattcagtggaagtttgttctcatctcccctgaccgagcagcagcatccgataaagttggccattcctttttttttttccacacacttctttggcttctgtgaccaattttggttttcctcctgccttcttggctgttctttttgtcttctttgctgacttcactctctctacctgacgtttaaatgttaaatttctcaggtctctaatccttggttctcaactcctcattctgcacgctctcccttggtgatttcaaccccactcctggcttcaattactataaatctgccaaaatttatacatctaacccctactgccattcttagcccagaactgtttatctaaagcatatctcacatctcaatttctctcacaggtacttcaaggtcaattagtacataactgaactcttaatcttgccctgatatcctgttgctcctgacagaaatgtggttctgacttggacacaaccttctttttcaacatatccccaatctgtcaccaacaggcaacctcattatttttcaaatctgtccacagtccctgagccccacctccactgccactactgtaggctaatcctttgggatgaaattcaaaatcattactcagcagcctgcatgatctgtccatcgcgcacctcagcagctcggtttgtgcccacatctctcttgttctctaagcagggttttgcggtttctcaaccatttcaactttgttctcacttcaattctttctctcctgctgttccctgttcctgaaaagctacttgtccagtcctttgcttgggtagctcttttccatcttctaggctcggaggggaaaagggcacttccttaggcagcctttcctagccctgggctaggttagctttcattcgagtgctgtcattccatctaatattggcacactgttaaatatagctgtgagatgatctgttcaactgtaagctccttggggtttcgtgtctgccctgttttctagggtttccagcttgtagctgggtgcctgactcataataggtgttccataaatgcttgttgaatgaaagaatgatgatggaggtggtattccaactcgggactgcctcaacgcccggcgctgtctcctctgctactctgtttcggtgttttagcagaggcagatagtgagggcggcacagtgcccacggcatgccgctggactaagcgctaagcgggcttgggatgatgcgcacgcggggggtctgagccagccaaggggccgggcgccgcctgggggcgctgcg

SEQ ID NO: 25109 - DNA, 2300 bp, Homo sapien
acatctctcttgttctctaagcagggttttgcggtttctcaaccatttcaactttgttctcacttcaattctttctctcctgctgttccctgttcctgaaaagctacttgtccagtcctttgcttgggtagctcttttccatcttctaggctcggaggggaaaagggcacttccttaggcagcctttcctagccctgggctaggttagctttcattcgagtgctgtcattccatctaatattggcacactgttaaatatagctgtgagatgatctgttcaactgtaagctccttggggtttcgtgtctgccctgttttctagggtttccagcttgtagctgggtgcctgactcataataggtgttccataaatgcttgttgaatgaaagaatgatgatggaggtggtattccaactcgggactgcctcaacgcccggcgctgtctcctctgctactctgtttcggtgttttagcagaggcagatagtgagggcggcacagtgcccacggcatgccgctggactaagcgctaagcgggcttgggatgatgcgcacgcggggggtctgagccagccaaggggccgggcgccgcctgggggcgctgcggctgctgcgggacgcaccaggcctagtcgcccgcaggctccgcccgaggagcagcccagccaccccagggcccggaggaccaaccgcttcgacccgcgcccgggcggcggcagtgttggccggcgaggcgaggagggccgggccgccacggtggggcgaaaagccctgaaagttcctctcagttccttccggtgcgcctcccgctcgcccttgcggaggccctgagggcggattcaaggccccgcgagaagccatctgaggcggcgacgactgttctcagccccacgggaacgccgcggacgcagcgtccctctcccggacaagaaaacagccattctagagtaggttcctcccctttccttgttttttcccctttcccgtgcccatggctgacgcgagctgcttttggacgtgggtcccgggcttgactggacagacgtgggttctgtttctgaaaggcgtaaaacctcagacttgtcctgcaacctcctggtctccgtttttgcctctataaagtgggcataacaaggtctgactcactgacctggggtctcaggtgtggcgcccaaaccagcactatcagcatttcctgtaactttactaaaacgcatattttctggccccactacagctcattgaatcagaaactcagtggtgggattcagcgatttgtatttgaacaagccccaggtgattttgatacaagctaaattttgagaaccactatataatagagaccaatcagatgaaataaatcaaaccattatatagtaaagaacctggctcaataaatagtagttgtggttattattatttcaggaatagacaggcattcattggcacagaaattgaaggttaagcaaatgcttctttccttttctttttcttttttttttctttttttgaaacagtgtttttcacacttgttgcccaggccaccgcaacctccgcctcctgggttcagcctcctgtctcaagccccgcgagtagctgagattacaggcatgtacgaccacgtttggctaattttgtatttttagtagagacggagtttctccatgtttgtcaggctgttctcgaactcctgacatcagttgatctgcccgacttggcctcccaaagtgctgggattacacgcatgagccactgcgccccacccttttcttttctttcatgcaggtcagtatagtcttgctttaaaaaactgaaaacaaaataaatatccatatgatttggatatttatcccctccaaatctcatgttaaaatagattccccaatgttggaggtagggcttggtgcgaggtgtttggattatgggggtggatccctcatgaatggcttggtgctttcctggcagagtgaactctacctctgagctcatgaaagatctggttgtttaagagtagacacctcccctttctctctattgttccgtctcttaccatgtgacacactggctccccttccccttccgccatgattgtaagcttggtctcacaagaagctgagcagatgctggtgccatgcttgtacagcctgcagaattgtgagccaaataaacctcttttctttataaattatgcagtctcaggtattcctttatagcaacacaaacagactaacacgaacatatacaaaagaatgcctctccaacaacaaaataggtatgtaacagtagcttctcacagataaa

SEQ ID NO: 25110 - DNA, 2300 bp, Homo sapien
cctcccctttccttgttttttcccctttcccgtgcccatggctgacgcgagctgcttttggacgtgggtcccgggcttgactggacagacgtgggttctgtttctgaaaggcgtaaaacctcagacttgtcctgcaacctcctggtctccgtttttgcctctataaagtgggcataacaaggtctgactcactgacctggggtctcaggtgtggcgcccaaaccagcactatcagcatttcctgtaactttactaaaacgcatattttctggccccactacagctcattgaatcagaaactcagtggtgggattcagcgatttgtatttgaacaagccccaggtgattttgatacaagctaaattttgagaaccactatataatagagaccaatcagatgaaataaatcaaaccattatatagtaaagaacctggctcaataaatagtagttgtggttattattatttcaggaatagacaggcattcattggcacagaaattgaaggttaagcaaatgcttctttccttttctttttcttttttttttctttttttgaaacagtgtttttcacacttgttgcccaggccaccgcaacctccgcctcctgggttcagcctcctgtctcaagccccgcgagtagctgagattacaggcatgtacgaccacgtttggctaattttgtatttttagtagagacggagtttctccatgtttgtcaggctgttctcgaactcctgacatcagttgatctgcccgacttggcctcccaaagtgctgggattacacgcatgagccactgcgccccacccttttcttttctttcatgcaggtcagtatagtcttgctttaaaaaactgaaaacaaaataaatatccatatgatttggatatttatcccctccaaatctcatgttaaaatagattccccaatgttggaggtagggcttggtgcgaggtgtttggattatgggggtggatccctcatgaatggcttggtgctttcctggcagagtgaactctacctctgagctcatgaaagatctggttgtttaagagtagacacctcccctttctctctattgttccgtctcttaccatgtgacacactggctccccttccccttccgccatgattgtaagcttggtctcacaagaagctgagcagatgctggtgccatgcttgtacagcctgcagaattgtgagccaaataaacctcttttctttataaattatgcagtctcaggtattcctttatagcaacacaaacagactaacacgaacatatacaaaagaatgcctctccaacaacaaaataggtatgtaacagtagcttctcacagataaacttaacgtttctttttgacatacatcttcttgtcttttgaattctttgaaaagcagaacatggttaatgataaaggttttataattttaattattttaattcaaatttcagttttcatatactgcagttatttttaatttgaaaactataatggttgaccatgaaaaattaatcttatgtaggtgaaaggtacagatttatttctagacaaatccagtttcattggcatgtcagattttattgataatcttttccttcttattcattgcagaagcttcaaaaaggacacactagatttaattagaaatgttaagattgcccaaaaaaggattacctagatttgagcaagttcaggatgaagacacctacctggaaaatttagcaatacaaagaaatgcatctgctttttttgaaaaatatgatcggagtgaaatacaagagttactaactactgcactagttagctggttgtctgccaaagaggatgtgcgctctcaagtagacctcccatgtggaattatgagtcaaatgaataacgtaggcttctccactgcaatcctactgactcccgtggaccctactgccctcttagactatagagaggtccatcaaatgataagagagttggctattggaatttattgcctaaatcaaatcccttccatcagtttagaagctaattatgatcagagttcttcttgtcaattacctccagcttattatgataccagaattgggcaaattctgatcaatattgactacatgctgaaagcactatggcatggaatatatatgcccaaagaaaaacgagctagattctctgaattgtggcgtgccatcatggacattgatcctgatggaaaacctcaaacaaataaagacattttttcagagtttagttcagcaggtaagagaatttaacacttcttaaattttttttttttttttttgga

SEQ ID NO: 25111 - DNA, 2300 bp, Homo sapien
cattactgggtatatacccaaagcattataaatcatgctgctataaagacacatgcacacataggtttactgtggcactattcacaatagcaaaaacttggaaccaacccaaatgtccatcaatgatagactggattaagaaaatgtggcacagatacaccatggaatactatgcagccataaaaaaggatgagttcatgtcctttgcagggacatggatgacgctggaaaccatcattctgagcaaactatcacaaggacagaaaagcaaacaccacatgttctcactcataggtgggaattgaacaatgagaacacttggacacagggtgggaaacatcacataccagggcctgttctggggtgggaggcagggggagggacagcattaggagaaacacctagtgtacatgacaagttaatgggtgcagcaaaccaacatagcacatgtatacctatgtaacaaacctgcacattgtgcacgtgtaccctagaacttaaagtataataaaaaaataaaatagttctaccccataggattgttttgagaatagcactgtccagaataactttctgaaatgatgaaaatgttcagttgggcatggtggcccatgcctgtaatgccagcactttgggaggccaaggcaggaggatagcttgagcccaggagtttgagaccagtctgggcagcatagtgagaccctgtctttgtctttatctatatctatctatatatctatctgtctgtctatctgtctgtctagctatctatctacacacagacacacacacacacacacacacacacacacacacaaagaaaatgttctatttgaaaatgtccaatatggtagccactaccctaatgtggttattgaactcacgtgagatgctccagaaatattaaatgaataaattaaaatttgattgatcatagatagtcccctgatatgttcctgaaaacctgtacaaaaagctctgtatccaaaaggtgaacttaaagaagtcatgagggatgtttcatttcagacagctaaataaataaggtctttattatatctattatattttctgtcattttgtgcatgtcctataaggtgctttctatttatcattaaattgatgtaagtataacaggcatccacctgaagccagattttctattttctttttttttttttttgagacggagtctcgctctgtcgcccaggccggactgcggactgcagtggcgcaatctcggctcactgcaagctccgcttcccgggttcacgccattctcctgcctcagcctcccgagtagctgggactacaggcgcccgccaccgcgcccggctaattttttgtatttttagtagagacggggtttcaccttgttagccaggatggtctcgatctcctgacctcatgatccacccgcctcggcctcccaaagtgctgggattacaggcgtgagccaccgcgcccggcctattttcactatggctaatttctatctttgagcctattgtaattaatgagactaatgttgcattttactagattcagcactttttgtttttcacatccttgtataaaataaggataaaatataataaaatactcaaataattgcataagcagtgccatgcgaagttgatgcaataaccaaaactgacctgtaccatatggtagcacaaagaatttatttatcaataatctgaagccagaattcagtgtttcaatggtggcttaaggttactaatataaaatgtttgatcatgctctgtgaaaatcaaatgtatgaacaatgagagctgcccataccaaagacaagatggaaggtttcttcatgtagtttcaaatgataattttataaatattttatagaattatttcataattatttatattgcaatgcccataaatattatttaaatattgccatgataaattgactacaaatggttaccaataattcatgctttttaatttttttgctcttgtcattacaggcaccattcctgccttaatcaatctattaaaaagttccaaaataaaactgcagtgcaaaactgttgggttattgagtaatatctcaacccacaaaagtgcagtgcatgctttggtagaagcgggaggcattccatctctaatcaacctactggtttgtgatgagcctgaagtacactctcgctgtgctgtcattctatatgatattgctcaatgtgaaaacaaggatgttattgccaaatatgtaagttcctttcatatacaattatttttgactgacaataactccctcatatagaagttacaaa

SEQ ID NO: 25112 - DNA, 2300 bp, Homo sapien
cttttgaaacttcagagaagaacctatagaaacctaggacatttctaaaatgtgaatggatacaggtttgactttagctgtgtggcaaaaatgtttttacctttttagctttgtagagaattataagatatttttcattatttttatatttcattttatgtttttaacttatttacagtatttgagaacagcaaaactgtttctttcaaaaatatctcaaaatttagatttcttattaatgagactagctttcattatcctgacttgaggtcccagtatatttgtaagtatttaagaatcatcaccacatatgatgaattaaatatttgatatttataccatcagaattctaagcaaatagtctgcagaactagtgatggatcatgaagcaaataaataatacgatttgtctgcttatgatgtagatgtcctcttggagtagacatatcaaaagaagttggagaagcttccataaaagtaccacaattaaaaatggagatatgatttctgctgttcaaaaaagtccctaaaggtagtattaaggttaaaattaagtttttattgttttgtgtatcaaattgtagaagatatataatattaattattcatcaagattttatttttttttttctatttgatgttttacctgctcttctgagatactataatgtgttaaaagtcttacaagggaagatagtttttttcttttaattattaaaaaccaaaataaaacatcttttgagaaaggaatgtattgatgctggcaggtagaaaggaagctttgaaagaagcacagtaattttgctgaattctggccctgtatcatacaggcctaggactttcccccacttcctcaaatcaggataggagaagctattttttaactcctactgaaacaagaacctgactttataatgagagagcagtttaatttttttttatcattattattttttggagataatctccctctgtcacccaggctggattgcagtggcgtgatctcagcttactgcatgcaacctctaccttctgggttcaagcgattctcctgcttcagcctcctgagtagctgggactacaggagcccaccaccacgtctggctaattttttgtttttttagtagagatggggtttcaccatgttgcccagggtggtcttgaactcctgagctcaggcaatctgcctgcctcagcctcccaaaatgctgggattacagatgtgctcaagagagcaattttagatcagtcatgtcaaagcagacatttccaaatcaagacaaaagctgactttctctaacataatatgttattaattttaagagttcgttattaggtatcatctctggagtaaataggatgtctatgcattttttaaaatctatataatttgaggttttacaattttaacatataagtaatccctcaagtatgtattgtacgctttagttgtccacatactttcacatcagttatttgagaaattgtatataatcagatggaaataaatgagggagtttttttggatttttttttaatccaaactttgtactgcaaatattataagcttatcactgtttttctgccttgattaaagtaactaaatgtacaattctttgaatgtaaccctctatatctggaggcctttctcatacataattttttatttcgatttttatagacagcatcttgctatgttgcccaggctggagtagaactcctaggctcatgtaatcctccaacttcagcctccagggcctgacttttcacacattgtttaaaaaaaaaaaaaccgtggagtaataaaaataatctttttttttttttttttttttttagacagagtctcgctctgttgtccagactggagtgcaatggctcgatctcggctcactgcaacctccgtctgccaggttcaagcaattctcctgtctcagcctcccgagtagctgggactacaggcaagcaccaccatgcccagctcattttttgtatttttagtagagatggggtttcaccatgctggctaggctggtctcgaactcctgaccatgtgatccacccgccttggcctcccaaagtgctgggattacaggtgtgagccatcatgcccagccaataaaaataatctttataggggagatttataggagaagtagtataaattttaggagtggtaggatggtctggctaggccaagatactcaggaaatatctggcattgaatgcaaagaaactctgataacctgaaaatagtcctaaagtatagtcttgagcctacctgaaaccagtttcagagc

SEQ ID NO: 25113 - DNA, 2300 bp, Homo sapien
cccagagcttcacaacgtgcaaagtgcaggtatatatgccagccctgtacaacagtggattctaaggtccttgcttactaaaatcttaaataccagcaggggaaaagcctgactcttggaataaatctgtccaatgttcaaaacaaagttcacaaaccaataaaagaaaaaaaaaaaaaaaagcaggtgcaagactttgaaaacataccatgctgaatttcatgtacatagtaaggaaggacaacataatgcattatgaaaataggatggtttaaggcaactgaatatttaccacagccttttttttttttttttttttttttttgagacagagtctcgctctgtagctcaggctggagtgcagtggcgcgatctcggctcactgctacctccgcctcccgggtcccagttcaagcagttctcctgcctcagtctcccgattttttttttttttaattgtaaaaataagccagcccctttcttcctagtgaagtgggagaaacggtttacactgtccgatgagaaacacttccgttctttggtaaccctgctagggggcgccgctagattccatcctatttctccgatgaaagtatcaggtacctcacccctaagtttagatttgatgatagttcccttaaaaatgaatgacgaataatctaccccatccttttctcacagtagcaaccaaattccagccaagggcaaaaaaaaaatttctttttaatgtagcttagtgtttggaacttgatgttgtgtagtcagacaaacctgtattcggcctccgctggatcagtcactagctgtgtaattttacagaactctcatcacctgcaaatctgggggaaatgcaggtgcgcacagagagcgttttgggcaaagacggcctttaagcttttcttcactaagcatgccgctcgctagcggaacagcagccagctctggacgggaccttgcacagttccgatgacatcacttccgggcgccaggttcgggctttctcctgcagcgataagggcagtcgacagtctttagtagggaaaggagacaagtgctagctactgccgcccaagtggaaggtgggtgaaattgctcactcttcaccccactgacgcttttgcgcacctggaaaagcggttccagtttgcgcccgtcgccgccttacagccgacaggagaccagcgctacccaagtcacgtgggttcagcctgcagctttcttggcccgaaagggtagtgcttcgtacaatcctccttgtccagattttgttaatgcaaatctaattcctctaggttgtgtctgtctgggctgcactgcccgcaactgccttctgcaaataggtcgctcatctctaatccctgggatgccgtgtccctttagtgtggtggagaaaggccctgctttaacacccagaaagttttagaacggatgatctgggggcataaaattaggtgcttcgcagtgtgaaaatactagtgtgctttagtgatgggctgctattattttgggggaaaaggatttgggaagatccttgttatgacaaaacctgtagcaaaaagtggagatttaattccaaagattgcaattaaggataaaataggtgttaggttgcagttggcgtgtgtgtgtttatgttaactcttgtttttgaaccaaatgatccagttttattttgaaagatgtttttaggagatggaatacattaacagtatttttatctgttccatctgcctttgttgtttgattctttttagaaaatccacattttgtcttaattttagctgtcaaaaaataaatagcacttttcagaggactctatcaattattgtactttatattagctgtcttaatagtaagtcttttggtaggaacagcatgcaagtaataataatactaaaaaattttatatctgacccctgttttcccccttggagaacattatattcattcataatattatttatattcccatgttgctatagcctttacaaacttttggtgacttttacaaactttcctgtaattctgtaaaactatatattgaaaaataagctggctaatgtcagttgcaaataataagttgtttctgtaattctttttcaggaattatctatagagtaagtatgctaatcttgactaagactgcaggagttttttttaaaccatcaaaaaggaaagtttatgaatttttaagaagttttaattttcatcctggaacactatttcttcataaaatagtattgggaattgaaactagttgtgatgatacagcagctgctgtggtggatgaaactggaaat

SEQ ID NO: 25114 - DNA, 2300 bp, Homo sapien
tccataattctgtactgcattttgtcttctgcctgtagactcagattcttgagaacagagaatggaccttatctgtatccttatactaataaagttcctagcataaaggaaataacccaataaatatgtaacaaatgaaaataaaacctaacctagtaggacataattaggaaataaatattgaaaaataggatttgggccaggcgtggtggctcatgcctgtaatcccagcactttgggaagctgaggcaggtggatcacgaggtcaggagttcaaaaccagcctggccaacatagtgaaatgtcatctctactaaaaatacaaaaattaactgggaatggtggcaggcacctgtagtcccagctactcggaaggctgaggcaggagaatcgcttgaaccccggaggtggaggttgtagtgagctgagatggcaccactgcactccagcctggcaacagagtgagactccatctaaaaaaaaaaagaaagattcttatatgttttaatatataatatgtattaataataaaattttcctctgaaggctacaaatggaaagctagacacacaatatctgagaccaaataagcatatctagattcagctggaactctcgatttatgttgaacttacataggccatattttttgagaatgcccatgagtggcattctaactatctgcataaaagtacagacaggcctcagagagcatacatgcctttcccccaataaccctctcctatgttacaatagagaacataaaaaatgtatatctttgctaaatacatgggacttgtataagtgccactttacatatattcggtcaagggaaagataaaattccatactaatgtgccctagagttctcctgtttcacataataacagcattcggactcaacactggccaagagtgcctagacgaggaatctaccaatgatagcacacacaataggatcttgcttgtcttgacagcacagaagagcattgggatatacttgctgaacataattggaattgtaagaaaaataatacctgatgtgaaaggttttatgttcaaactggattccagtgtataacagaaataagctctgacctctctaaccgtatgactaatttttcttaacttttaggttttaatttttcttttttcccttgtttaggccaacagtgcaccctagagaaaatgtgagttattttctcttctagcagttaagaaaacagactccagtgccagatgtcctgacttctaatcctagctttgcttttcctagttgtgtgacctccaaagcacccaaactctgtggcccagttgcctgtaaaatgaggacagaaactatttcatgggattttgaaagaaattaatctacagcaggtgcctggtacatagtgccactttatcattattgttacacataaatgaaatttttgaaaaacataagttccaaataaaaaacctcaaccatattctggtaattatttacttatttatctgtatccacctctagactgtactctgtggcttcccaacatgttgttatgggatttactcatcttttatacccagagcttcacaacgtgcaaagtgcaggtatatatgccagccctgtacaacagtggattctaaggtccttgcttactaaaatcttaaataccagcaggggaaaagcctgactcttggaataaatctgtccaatgttcaaaacaaagttcacaaaccaataaaagaaaaaaaaaaaaaaaagcaggtgcaagactttgaaaacataccatgctgaatttcatgtacatagtaaggaaggacaacataatgcattatgaaaataggatggtttaaggcaactgaatatttaccacagccttttttttttttttttttttttttttgagacagagtctcgctctgtagctcaggctggagtgcagtggcgcgatctcggctcactgctacctccgcctcccgggtcccagttcaagcagttctcctgcctcagtctcccgattttttttttttttaattgtaaaaataagccagcccctttcttcctagtgaagtgggagaaacggtttacactgtccgatgagaaacacttccgttctttggtaaccctgctagggggcgccgctagattccatcctatttctccgatgaaagtatcaggtacctcacccctaagtttagatttgatgatagttcccttaaaaatgaatgacgaataatctaccccatccttttctcacagtagcaaccaaattccagccaagggcaaaaaaaaaatttctttttaatgtagctta

SEQ ID NO: 25115 - DNA, 2300 bp, Homo sapien
atttccagggctgcataatatggtcagtacagtcaatcaaaactttgatactctgtagagctaacacaagagagtaacaagcagcagctaaggcaccataagatcctgaatcacataagatgattaagttcaaaacttaaatactgaaacagtgaagtatacttacactatttagatagataagttaacaaggattgaaactaaaatgatctattttctagattctatacaatgagaaaaaaaaaagtcttacttagaaaaaggaccaatgttgaaataaagcgtgaaagaaaaaagaaaattctatcccagattagaattcttcaaaattaagtcttatatactaaaaactactaaactatacactttaaatgggtggattttattgcatgtgaattatatctcaaaaaagctgttaaaaaaactaagttgtatacaacacaaaaccttaagcttctttaaaaactatgtttaaacacacatgtcataaagtttaccatcttagacactttttttttttttttgagacgaaatctcactctgtcacctaggctggagtacagtggaatgatctcggctcattgcaacctctgcctcccaggttcaagcgattctcctgcctcagcctcccgagtagctgggactacaggcatgcgccaccatgcccggctaatttttgtatttttagtagagatgaggtttcaccatgttggccaggctggtcttgaactcctgaccttgtgatctgcctgccttggcctcccaaagtgctgggactttaaatgtacagttgagtggtattaaaaacattcatattgttgtgcaatcatcaccattaccatccacatccagaactctcttcatcttgcaaaaccaaaaactctgtacccattaagcaataactttccattccttcctccccttaatttccggcaaccactaaacttaaaacttttaagtgtttagtataatgtgaaattcttaccagattatgtataatatttgttaaagtccaagcaacaggaacactgaagaagggaatgctgagtaagacaatatgaagcaagccaactcccaatgcatatgtcagccacataccccggctgttcatgacacgggtatttggattcacttcactgtgggcaactccaacgttcatgtttgctctgtaggaagtaatgaaatgaatcaacactgatacaactggcaacctaacacccccaattctgacatgacaaggtacctgtgttgcgaggattattttttcctagttactttgaagtagcacacaaacaccatccaaaatatgctacttgtagatgctgatgacagcagtaaagaatcttcagcatttgactttagggtaagacaagacttgttattatggttctatttgaaaaaatagttacaatgcctttccaaaagtttgttttctagcatgttgttttactgaataggaaaattcaaactgaaagagaaaacctacattttcttatatcatgagagcaaagtgaaaagccaaaagctaaatttaccaacataataaatttatattaaaaagaaaaagcagaactcaccgagccagtgtgtcaagtagtcagactcttatatttgacttaatgtatccataaagaatggtcagagttcagatcacttctttctgaatactcaatgtggaaggtacatgctgttgacataatgtggtgtaaaatttacatggtcaagggataatgtttgtttctcaattttgtgattaaactaggtgaaaataaggagtcttctgaatatttctctagtcaaatcaaaaacttcagttttctttcttctttttaaaaaaggttttcccttctcctttccattgaagatggactccaaaggaagaattgataatagttctcagttcttttaatgatggtgtttacttgagactaagaattgcttaaaataaaactgtcctgaagaacacctatcatccgacggagggggaaaacgaggctagattatatttggaacagctgtgattttaaaatacacaaacgcttgtattacggagttagcatacagagaggaatttctcataaccccttccagcaaatgtttccggagtataatgctccttccgctctagagacccatagaacaggcatcaagggttaaggggacgaaaagttagttacactaagaccgctaaagcctccaatttatatgtgtaaatctttcgtctaaacacccatgatttatcatacattaaactattatgtcatacttagaacatgccaacactcaagatagttttccca

SEQ ID NO: 25116 - DNA, 2300 bp, Homo sapien
tccagaactctcttcatcttgcaaaaccaaaaactctgtacccattaagcaataactttccattccttcctccccttaatttccggcaaccactaaacttaaaacttttaagtgtttagtataatgtgaaattcttaccagattatgtataatatttgttaaagtccaagcaacaggaacactgaagaagggaatgctgagtaagacaatatgaagcaagccaactcccaatgcatatgtcagccacataccccggctgttcatgacacgggtatttggattcacttcactgtgggcaactccaacgttcatgtttgctctgtaggaagtaatgaaatgaatcaacactgatacaactggcaacctaacacccccaattctgacatgacaaggtacctgtgttgcgaggattattttttcctagttactttgaagtagcacacaaacaccatccaaaatatgctacttgtagatgctgatgacagcagtaaagaatcttcagcatttgactttagggtaagacaagacttgttattatggttctatttgaaaaaatagttacaatgcctttccaaaagtttgttttctagcatgttgttttactgaataggaaaattcaaactgaaagagaaaacctacattttcttatatcatgagagcaaagtgaaaagccaaaagctaaatttaccaacataataaatttatattaaaaagaaaaagcagaactcaccgagccagtgtgtcaagtagtcagactcttatatttgacttaatgtatccataaagaatggtcagagttcagatcacttctttctgaatactcaatgtggaaggtacatgctgttgacataatgtggtgtaaaatttacatggtcaagggataatgtttgtttctcaattttgtgattaaactaggtgaaaataaggagtcttctgaatatttctctagtcaaatcaaaaacttcagttttctttcttctttttaaaaaaggttttcccttctcctttccattgaagatggactccaaaggaagaattgataatagttctcagttcttttaatgatggtgtttacttgagactaagaattgcttaaaataaaactgtcctgaagaacacctatcatccgacggagggggaaaacgaggctagattatatttggaacagctgtgattttaaaatacacaaacgcttgtattacggagttagcatacagagaggaatttctcataaccccttccagcaaatgtttccggagtataatgctccttccgctctagagacccatagaacaggcatcaagggttaaggggacgaaaagttagttacactaagaccgctaaagcctccaatttatatgtgtaaatctttcgtctaaacacccatgatttatcatacattaaactattatgtcatacttagaacatgccaacactcaagatagttttcccacgttccacaggatggaggcctgaaatttacatctcagctggaaggcaaagctggtgcggtactcatcctattccaaccagaaaaccttttcccagcaggtttgccgcgctgcccacgactggcaaacaatgaccttacagaccgtgaagaggctgttggctctgccctcgccggtgcctccgaagacggcgacccgcagcggcccctcaggggagtcccccctgctagaccgacagcccgagcgctctgggccagagaaaactcagcaaaagccgccgctgctaccacctcagcgcctcccccaacccgccccttccttctcgcggccgcacgtcacgtcaggaccctggcaagacaacgaggatttgcgtagggggcgagcctctgaggccacttggctcttacggccacgcagggcgccgcagatgcagccggagcccgcttttccctctcaggacgacccctaggccgccagcagttccctaccgacgaaggcgactgtacagcgtccaccgcgttcgtgcccacttacccgccgccccactccgggccgccggctcgcagcaggaccagcccggctgctacggccgcggatacacgccctcaggcccggcgctgcgcagcttgcggaagctttcccggacagactcgctgccagcggattggctgcgagcagcgccaatctcacgttgcccccgggcgaggcgggactcagtgccgcgctctctgcacccgctctgccgcgcgcgtgcgtgctgggtgcgggtgcgggtgcggggttgggcctgcgcatcgggtgagacgctggctgcttgcggctagtggatggtaattgcctgcctcgcgc

SEQ ID NO: 25117 - DNA, 2300 bp, Homo sapien
aacaaagaccaagccagaacaccccggagcccagacctgctcagaaaacgcgttccacgtgtgcgcgcccgcaagcccggcttcgcttcccgccccgcggggagcgcccttagctgccctatagcgttcgcgcccggaccaggacgagtagaggggacggggccctcgagccatcgaggatataataaatacccgttagtcacaccacactaccttcctgctagcgcgaggcaggcaattaccatccactagccgcaagcagccagcgtctcacccgatgcgcaggcccaaccccgcacccgcacccgcacccagcacgcacgcgcgcggcagagcgggtgcagagagcgcggcactgagtcccgcctcgcccgggggcaacgtgagattggcgctgctcgcagccaatccgctggcagcgagtctgtccgggaaagcttccgcaagctgcgcagcgccgggcctgagggcgtgtatccgcggccgtagcagccgggctggtcctgctgcgagccggcggcccggagtggggcggcgggtaagtgggcacgaacgcggtggacgctgtacagtcgccttcgtcggtagggaactgctggcggcctaggggtcgtcctgagagggaaaagcgggctccggctgcatctgcggcgccctgcgtggccgtaagagccaagtggcctcagaggctcgccccctacgcaaatcctcgttgtcttgccagggtcctgacgtgacgtgcggccgcgagaaggaaggggcgggttgggggaggcgctgaggtggtagcagcggcggcttttgctgagttttctctggcccagagcgctcgggctgtcggtctagcaggggggactcccctgaggggccgctgcgggtcgccgtcttcggaggcaccggcgagggcagagccaacagcctcttcacggtctgtaaggtcattgtttgccagtcgtgggcagcgcggcaaacctgctgggaaaaggttttctggttggaataggatgagtaccgcaccagctttgccttccagctgagatgtaaatttcaggcctccatcctgtggaacgtgggaaaactatcttgagtgttggcatgttctaagtatgacataatagtttaatgtatgataaatcatgggtgtttagacgaaagatttacacatataaattggaggctttagcggtcttagtgtaactaacttttcgtccccttaacccttgatgcctgttctatgggtctctagagcggaaggagcattatactccggaaacatttgctggaaggggttatgagaaattcctctctgtatgctaactccgtaatacaagcgtttgtgtattttaaaatcacagctgttccaaatataatctagcctcgttttccccctccgtcggatgataggtgttcttcaggacagttttattttaagcaattcttagtctcaagtaaacaccatcattaaaagaactgagaactattatcaattcttcctttggagtccatcttcaatggaaaggagaagggaaaaccttttttaaaaagaagaaagaaaactgaagtttttgatttgactagagaaatattcagaagactccttattttcacctagtttaatcacaaaattgagaaacaaacattatcccttgaccatgtaaattttacaccacattatgtcaacagcatgtaccttccacattgagtattcagaaagaagtgatctgaactctgaccattctttatggatacattaagtcaaatataagagtctgactacttgacacactggctcggtgagttctgctttttctttttaatataaatttattatgttggtaaatttagcttttggcttttcactttgctctcatgatataagaaaatgtaggttttctctttcagtttgaattttcctattcagtaaaacaacatgctagaaaacaaacttttggaaaggcattgtaactattttttcaaatagaaccataataacaagtcttgtcttaccctaaagtcaaatgctgaagattctttactgctgtcatcagcatctacaagtagcatattttggatggtgtttgtgtgctacttcaaagtaactaggaaaaaataatcctcgcaacacaggtaccttgtcatgtcagaattgggggtgttaggttgccagttgtatcagtgttgattcatttcattacttcctacagagcaaacatgaacgttggagttgcccacagtgaagtgaatccaaatacccgtgtcatgaacagccggggtatgtggctgacatatgcattgggagt

SEQ ID NO: 25118 - DNA, 2300 bp, Homo sapien
tcactttgttgcccaggccagagtgcagcgattttggctcactgcaacctctgcctcccaggttcaagcaattctcctgtcccagccctgcaagtagctgggattacaggagcgcactaccacgcccggctaattttcgtatttttagtagagacagggtttcaccatgttggccaggctggtctcgaactcctgacctcaggtgatccgcccgccttggcctcccaaagtgctgggattacaggtgtgagccaccgtgcccagccaacttgtctctcttaacatggtgacactcactccttcctcagctcacatggttctctctcagctgacttctaatcatccttccagatttagttcagtatcaactcttcaagcctttcttccctgctgcagcctcctttccttcacctgccaacagattaggtattccttcccctgcagtccccctttacctcatttctaattaacctcatcacaagttactctattaatatgtgtttctgtctgttgctcctgactcagagttctttgaggacaggggttttatatcaatcacacatcgctagcatagcccctggaatatagcactctataccatatgtgtaccaaatggaagggtttatatcgggcttacaaatcacagcaaagaatgtctgggaatatcaggatagtcagtcttccatatttgctgggagggaaaaggaacacttctgaagaagtgctgatgacccggaaagtcagttaaggacaacaggtgtgcctaaaaaagaagtaaagatcagagaactcacagacttccattagagagaacacaaagaaatcatttatttaaagatcagactaaatccaaaacaattaggttcacaaagccaacagaaatgcaagatacagacatacacagccaacattctcttaagtcaatttcaaaatgttgaaagctatttcggcaataaaaatcacaaactttctgcactgccaaggtgagggaaattacatttcaaaggcgattccaaaaaaacctaatcaagactttcctcaggatcaatttttggtattcacatttccttagcatgtaatacaggtgcctgtcttcggcgtacggataaacccagaaggccaagagcaaaaatcgtgattaactttaaagagtttaacttgcaccccttgtatgatgccacaggatacaatactataaaccgccactcacacaagatgagttacagttgccatgggttaaatctgctgcctggaaaacaaattttaagtcctccacccagaagggtctggggaatgggacgcaacaaagaccaagccagaacaccccggagcccagacctgctcagaaaacgcgttccacgtgtgcgcgcccgcaagcccggcttcgcttcccgccccgcggggagcgcccttagctgccctatagcgttcgcgcccggaccaggacgagtagaggggacggggccctcgagccatcgaggatataataaatacccgttagtcacaccacactaccttcctgctagcgcgaggcaggcaattaccatccactagccgcaagcagccagcgtctcacccgatgcgcaggcccaaccccgcacccgcacccgcacccagcacgcacgcgcgcggcagagcgggtgcagagagcgcggcactgagtcccgcctcgcccgggggcaacgtgagattggcgctgctcgcagccaatccgctggcagcgagtctgtccgggaaagcttccgcaagctgcgcagcgccgggcctgagggcgtgtatccgcggccgtagcagccgggctggtcctgctgcgagccggcggcccggagtggggcggcgggtaagtgggcacgaacgcggtggacgctgtacagtcgccttcgtcggtagggaactgctggcggcctaggggtcgtcctgagagggaaaagcgggctccggctgcatctgcggcgccctgcgtggccgtaagagccaagtggcctcagaggctcgccccctacgcaaatcctcgttgtcttgccagggtcctgacgtgacgtgcggccgcgagaaggaaggggcgggttgggggaggcgctgaggtggtagcagcggcggcttttgctgagttttctctggcccagagcgctcgggctgtcggtctagcaggggggactcccctgaggggccgctgcgggtcgccgtcttcggaggcaccggcgagggcagagccaacagcctcttcacggtctgtaaggtcattgtttgccagtcgtgggcagcgcggcaaacctgctgggaaaaggttttctggttgg

SEQ ID NO: 25119 - DNA, 2300 bp, Homo sapien
gccacccagtcatctctctcctactatctaaatgtttcccaaactagtcctctcctctttgtactgcctccattcggcctttctctcctgaactactgcaataaccacctaattgatattttgactcgaatctcaaccacctatagggttctttctgtatttaaatttcatcatgttgctgccccacttaaaatttttataaaggtttccaattgccaaccaggttaagtacaaacttcttaacaactggatttttgcctcctctcccagtcatcccatcgttgcccaaatgtgctctagggcgatcatactgcacagctcgtctttttttattttttattttttgtgacagggtctcactttgttgcccaggccagagtgcagcgattttggctcactgcaacctctgcctcccaggttcaagcaattctcctgtcccagccctgcaagtagctgggattacaggagcgcactaccacgcccggctaattttcgtatttttagtagagacagggtttcaccatgttggccaggctggtctcgaactcctgacctcaggtgatccgcccgccttggcctcccaaagtgctgggattacaggtgtgagccaccgtgcccagccaacttgtctctcttaacatggtgacactcactccttcctcagctcacatggttctctctcagctgacttctaatcatccttccagatttagttcagtatcaactcttcaagcctttcttccctgctgcagcctcctttccttcacctgccaacagattaggtattccttcccctgcagtccccctttacctcatttctaattaacctcatcacaagttactctattaatatgtgtttctgtctgttgctcctgactcagagttctttgaggacaggggttttatatcaatcacacatcgctagcatagcccctggaatatagcactctataccatatgtgtaccaaatggaagggtttatatcgggcttacaaatcacagcaaagaatgtctgggaatatcaggatagtcagtcttccatatttgctgggagggaaaaggaacacttctgaagaagtgctgatgacccggaaagtcagttaaggacaacaggtgtgcctaaaaaagaagtaaagatcagagaactcacagacttccattagagagaacacaaagaaatcatttatttaaagatcagactaaatccaaaacaattaggttcacaaagccaacagaaatgcaagatacagacatacacagccaacattctcttaagtcaatttcaaaatgttgaaagctatttcggcaataaaaatcacaaactttctgcactgccaaggtgagggaaattacatttcaaaggcgattccaaaaaaacctaatcaagactttcctcaggatcaatttttggtattcacatttccttagcatgtaatacaggtgcctgtcttcggcgtacggataaacccagaaggccaagagcaaaaatcgtgattaactttaaagagtttaacttgcaccccttgtatgatgccacaggatacaatactataaaccgccactcacacaagatgagttacagttgccatgggttaaatctgctgcctggaaaacaaattttaagtcctccacccagaagggtctggggaatgggacgcaacaaagaccaagccagaacaccccggagcccagacctgctcagaaaacgcgttccacgtgtgcgcgcccgcaagcccggcttcgcttcccgccccgcggggagcgcccttagctgccctatagcgttcgcgcccggaccaggacgagtagaggggacggggccctcgagccatcgaggatataataaatacccgttagtcacaccacactaccttcctgctagcgcgaggcaggcaattaccatccactagccgcaagcagccagcgtctcacccgatgcgcaggcccaaccccgcacccgcacccgcacccagcacgcacgcgcgcggcagagcgggtgcagagagcgcggcactgagtcccgcctcgcccgggggcaacgtgagattggcgctgctcgcagccaatccgctggcagcgagtctgtccgggaaagcttccgcaagctgcgcagcgccgggcctgagggcgtgtatccgcggccgtagcagccgggctggtcctgctgcgagccggcggcccggagtggggcggcgggtaagtgggcacgaacgcggtggacgctgtacagtcgccttcgtcggtagggaactgctggcggcctaggggtcgtcctgagagggaaaagcgggctccggctg

SEQ ID NO: 25120 - DNA, 2300 bp, Homo sapien
tgctagaagaagaaaaaagcatatggtcaatttgccgtgtttgcctgaaagctttatatttactattttgtgtgaaatgtgttttgtaaccacaccatactttctgttggtactgtttgccttagaactttagttttaaaggtggttagaggaagacaagcaaagaaggctgataagaaatagttaacaagaaaagtcaggaaaatgttgtgtcatagaagttgaaagaagaaattatttcagaaagaataaaatggtcagctgtgtacagtgctgctgagaggtcaaataagatgaagacaaacctgtgaccattggatttgacaacatgaagttattggtgaatttgtcaaaaataatttcattgaagtgatgaagatccccaatatggtgatttgtagagattaggaggtgagggattaaaggcataaactataggtatcccttagaagatttttttaaaggagcagaaaaatggatgatagtgaagaaaggtagagaattatggatagattccattcatccttcctatttttaatatgggcaataaatagcatgtgtatgtgctaatgggaatgtttcaatagagagggagtacttcacaatgtagaacagagaacagagtagacctagaattagtttgagtaaaagagtaagatcatcagaatttgtgtagtatgatcagctggcagtcaggaaggtgtgcagacatatcaccttctcacacataatgaagaactattaatttgttcacctgacattaaacagatattatgaacacctggatatgcaaagtactgactgggttaggctctggggaaagggtgatagttgtctctgtcctcatggaactagcaattcattaaatagagaatttaaaatgaattggtaagtataaagaaagataggggaagtatagggtgctggatgagcacatagcagaaaggttctggaagaggtaacaataaagtagaaatgtgaaggattagtgtgagctagccaggtgaagagggaacaatgaaattggcagaagaaatagcatatacaaaagcccaataataagagaaaccttaaagaagttctgtttggctgaagctcactagataaaagggtaatagcaagaaaggagactgaaaagacaaggatcatatcattgtaacttttgttaaagtgttggcttttgctgtggctggtcattgaaacattttaaacaggaattatatcagattttagaagaaaaacaattctggctactgcttgcagaatacatcaaaggagagccagaaacaaggagaccagttcgaaagctatcagcttaatccataaccaatatgagttgtctaaactagacatgggtatagagagaagtaggtagattcagcagatacagttgatccctgctggtgaattctgtatttgcaattatgcctactcacaaaaatttgcttgtaacccccaaatcagtacttgctgtactttcacagtcatttgtggacatacacagagcagcagaaaaatttgtgttgtccaatgcacatgttcccagctgaggttgaacaagtcaacatcctgccttcttttagttcttatactgtaaacaaatatcttttttacctattacttattgctatgtttttctcatatctgcactttttattggtaattttaaagtttaacctggccctaaccatatttttaaagtactgtctatatagtgttcctcagtgcaagaaggccatgatgtactttatggggcaagtatgtttgttaagataagcttctactgggtgcggtggctcatgcctgtagtcttagcactttgggaggctgaggcggatggattgcctgagctcaggagttcaagaccagcctggacaacacgttgaaaccttgtctctactaaaaatacaaaaaattagccgggtatggcagtgtacgcctatagtcccagctactcaggaggctgaggcaggagaattgctagaacatgggaggcggaggttgcagtgagccaagatcgcaccactgcactccagcctgggcgacagagtgagactccatctctaaaaaaataaataaataggccattttgtgaagagacgaagactgagcggttgcggccgcgttgccgacctccagcagcagtcggcttctctacgcagaacccgggagtaggagactcagaatcgaatctcttctccctccccttcttgttttcggctttgtgagaaaccttaccatcaaacacaatggccagcaacgttaccaacaagacagatcctcgttccatgaactcccgt

SEQ ID NO: 25121 - DNA, 2300 bp, Homo sapien
gctggaacatgtcttgtaacctggctgccttagaaaattttacttgcctcacaggcctagaaagtaggctttgtgactgataattggcagctatgacctgaagcagttctagttcatgtggagcataattttaagcataatctcaaacccttctgcataaaacaaagagcaagcactcaaatgccagttatcaattacttactatatgacaggtgccatattcagcaatttacatgcattattaaattatatccccccaaaaccctatgaggaagctaaagtttagggaagttaagtatctcatccattatcacatagttagaagtggcaaagttgagatttgaactcaggtctatctgactccagagcctgagttctcaattcaactgctatacaattctaagcatattaaaaaaaaagtttgacttacttggaactgtatagatgcatgtgttacaatgatcataacatttgaaagatttacacattgaaaaatgaatttaccaaacaaataaaaccttagaagccagatctaatattgtcccataacaaagagtatctgaaatcctcagggcatctggtttgtgtctggttttccttaatctttaatgatgagcaaatccaatgcattatgtaaggccatttttttctcaagagatgtagatacctcttaagaatttgatgaaaatgcattaacttttcaggctactgagttgcattttagtgcaccgaggcagtaaattagtgtacagtgtgcaaaaatggtagtgactttaaaaataaatatttgatatgagccactgtattctcttggaaaaaaaaagtaatggactaaatctcttaggaatccttagcttcccaaaaaggagtaggaaaaagaaatctcctttggcctagaaatatcttctgtttcttgctggctatgtttgcttagctctttaatagttcatttgactagatcttgtggctcccaaagctaaggttgaacgtttgatccctacagaggccacttaaatttagagaacaaaaagctctattctctgctcccagactttaccccaaatccctgccaggtgtctgccctctggtcaaaatgagaaattggcaaaggggtgcaaacatatcgcagtattgggaaacaacaaaaggtcacccctttatcatgatgctctttctcttttatgtgctcataatattctgatataatttatagagaatagatactgcactttttactctctggatatttactgctggaaatctgaggcaaactgtaataatctctgccatgccagttataaaattcattatcttagtctatgttcagagatttttctactagctggcattaccctcttggtaataaacaatgaaaaacacatcttctgagttatgttaatctgcatctttagaataggaaataatagcactcagtcaaaagttcagtataattttcatattaataaaagacatgaaactatgtaaaaataattccatgcacaatatgttataataacaatgacttccaatatttactaagaatttagtcagaaaacaagtttctcaaattatagatgaaaattctcaactagtatcataatcttaacttttaattcaggtcttcctaatttttattttcctaattacttggcactaaaaataatttaatacaacaaataaaaatattttctacttcaaatacttgcctaaacaatataaaatcattttagtttttgaggaagtaatatttcatattttaaatatgtagtataaattaaaattgacttatttaaattacaataagagttgtgtgaggattagtaagatttaagtacagtttatattattgccaacatagacttttgtttttcaaatgtcacaaatatcttttattatttgtagatttatttcttttatgaagtagtcaaatgaatcagctcacccttgactgtaacaaaatactgcttggtgacttgggacagacagggttttaacctctgacagcgagattcattgtggagcaagagccaatcatagatcctgacgacacttgtctcatctaagttggaatataaaaagccacttggaatacagtataaaagattcactggtgtggcaagttgtctctcagactgtacatgcattaaaattttgcttggcattactcaaaagcaaaagaaaagtaaaaggaagaaacaagaacaagaaaaaagattatattgattttaaaatcatgcaaaaactgcaactctgtgtttatatttacctgtttatgctgattgttgctggtccagtggatc

SEQ ID NO: 25122 - DNA, 2300 bp, Homo sapien
tggacctgagagaggccccacagagaggagagcagagagggccactcacagaagggtggtggtgcggtctccccaccagccccaggcttgtccctcctgctctactctctccagtgcacacccatgagggcagccgggcagatggcagaggccacgggctaggtcctcccttagtcatccctgccagacctgacctgggtctcccccaccagcttggccagccctatgatggcgaaggaagggtcaggctccagcctggcaggagcagcttggctcggtgtgtaggcctcgctccctcatggcccgcttcatctgtagaccaaaggctggtccaatttgttctcaaactgagtgaaagaaattttcaagtttatgggtttctcttctgatggaggccagagactctcacccactttttctttccttctgacctggtaactgggaagtaaaaaacacaaatttctaagtgtctcctctgcctagatcacatcaagaactgacgccatcccctcagtgtggaacccaggggtctcctaaggatgattccagcactaggttgatagaagtttaaagctggggaaggaagagcacaagaaaattacataacttaagtgaagaactaggcctaaaagtggaaccttgcatttgagcataattatttagcatggtgtgcctgaaatatgtagaactgaataatttgttttatgtaagtataatcaatttgtatacattaaaattgatactggctgggtgcggtggctcacacctgtaatcccagcactttgggaagccaaggcggatggatcacctgaggtctggggttcgggatcagcctggcaaacatggtgaaaccctgtctctactaaaaatacaaaaattagcctggcatggtggcaggcgcctgtaatctcagccactcaggagctgaggcaggagaatcgcttgaacctgggaggtgggggttgcagtgagccaagattgcgccattgcactccagcctgggcgacaagagcaagactccatctcaaaaaaaagaaaaaaaaaatgatacttatcagaaaaatcaattaatataggtatacttacattctatgattgtcaggatgtaccaactccaatcccattaatcatactagcatgaagaaaaattacatttctgggccactgggtttgtatataaccttagctaatttaagcctggataaaaataagaatgcttgattcatttaaaatctgagattctgggatagatttttgtgtaacttaaacttctcaactcttctgcaatctaggtttattttttactataatgtaccttcaaagagctaagtctcagtttatagattgttagttttttaagttccactctctttcgttgtactgctgaactctgggcctctgtgtcctcatctgtaatgtggagtcaaaattatcactaaggtcccttcaagcatgaatttcgcattgactaatccgttgtagaacacaaggaaaataatggttcttttgtagttctcttgggacttttactattgctagaaatcatgctgggcagatgcaggcatcacatggactgtgcggggaagtgtaactcaataatggccatgttttgaggcagtggtattcaatgctttaaagagtgagaaaatggcctttagagatactttgtttgaaagagaaacacgcttggaaaatgttcttgagtatttctgtatggaaaagtataaaatggatatgtcctttaaatgtttaagtacttccaacacttttgctctgcatactcatggtgcaaacgaggtgggaagggcggaatccctggcctagctctgcgagagtggggtttcaggtcaaagcaggtctggcagctctgcccggcccaagcgcagaacccttagctgggaaggccgcggccaggctgcggggccccctgcaggcgggctcagtgccccggcccagcacctgttgtcccaaggcaggccccgcgggggagaggccttggagggcagcgccccctctcaccagggcggagctcaggagagttcgcagcccagggggccgagaccaggggcagggccagcgaaatgcctcgctggctcttactttcattgacctctgcgatgcctcgctggcttctgctttcattgacctttgcgggtctgttcccgctgcggcgccggcagctgcttggtagttgcggggggcgtgagggcggtggcccagaccaaccggctggcagcccagctccgctccgcccgcccctgcctcggaccctgcgcctgaggaagtatcgaggcaaccct

SEQ ID NO: 25123 - DNA, 2300 bp, Homo sapien
gcccaataacggtctgttttaggacatagatatttgtctgcttgtgacaactgcctttggttccgtaaattcccacaaggtaagacttggcaggcattaaattttatagtttggggggtgggggtggaggttttagttatgttgactattagtttgattagatatttcctactttccacccctagtactgggccctatccaatagggtttccttttaccccttgtgttaggattaatcctaaccgtatccacccccaatgacggagcctgctcatagcttcctttaggttttccttagagttagctttaagggtttcttaggtgatttatacattccctattcactcttttccctttctttcaggggttcttttaccagtctcttgacccgagtgtaatgtgctcaccccggttcagctgtttatgtggctgttttagtgattaggagcacttgttacggactttcccagcttgggtggagcatgtcttctttccaggttttaattagcaccgagttgccagcctggaagtggtgaactgtgaactcaagaggcagggttcgagttagaagtttttttaacctaagggatgacagggtagaggatatgcccagtgtataatttttaaaaaattggtctttgattttcatagtagaaaggttagtagtcctgcttaaatatggccttaacccaggaggtctttttccagtagtctgtttttttgttttaagacagaatctcgttctgtcgcccaggctggagtgcagtgtgtgatctcaactcactgcaacctccatctcctgggttcaagctattctcctgcctcagcctcccaagtagctgggattacaggcatgtgtcaccacacccagctgatttttgtagttttagtggagacagggtttcaccatgttggccaggctggtcttgaactcttgacctcaggtgatccacctgcctcagtctcagaaagtgttgggattacaggctggagttaggtgaggcacttccccagggtccactgacccctggaggaacttggggaggcaagggactgaccagctggcttcccagggtgcctttggtcgggccctgctgggtctggcactgggccaagagctgctggtttgaagagctaacagcctgtggcacctttcctgaggggcactttcattagcaaaagcatccctggctccaccctcacttcctcattgtttgctttgaagacaccattcctctccctggcaggcggagagctgtactgtttgtattccacaccacccctgctggtgacccagcaactgcaaagggtctctggtttgtcccgctctgggaggggacttagtggcttttcctcctcctcagctgcagggatcctcccccagcccagccaagctctgggaaacagaacttttaaacatcccacctcaaagcgtcttggcagacttctccccagcacgagctctctctacttcagggattgcaaactggcatcctcttttgcctctattgggtttttaagttttttgaactgataaccagcatttaaaaatcccattttagataaaaagaattctggcctctgacaaagcagacagtttggcatcacagctgagcagctgtggcccctttaacagggtgtgccctcttcagttagccacagtccccacacagccctgcagccctccttctcatcatttactggccctgtagtcatttgagtttacaaccctctgatctaacttatatagccccccagaccttctgcagccttactgacagctgcccgtggtggacttacagcctctcagtaaaacaacaacaaaaccttaatggtcatttcatccatttacccttccataatctgaatcctttctgccgccttctgacagccatccataggcaacccactgctcctgatcctaaactgtcctccacatccctttctcatttgcatcgcccggttcccaggctctgtcccgcctcagtggccacactgcaccctttgcttgcacctccttgttgcttgagcctctagaaccttcccccagccctgccaatctctccacatcctctcacctcctcttgtactctttcttccttttacattatttttctccccagtctcaccttctgtgtctctttgatctttgtcttttccagtctctctcttgctcattttcttcttttatttctctttctgtcatcccctgtttcctttttccctcaaactcagtttcttcctctttctctctctgggcatgagctgagccttaactgtgccctggctcccccgtgtct

SEQ ID NO: 25124 - DNA, 2300 bp, Homo sapien
aagctgcagtcagctatgactgtggcactgtactctagcctgggtgatagagtgagaccctgtctcaaaacaaacagtggttctcgagacagaacagtggttgcttctggggcgggggttggggtggggaaggcagtggtaggcagagaatgtctgggaaatcgtgagaggaaactttttggggtgatgacaatggtttatatctaaggaattttggttacacaagtgtatacatttgtcaaactcagtgaatgtacacttaagatttgtgcattttgttgtatgtaaattttgtctcaaaagggaaaatatgtaaacaaatatttaactctaggtagtaagacacatgccatattttgggagaagtaaaacgatgcttgtaattaactttgaaatgcatttaaaaataaggtatttgggataaggaataaagcaagataaaatgtaaatctaggtagaatctatgtggtgagcacataggcgtttgctttaaatttttataattttgctatatgtttgaaaatcttcaaaatagaatgttaagataattttctttaaaggactgaggtttctagagcgggaagccagaagacgatagcatcattagaagaaatagagaatttaggaataggaaggacagcttggtggaaggtgtggcataactgacaggtcttgatacctacgaagtcctaagtaatttatgcacatatttctatatttcaatggatcttcacaaacacctctaatcatcagcacatccattttcagatgagaaaatggaggttctgaaaagctatataatttgttcaaggtcattaaactattagtgtgctaggggtaggactgattacataatttgcaggcctagtgtaaaatgaaaatttgtgtttccttgttcaaaaattattaatagcacagcattaaaacaagcacagggcccttctaacgatgaggccttgtgagactcaggtttcacacacatgaagctagggcggcaaggaagatttgaatctcagtctgactaacaggaaagcccatgctttttccagtaaaccatgctaggtcagatgaatggttcatttctgtgcgcagtgaatgaggcatgatggtgatgtcagatggtgatgtcctgtagccagttaaaaaccaaattgcaggtaaggagttccttctgtgatgtctgttgtctgtcctcttctcagtgggcatttggttattacatttgacctaggttagcaacgtaatttttgatcaaagtctcaacagtgtatctctttaaatatcaaggtactaagaataactcctttcatgtgtcctctctgaaatttgtcaccggatttcttctttctgataaatgtgtcaatacttaatagtggcgatgaaatgtcttctgctacacatctgggtggatctggaagcggaggaacgttttcctcaatttaacagtggatcctagtagttgagttaaatgttggtttcatttaagagtaagctactttctgaatgtaattatgcttccactgataacagcaacttttactttagttgggaagacatatctattatgtcttaatcagacaactcttgtgtgtctttgaggaagagtgggagatctgtaacttttcccaagaaaaatgaaaatgtctcaatcctaatattaaaggaattcggctgtattgggttaggaatgaataaactacatcgatgtcctttatcaactgtaattcctctacttgagtctcaaagaatactaagtttacgttttaataaaaaattactaaaattccagaaaagtctttcacatcagtccctgctggtcaaattggcaggccaagcctagacaacaggttgcgctttgggctaagacagcctctagagggcaatctcctttcctgcgaatccgccctagtccgttctatcctccctcttcccgctccgcctcagctcgctctccgccttctccctggcccggtccccgatcccttcctctccctcaactatttcctccaggcgtcgttcttgccccgcccttccccgtcgcgtagcggaaacggtcgctctggcttcctggaggacttgtcatctgtgcccggcggcgcaggacggcggtgggcggggctcacgcgaggcgctggaacggtccgggagattctcgctctgctgctttagcttcggagtgtttggcgatggggcagcgcgagatgtggaggctcatgtcgaggtgagtgagagagcgaggggccaagggcaggctcttcagcggcactcgccacagtgggaaaagggccgggggtggagac

SEQ ID NO: 25125 - DNA, 2300 bp, Homo sapien
tcacttaaactctttaagtcttagttttcttgtttataaaatggagataacagtaacatttaccatagggttgatgtaagaattaacagttataaatcacagaaagtacttagcacagtgtcattagctattattatagcagcaagagaatactctcccaggcaaaagcaataacatgtataaaggtgcaaatgtatgaaatctgtttgcatattcagggaactagatgtggtgtagtaaaatgaggtgtaatattcaaggggcagagttgacagatgcgaggggtgatgggtcttgaatgagttgttcaggaacttgctcttgatattatcagagattgggagccaatgaaagcttttaagcaagcaagaaaccctgcagatgtgtggtagcaaagtggaaaatggactagattccgccaggtgcagtggctcacgcctggaatcctagcactttgggaggctgagctgggcggatcccctgaggtcaggagttcgagaccagcctggccaacatggtgaaacctcgtctctactaaaaatacaaaattagctgggcatagtggcagtcacttgtaatcccagttactagggaggctgaggtgggagaatcgcttgaacgaaggaggcagaggttgcagtgagccaagatcatgccactgcactccagcctgggcgacagagtgagactctatcttaaaaataaaaaaaaaagaaaagaaaagaaaagaaaaatggactagatttatatcccttgctccaccctgtcttccccaaatttaaattcctgcttcctagaggcaaattctttcaccttctatgtctctggtatttatctccttacttttaagaatcatgtttaaattgtttcttgattttgccatcatagatatgattatgaggctaattaaacagtaatcctaaccgctctgagaatggacctaagaaatgaatgtgagaaagaaagtagaagcagcccacttgctagtgagtgaaagccagggaagggtggggggatgcggggagaaattgtctcaagttggagaacccaggtgcaggctgggagcagtaccatgaattccattcaagaagccaaacgttttaagcaccatttcctggagtttgccaagttgagtattgacccagcctcctgtcttgttggttcctcactgctgaagaagaccaagtgttgacaactcagtgaggcagtctcagctggagtggaaaaatgtagctaagaaaacgtgccagacaaagctttaagcagagcttcccaactggatgccgtgaaacgaatgacagggatgcagatacagcatgggtcttcccagccctccaagtgcaagggcttctgcaggaagccttctgcaggagcagcctcttctgtttacccccattttgacccttgtaatatcatcctttcctacctgtgccaagaagtgaaaaggtgtgtgaagcgccgctttagaaggcccagtacattcacaaacatcagcttctgggcgaggctgcttggcctcttctattcaaaactttgtgttgcccttttaaggtttctattccccccacccccaccccgcccaccaacacccattcctacctaggttcaacccaaaccatccttaaggtacactgagtatcacagcaccaaaggctggagagagataagttccccacccttgatgcgcttcctgtccaggtggcccgaggcccactccttaagaggcaaggcccagagacactgctgtgtcttgaggaacatccagtacacctgacatttccattagaacagtgggacccggataccactggcaggaagtccatcttcacagctgccaacccatctgtcaaacccgcagtcccctatgagagtacagatgaatggaggaggaagatttaaaagtgaattcgtgggcggcgacaaggaaacagcagccgtggccaagctgaccccagagcccttcccttcctggccctccctctgaatcatcgcgctccacttgtgacgtcgcggacgcccggctcgggcaggcgtggggggcccgcgcgtcccgggagccccgaggcggcagcgcgcgtttccacgccgcggtcccgcgggaaagccgggggcggcggcctggctgaggccaagctcggatccggtgccgagccaagcggggccgtgcgtcgccggggcttcgccttcgctcgcgtgacctccgccgtcctccccaaccctcgtcctctggccgcgcctgcggccgcacgcccagcgcccctcgcctaacctcgcgcccgggccgcgcctcctcctcctcc

SEQ ID NO: 25126 - DNA, 2300 bp, Homo sapien
ataatcttaaggagagaacatattttttagcaaaattgtttaagatcaactattacaaattacatcttactcccattgcatctatgtcttcagagttgtactaattctcagcctcccagagtccattaagggaatttttttttttttttttttttttttgagacagagtcttgctctgtcacccaggctggagtgcagtggcgtaatctcggctcactgcaacctccgcctcccaggttcaagtgattctgttcctcagtctcccgagtagctgagactacaggcgtggagcaccacgtctggctaatttttgtatttttttttagtagagattcaccatgttggccaggctggttttgaactcctgacctcaggtgatccatgcgccttggcctcccaaagtgctgggattacaggcatgagccactgcgcccagtcccggctaatttttatatttttagtagagatggggtttcaccatgttagccaggctggtcctgaactcctgacctcaagtgatccgcctgcctcggccttccaaaatgctgggattacaggcgtgagccaccatacctggcctattaagggaatttcttttaatgaaggaaactgtattatgataataaatagcctgggcttgtgtgcaggagcaatgccaagccttgcagtttagccttctgtaaccctgaagaagttacttaaccttgctatacttcagcttaactataaaacagggttgataatacaataattctcatgagataggaatttttcaagcttttccagtaagaggtagctattattaaaaatgagaactgtttctctcctaattgcaggaaagccccaacagatataatcaaggtatgatagcataacactcttagaagccagaacttttcaagtctcaacaagttgcatgtttcacctcattattcaaccgtttactgggtaaaggagcagcatagatagtgggacttttttttaacggggtgtgaggaagttggcaatgagatggcttgtgctactagcctaagaatgacctcagggccttgcaggacacacagtgcttgctggtctgaggctgggcgcagtggctcacacctgtagtcccagcactttgggaggccgaggtaggaggatcacttgagcgcaagagtttgagattagcctggtcaacatggtaaaactccatctccacaaaaaatacaaaaattagcctggcgtggtggcatgcatctgtagtcccagctactcaggaggctgaggtgggaaaatgacttgagcccaggaggtcaaggctgcaatgagctgtgttcacaccactgcactccagcctgggtgacagagtgagaccctgtctcaaaaacaaaaacagcaaaaaaggtgctagctggtctggtacttagtactttagaaaagttgccctggataacacggtgaaaccctgtctctactaaaaatacaaaaaattagccaggcatggtggtgggcgcctgtagtcccacctactcgggaggctgaggcaggaggatggcgtgaacccgggaggtggagcttgcagtgagcggagatcgcacagctgcactctagcctgggtgacacagtgagactccgtctcaaaaaaaaaaaaaaaagaaagaaaaaagaaagttgccctggaactgacagcataagtcctcatccatttcttctcccttcttcccacagggtgaaagaaagcactacttcaatattgctgctaagcatatgatcattctaaggtcattacaagaatttgacttgcctttagcattgtgcttgtgtgtccatctgcctgtctctctagggatttagattttcattcaaagatttttctgtcactgagaatttaattcttggtatatttttgagagtgtaaattttttttcaagatttaaaacaataagcttcaaatgttagattgtatctagagtcttccacactgaggatgtgaatatgatatagactagctgttcaccaggctgaccaggttgactgccaaatgggttgttagtagtgccagaggcaccctgacatcactctctgaactgctttctctttcacattcttgtatttttccagctgacggcccagagggtgggtgccaattccaccagcagctgcaactgaaaagcaaggttcagaaatgtcagatatcctccgggagctgctctgtgtctctgagaaggctgctaacattgcccgggcgtgcagacagcaggaagccctcttccagctgctgatcgaagaaaagaaagagggagaaaagaacaagaagtttg

SEQ ID NO: 25127 - DNA, 2300 bp, Homo sapien
gtggatggctgtttgggaccccagagtctgggaacccagaagcaagagtgaatgaggggccgggtgcagtggctcacacctgtaatcccagtactttgggaggctgaagtggggggatcatttgaggtcaggagtttgagaccagcttggccaacacggtgagaccccatctctactaaaaatacaaaaattagccagacatggtggcacatgcctgtaatcccagctattcaggaggctgaggtaggagaatcacttgaacccgggaggcagaggttgcagtgagctgagatcacgccactgcaatccggcctgggcgacagagtgagactccatcttaaaaaaaaaaaacgagtaggggaagaacagaaggtaaagaaacattgacgtggcacttagtgaggttggggtgcctgtgacacatcccactggacaactggccataaggatctggccctcaggagaaaagctgaccccgagagagggcttttggagcaccctcaaatattctgtgattgaagccaaggagtgagagaattcgcagaaacaaacagaatcagaagaaaggaaagcctagaacaaaacccaaggaaaactaaaactcaagtggagcaaaggggagtggccagagaggaagaggaaaacccaagacttgtgggtcacagaaggcagaggaggggagagtttcaaggaggaaaatccaacacttacggagcaccaaaagaagagaagggaagagtttcaaggaggggaccagtgtctcgtgttcctgacaggagaaagaaatgcctggagaaagaaatgattgaatatctacgtcaatattgaaagtggatttagcatgaggctactatagtttaagcttcagagacccttcataagctcaggaaggggccctagaaacttcgtatttgtaattgttttattcttcctaaagagggactcaaaattcagaaacttcagggcctatcaaattcttaccagtatgatttcacggttaagagcttaaagcctggagacaaaagaagcctgctttccctttcgctgtttagtaactttggatgggtcacattaactttcagcctcggctttcctcagttgtaaaatgggaataacgtttcctacacctatagggttataaggctcaaagagtacctacacagtgccccgtacataatcgatgtttataagcgttagctaccattgtcactcttgtcgttgttgccgttagctaccattgtcactcttgtcgttgttgccagaacaagacaataaactccttaagaacaggatgtggcatcccccaaagcccatcacaggcacacagacatacttgccaagtgaatactccactctcccccaactctctgcgtgtttaactagaaatacaactttaattatattcttagtgcgacacacacggttggcttttcagcaagatgccagtagcagcttcctgaaaaagggtgccttcgtctcagtgttcccccttcttggtgagccccgaaactcacagatcgtttgtctcccgcaccccgccggctcctccctcccgggtcaacctgggacagacgcggagataacgcactgacagcattagcattgtgtgtgccacttaaaaggcgctcaaggaataagggatgttagtacattttcccccacatttcctggcccgcactcattgcctgggggctcagcggaagtcgcttgggggtgcgggggggtggagggtgcggtagggatggagcctcgcccagtgctttcgcctcctcagcgtgctccccgggcccggctgggttcaggtgtccctccgggccgccggggcgggctggaggccgggagcgggcagtcgacgcatccgccgccgccgcaggaggcggagcgctgcacctggcggccggtcctcagcgcccggccctgaaacgggtccagccggtagtgaccggcggcggcgactgtgaggccggggccggggaggaggaggagccgcagcgggagagaaggtcgcgccggcgggagcgctgggccctccgcctccgtcctccgtggccccacccggtccgcatccctcgcctcgcctcgccgcgccccgcccagcccgtcgcagccccggaggagcgcgcgagcagcccgggatggtgcgcgctgccccgacagccgccgccccggcgccccgagccgccgccccgtgctccggggacagggctccccgcgccccgcgcagctgagcgctgccgccgccgcagcaggtgagtcgggcccggcttgcggagaaggggctcgcagacccgccctggcct

SEQ ID NO: 25128 - DNA, 2300 bp, Homo sapien
aactgatatttttctctagtaaagaaagtgaaaggaggcagggtgcagtggttcacgcctgtaatcccagcactttgggaggctgaggcaagaggatcacttgagcccaggagttggagaacggcctgggcaacatggcaaaaaccccatctctacaaaaattagttgggcatggtggcacacgtctgtagtcctagctacttaggagactgaggtggaaggattgcttgagactgggaggttgaggctgcagtgccataattacaccactgcactccagcctgggtgacagagtaagaccctgtctctcaaaaaaaaaaaaagaaaaaaaagaaaagaaggtgaaaggaattaacacatatttaatgtatatacttcctaccatcagaatctgttcattggaacaacataattcttgatgcacacaagaccttttgacactttaatcattcaatctttaatagaagaaagggaaattctgatgggatgctggcacagttcctataaatttatataaatgtatattgctaatatcgtatatgaaaaacatttatttattttattttatttatttatttttttgagacggagtctcgctctgttgccaggctggagtgcagtggcgcaatctcagctcactgcaacctccgcctcctgggttcgagcaatttgcctgcctcagcttcccaagtagctgggactacatgcgtgccaccaggcccagctaattcttgtacttttagtagaaacggggtttcaccatgttggccaggatggtctcaatctcctgaactcatgatccgcccccctcagcctcccaaagtgctgggattacaggtgtgagccaccgcgcccggccaaaacactgtttttcaaaaaagtttactggcatcttatctaaaatgtgttatttttcagtttagtgtgtcttagagcagggttccccaacccctggaccatggaccgctaccactctgtggcctgttaggaattgggctgcacagcaagagcgggccagcaagcattatcacatgagctcttcctcctgtcagatcagcagaggtattagatttgcataggagcatgaacgctattgtgaactgtgcatgcgagggatgtaggttgtgtgctccttatgagaacctaagaattaccctgatgatctgaagtggagcagttcatcccaaaaccaacccccctctccatctgaggaaaaattatcttccatgaaaccagtccctggtgccaaaatggttggggactaccatcgtagagagcatgtgtcctgaagccataatgtcagggttcaaatcctggcactgcctcttattagttaaacctgccatgcctcattcttctcatctgtaaaatggacaagataatagggctattgtgatgaatatgaatgaatacatgtaaagatcttttaatcttatctgatacagagtgctaaataagtattatctgctcttttttcttgccattttcttaaactgctatctataaagcacatctggaggactgtacataatatatgcaatgtgaagactccttcattaccagggtatctttgtcatggctccagtgagcactatagttgcaacaatgccatcggcttcctctttctcattacatttgtggttgtggttaagtgcaacctatttttccttagaaacagaatggttttgctacctttattttctaaagaatcctagacttcataatgtagtggatttgtttgaacagtaaaatcaagaaactataaacagtgtttattttcaactctctgtgtttggtttagacataatccctattatttgtacattttccctgggaatcaatgaaaagactgggaatgaatctgagctgtaaacctgccattggaagatgtaattagtcagtcagtggccataaagagtattcgatttttttaaaagctatttttccttaccggtattgtgtggctgcaagtgataaatgatgagaattctctcttgcaattattattttagtttgtaactgcttaatttcctgcaagatgaagttctgtgtttacatgttatgattttcattactaagccatcttttaaattttactttacagatcaacagtacaaattctgaagtttgtaaacttgctgatggtggtggtaagccatggcagatgataaagttgctatcttaacggatgatgaagaggaacagaagagaaagtatgtgcttgcagatccctttaatggtatttccagggaaccagaaccaccttcgaatgaaacaccttcctccacagaaacatctgc

SEQ ID NO: 25129 - DNA, 2300 bp, Homo sapien
catgatccgcccccctcagcctcccaaagtgctgggattacaggtgtgagccaccgcgcccggccaaaacactgtttttcaaaaaagtttactggcatcttatctaaaatgtgttatttttcagtttagtgtgtcttagagcagggttccccaacccctggaccatggaccgctaccactctgtggcctgttaggaattgggctgcacagcaagagcgggccagcaagcattatcacatgagctcttcctcctgtcagatcagcagaggtattagatttgcataggagcatgaacgctattgtgaactgtgcatgcgagggatgtaggttgtgtgctccttatgagaacctaagaattaccctgatgatctgaagtggagcagttcatcccaaaaccaacccccctctccatctgaggaaaaattatcttccatgaaaccagtccctggtgccaaaatggttggggactaccatcgtagagagcatgtgtcctgaagccataatgtcagggttcaaatcctggcactgcctcttattagttaaacctgccatgcctcattcttctcatctgtaaaatggacaagataatagggctattgtgatgaatatgaatgaatacatgtaaagatcttttaatcttatctgatacagagtgctaaataagtattatctgctcttttttcttgccattttcttaaactgctatctataaagcacatctggaggactgtacataatatatgcaatgtgaagactccttcattaccagggtatctttgtcatggctccagtgagcactatagttgcaacaatgccatcggcttcctctttctcattacatttgtggttgtggttaagtgcaacctatttttccttagaaacagaatggttttgctacctttattttctaaagaatcctagacttcataatgtagtggatttgtttgaacagtaaaatcaagaaactataaacagtgtttattttcaactctctgtgtttggtttagacataatccctattatttgtacattttccctgggaatcaatgaaaagactgggaatgaatctgagctgtaaacctgccattggaagatgtaattagtcagtcagtggccataaagagtattcgatttttttaaaagctatttttccttaccggtattgtgtggctgcaagtgataaatgatgagaattctctcttgcaattattattttagtttgtaactgcttaatttcctgcaagatgaagttctgtgtttacatgttatgattttcattactaagccatcttttaaattttactttacagatcaacagtacaaattctgaagtttgtaaacttgctgatggtggtggtaagccatggcagatgataaagttgctatcttaacggatgatgaagaggaacagaagagaaagtatgtgcttgcagatccctttaatggtatttccagggaaccagaaccaccttcgaatgaaacaccttcctccacagaaacatctgctattcctgaggaggaaatagactggatagagaaacattgtgttaagataaacaacgatcttctaatttccaaggtcttttattttttcttttactctgcctatggctctctctatccccttttgcctgtgtattacaaacagctgggaatgtctccaagccagagtggactactagtaggtattcgttacttcattgaattctgcagtgcccccttttggggtgtagttgcagaccgctttaaaaaaggcaaaattgtcctcctcttttctcttttgtgttgggttttattcaacctgggcattggatttgtcaaacctgctaccttgagatgtgtaccaaagattcgcccaacaactcaccccaccaatgcaagtcaccagttaactatcctgccaacaaattcttcctttacctctttcctcaccatatcaccaaaaatgcgtgagaaaagaaaccttttggaaacaaggctcaatgtctcagacaccgttactttgccaacagctccaaacatgaacagtgaacccactctgcagccccagacaggtgaaattactaaccgtatgatggacttgactttgaactcaagcacagcaacccctgtctccccaggaagcgtaaccaaggagacaaccactgttattgttaccaccaccaaatctttaccttctgaccaagtcatgcttgtttatgatcaacaagaagttgaagctatattcttggtgatcttggtagttgtcataataggagaatttttcagtgcctcttctgtcacaatcgtagacacggtca

SEQ ID NO: 25130 - DNA, 2300 bp, Homo sapien
tacctgaggtcaggagtttgagaccagcctggccaacatggcaaaacctcgtctctactaaaaatacaaaaattagccaggcatggtggcacattcctgtaatcccagctagtcaggaggctgaggcgggagaattgcttgaacctgggaggcggaggtttcagtgagccgagatcgtgccactgctctctagcctcggcaacagagcgagactctgtctcaaaaaaagaaaaagaattaaggagcgaggccaggtcagtggcaagctgtggctcactgaccaaatctggcctgctgcctgtttttatatggcccgtgaactaagaataatagtttctacatgtttaaatggttgaaaaaaaacacaagaagaataagattttgtgacacatgaaaattattttatgaagtttgcatttcagtgttcataattcagctcttgttggaacatggccatgctcattcatttacatattgcctgtggctgctttcatgctacagcagcagagctgaggagctgcaacagagaccatgtagctcgtgaagcctaaactgtttaatgtgtggtcctttatagaaaagtgtttgctgacccctgagttagggtaaagagaggccacccacagggctggcttagaatttgtaaaaggaggcacaggtttgtttaacttgtgtgttcatgtagtatattttgcattttaatttcctgtggctttttttttccctagcagagggaaactgatgaatctgtagcaagtttgttcaataaaagtttcattaaggcagattgaaacgtacttttctcctccaaacacacaagtacaaagaacataatgtccatagaacaagatgacccagactttttgtaatacttcactgagaatctgctaaatccctctaatatctgttgcctatttcatccacacccttcaactttttcttttttgtcttttcttcatctttcttttccatatgtgagattagtgatagctgggtgtctgagagcatttccctttgttgattcagtgttgggaaaaagggaacagtgtttataggaatgaatttttttttttttttttgagacagggtcttgctctgtttgccaggctggagtgcagtggtgggattatggctcagggcagcctagacctcccaggctcaagcagtcctcctacctcagcctcccaagtagctgggactataggtgtgtgccaccaagcctggctaatttttttttttttttttttggtagagacaggttctcactatgttgcccaggctggtcttgaactcttgggcgcaagtgatcctcctgcctcagcctcccagggtgctcagattacaggcatgagtcaatacactcagtcaggaatgattttaacataaaaagcaagattaggaaaataccactgattatcgtgttggtttatttcttttaccttttacttttcatcaaattggattcagaaaacagagcattaaggttaggaaaattaacagaaaatagaaaacaagggagaaagataaatccctaccattagggtgtattttgtgcagagaagtagccactctttgcttccaaaccagcccatccagttcagaacgagagactgaaaccttatgcttgggtgcaccacttcaggcctttgcttattttctttctacttatacttttggcagcggtaatggtgggggtgagagaatgcaagaggttggtgtatatttattagttttgtaaacatatgataccatgaattttttaaaagatgaacatgtatccattgaactgataggagaaactatttgatttccaaatagtttatagtagttagtgaatgatagttttcaatgaccttcagagtctccttgtgaaactgcttggtatcttgggtattatgagcaaggccacattcgtgtttacatattctcatttttatccttccttcccccattgtagtgaagtggttacaatcccaggcatagttctcctacagccacctggaaggaagccagtaatgtcattactgatggcagtgcgcccagactatcttaaaaaagcatcatctctgctacaaattaagtttcaggaagggtgatgttcacttttatattaacaagcattttgaaaaggctgagggcagatatgttagaagccatcttcttattcctaaattcatgcttaaatgtaattgtccttcagttttcccactcctgagtttggagtctgctggatgatgggtggtttggggaaggaaaaggtaggtaatatttgcatgttttgtacacatattagattgtat

SEQ ID NO: 25131 - DNA, 2300 bp, Homo sapien
tccccaccaaccaagaaattgcctaaatcgtctttaacatgaccatctaactttctctttagtagaacaggatccacagctgcaaaaaccgtgacaattagggagactaagagaaacttccagcagtgatttctgcagttaaagaatttcaggaattaagcagacttattcatttgaaatatcaactcaactactccagacaaaacctgtcactaatactgaagaaaaagatttaactttaattatatgtattccattgcggcattactcatttctataacatgatttcgcaaaaagaaaaaaaaaggttctgtactttattaaagtctttttctttcaatatcatcatcatcatcctatcccttgctgcaacataaagatgtggtttgaagaatttcccatctcaaagaatgccttgtatccccatcagcgaagtaggcacactctgggaggccagccagggtgtgggaatggcctcctataaaacttgatttttatgtgtatgttaaaatgggattctacctgtctttgcagtagttttatattaatgaatgctctctaatcttcaagaacacaatgctaaaattctttaatttttccactttttgcaaagaattgaaatatagatttaaaaaacagacttccaaaatttttttggcaatagcttaagtacatttttcttcttcttctttttttttttttttttttttgagactgagtttcgctcttgttgcccaagctggagtgcaatggcacgatcttggctcactgcaacctccgcctcccgggttcaagctattctcccgcctcagcctcccaagcagctgggatgtcaggcatgcgccaccacgcccggctaattttgtattttttgtagagacgggatttcaccacgttagccaggctggtgtccaactccggacctcaggtgatccgcccgcctcggcctcccacagtgctggcattacaggcgtgagccctggccagcctaagtacatttttgaaggtgctttaatactttggttagcaaagtttatgcaaaccaaaaaattctatattgtgccttgggaactctaatttagcacacaccagcactatactagcgccgtagtttttctacaccatggacacaaaaaacattaaacagtaaaataaaaggcagattttcaggaggttaaaaaggttggaattaaattacccggccagcgcgacagttgtcaaagctgtacttcggactccctggttccattcctccctcctcctcccgtcccaacgccagagcggaggtggggagggggcaagatgggcgaggcagagatgctctcccagccgccggttcttccagcgccgcgcacctgccgccccttcctccatgcggtcgctgcagccttcccgccggacgcctcgcccccccgggcaggggcgcacctggaccacctgcctccccgcctctgccccgagcctgcgggggccaggggagcccggcgcgctgttgttttttttttttttttttttttaaagtcagcctcctagaggatgttggatttggcgggtgtgctctttgaaatactatatcgggaacctcacacataattttttttttttaattgcaaaccttcccagttcactccgcagctggagagcaggccggaggcggcgttccccacccgtctccctctttgtcgtcccctccccgcgcccggagcgggactcgcgggagccgcccactcccggcgcccacttggttcctcccagctgccgtgtgaatgggccgtcctccggattccgcggagggggcggcgggaaggggccgagccccgggcccagcggccgcccccgcccccgcccggcggcggcccacgccgggatctgcgtcactcggccgcgcgtgggcgggagccggagcggcgaatgtagcaagagcggaatctcccaatgtgacagcgcggggtgggggagtggaggcggcggaggcgggcgggggagggggaggagggtgtagcgcgcgcggggaaggcaggggaggggagggcaaggcgcggcgggggaggcgctgccgccgccgccgccgcccgcgcgccgcagcctggaggagccgccgccgccgccgcggccaagcgagcgccgtcggggcgggtgggcgggaagaagcggcgggcccgaggtgggggggagcagagagagcgcgcccaccaccttcccttcccccctcgatgggagcgggggcgtcccggctcctgcagccgccagaggagggagagccgggggccgtcgcttcggagttggggctgagcagtcct

SEQ ID NO: 25132 - DNA, 2300 bp, Homo sapien
agtaatatctatccattctcaccaaaagcagaaagtctggaaactaccagaaaataaaactctagaaactagaaactctagaaaataatctgttactaggttagctttcttatttgttaagtgaactataaagcctttaaacctttaaatatctaaaacaattttcataagaaactcagagaaattaagggagaaactgagaggaaaacagtaactggattgtcagttgctttgtgttgttgagaaaaaagaggcagttaaaattgataactaattgcagctaatatattggacaatattaaagtctgcaagtcattaacaagtcagggttaggcaggggtaatatttgttacctttcctctgaaacttgatgtctctattcctgaatatatcattactttgattcatcaacatttttggacaagtaacattagtaataaaagctatctaagtactttcccattgtcctgcttttttttttttaaataaaaaaggtgactatgttttacacatgatagttttttccatgttcttctggttaaagagcagatagaaaaaaaaaacttaaaacacggcaaggctgtaacatgccaaaggtcacataacctgtaggtacagccagatttcctaattattaatctattgaaatattttacagttcactagattactaaatccggttatcaattaatgatgcacctgacatacacccttctagtttcataaaaatcacctcattaggccgggcgtggtggctcacgcctgtaatcccagcaatttgggaggcccagggggtgcagatccctcgaaaccagcctgggcaacctggcgaaaccccgtctctaccaaaaatacaaaaaaaaaaaaaaaaaaaagcaggtgctggctgaggtgggaggatcaccggggcccctgagttcaaggctgcagtaagccgtgatcgcgccactgcacttcagcctgggcgacagagtgagaccctttctcaaaacgaacacacacaacaacacagtaacaacacaccaacccccaaaacatcttattaaactctgtggatctactccatttaaacctaattgtttcaggaaatagtctaaaaacatttttttgtcctggaatgtaatgtgtatgtagcctcagggaataactcagtttatcaggttcttggctgtttttccacaggtccaaaaggataaatggataaagtgatgctgaaataacttagagaacccgtattccaacgcttctattttaaaacagtgaagcagtttttaaaatagaaaagtatctacagttttgctttcaagcaaatagcgttaacggaatcattgctattcaaaactatttttgaagtatcggtgtacatttaaaaaaaataatttttaaaaaagaaagctgtcgtattctggattccgcaacccccccaccccgcctcgccactcgtcgccctccctccacctccaccctcccatggcttaagtcgcatagctgaaaggattttgctcattttttccaaaacacttcacgtctgggtagtagccaatcatggaaagtttcaagcaaatgttacatttgggagagggatgaagcttgtccggggctgctctcggaggagtcgccagacgccctgacctgggggccagatgcgagctgggatcggctgagttccgacagctcggccagactcagccctgccaaacctgctgacctcactgccctcggctgcgggggatctcgcccatgagtctccccaacagctcgaattcccagagtggaggagcccactgcttcataaatgcgagaacccagagcccctagtacccaactaggctagcctcggagttggcacggcgtgcagaaagtggctactgagcagccgggcctggctcacccgcttcacacgtcagtttgactcctctccccgccccccaccaatcccccgccctactctccgcgcacccagagccgagagaaatttgactgccctaatcgccaatcaaaagagaggtcgaggatttgagccaatcgcagcgggcgaaaggggcgggccgtcggcgagcgctgaaggtctctagccctcccctgcgctttagcctcagtgcggagccttaggcggagcgaagagaaccggtcgcggcaatcctagcgcgcagcagcagcagcagcagcagcagcagcagcagcagcagcagcagcacccgcatccgctgcgggagtccgagccggaaccacacccaagtagctgccctttcctcttctgtcatctcaccgccccaccacagaccgcgttccccgaggaa

SEQ ID NO: 25133 - DNA, 2300 bp, Homo sapien
tgtcagcctgttaatattaccagtgaaggctgttggaacagctttaccagcaccttctgctagagcagaacatttgtaaagtttcactgagtgtataattttgttaattataaatcctttttttttgagatggagttttgctcttgttgcccaggctggagtgcaatggcgcgatcttggctcaccgcaacctccgcctcccaggttcaagcaattctcctgcctcagcctcccgagtagctgggattacaggcatgcaccaccacgcccggctaattttgtatttttagtagagacagggtttctccatgttgaggctggtctcgaactcctgacctcaggtgatctgcctgcctcagcctcccaaagtgctgggattataggcgtgagccaccgtgcctggctaattataaattcttttaaaggtactgattaaaatagttaaatggtagtaggttaataatttaaatttgttcagcagctctcatttttgcatttataacttcttgaaaaatgaggaagtgcatttgatttgttgtagatataaatactggtttaagatcaggaattctatttttctttcctctgagaaaggtgttctttgatgtacatctcttgcaactctgatacttggaagttggattttagaagctatttgaaacattaaaaatattaaaataatggtaatacttttgagattaatattgaaactatctgaaaatgattgcttattgaagtaaatatttcttagctctggggtgtcaatactatataagttatggaaattaggactgtaatttttttaatgttgtaatagggggatccttatgactgaaacaatagtcatttctattaggattttatttttaaactgttaattttatattgaacaaatgagtatatattattctgaattcttattaatagttaaactgtgaaacctggcttttagctttaatttggtttcatctagaacaacttgaattaaaatattgacatttaaaaatttctcatttattacagactaaacaagaaatactgagagtatcttactcttaagatttattatcgttggtattatggcttaacaccgtgtttagcaagtcttcctttgttaattaaatattaattaaatattctattactgcattacagagacttaagaagctcagaatatacaattggctgtaatccatttgcaaaacgttttaaaggctacgttaatatactgattttctggcttaaattctttttagcaaaaagcagaatacagttcaaattattagatttcagaatatcatgctctcccatccacttggtttactatatttttaaaatacttttttaacagtgaaacatttttattctgcattatatttacatatcttacattaaatagcatattgtaatataacatttttggtgactcaaataatataaaattaattattacactacttcatatgaaattttatttcaaattagagattatttttacaagcatatcaacagacatttcatttaagacataaattaatctgactaaacaaagttgatataattaaggaaaatatgttataatgcaaaatgtttaatttttgaatgaaatgctagtaatagttatataagaactaagagatgtatttctgagattacttggtaaataaacaagatctcaaccttggcagtctgaattttgttaaccagatgtcgtcatgctgaatgttaccaactctgattgagtaagaagcttgtttcagatggtcttaatacttaaacctggtggaacgccttgtcttaatttgtgacacaattttaggcacatccagattaatctcttacacgttcaacagcttacaagcaactacttgaaagactgctagaaggaaagataatgtagaaagcataatttatagaatttagttgtataaaatgataaatttatctattatttaaatagtgtcctaattattactgttattaccaagttctgatatttgaaatgtacccagtttattaattatctttttacattctacagatgtgttcagagcaacattgttttgttgacacaagcatttagaagaaagtttgtgattcctgactttatgtcttttacctcacacattgatgagttatatgaaagtgctaaaaagcagtctggaggaaaggtaatgcttttgatgtacatattttcataaccgaatcacttaataaattcagcttaatttgaggtctagagagtaaattgtgtagttgtgttttgctaaagaaaacactttagcttcgcttaagaaatt

SEQ ID NO: 25134 - DNA, 2300 bp, Homo sapien
ggagtgatgaaaagaggggagtgttttagagtcttgagagaacatttgaatggagacctacccaaagggagggggagagggagcctcctgacagcctggggaaagagcatctctagcagccagttgtaggccttgagtgcctgagaccagccagatgttctgaatggagtagagctggaaagggaagagtggtaggaatgatatgtgcagtgtaaccaggaatagagcctttagggtcctgaaagccatggtaaagagtttgattttcctttagatatgatggaaaggcacgggagttccttgatgtttttaaaagatccctatggcagcagaggtgataaggtggtggttcagatgaggcctaaggcaatagtgatagaggtggtgagaagtgataggattccaaacatattttgcaggaaagaggatttattgatgagctagatgtgggctgtgagagaaagaatagaatcaaggactaccccccatggtctgtatggtgaatttgtctgaattagaaaaagctaattctgtctctggccagaagcagaagcacttctcagcaccactgggtaaagaagctcccttcctcccagcacatgtacctgggtgctaggacaccttggtgggaagagcgtgggctggtaacccgtgttggccctgtggccaggcatccttgtgaaggactcaacctgcataagtgaatgcagcagcactggatgactcctgagtttgtggcctgagcaagtgggtgaattgtagtgtcatccccaaactggggagactagaagaggagctgactgtgagtggcagaagacagggcaaagcaaattccattttgggtataagtctgagatgcccattaaaagtcctggaagcaatgtcaagtaggcagatggctatgaactggagccagggtgagaagccggcaggactgttgctgtttttgagtttgaagtgactatcaagtggagctgtaggactggagcttaggagaaagatttagattaaagatggggaagtcagtgtgcccagaggaatagatgaattctttgagggacattatattgaaaaacaagaagattggactgccttgggagtagtatttggcagtggaaagtgggtaatgaatctgcaaagcagcaaacaggaggaagattagggtgatggagcagcatggaaggcaagtcgtgagagggtggagggtgctggggggatctgaaggaatcagggcttaggaagctgctggagctttggagagcgctgtttagaggtaacaatgagtgtgaaggtaattttcagggaattaaaaatatactttcaggaaataagcgctgaagggagaacaatagggtcaagtgttgctttttaaaaataggatgaaattgtgtctgttttaaggtaaactgagagaaccaatgaaagaggaaaagttaaagatgctagaaacaaaggggatcagtgagggaacaagaacagggcatctagaggataagtgtttgaaggaatagataaaaagtagtctcaaaaatgaggaagctttttactttgagcgatgaaaacagtttttatctttttagcaaagttgtagttaggatcttctgtctgtttttaggggtctccactggtattaaaggcctgaagaaagtatggcgggaaccaacaagaaaaaaaaattgtcaagcagtaatgagagaccaggtggaaatatggagaataatctgtaatagccagtcagtattctgtggtccaagagcaaaaagggaattgagaattcagagttgaccccattaaaaaagaaagacattaaggacacctgaaacagtggtttataacccagaaaagtgcatatcaaagtcacctggagactttaaacaaaattatgggctgagcatgttggctcatgcctgtaatcccaacagtttgggaggccaaggcagaaggattgcttaaggcccggagttcaagaccagcctggccaacatagtgagaccccatctctataaaaaacaacaaactctatgcatttacctcctttccctaaaatgtatcggattgaggtgtaggagtaggacaacaagaaatgggagagatgtttatgtatgtttttagaacattctgggtgatgttcttcagttctttgttccacccccattccccattaagaaaactgttctggactctgggcaggaatagaaaaggatggctggaagggaagctaaaggactaagtggaaagttttttgaagtggtatcaacacaaatagtaatagtagtattttgggggtgtgctcagctagt

SEQ ID NO: 25135 - DNA, 2300 bp, Homo sapien
gtaatctacccttcctagagtcaacttttgatatagtttggctgtgtccccacccaaatctcatcttgaatgataactcccacaattcccacctgtcatgggaggaaactggtgggaggtgattaaattatgggggcgagactttcctgcgctgtttttgtgatagtgaatgagtctcgaggatccgatcattttaaaaatgggagtttccctgcacaagctctttgcctgccgccatcaatgaaagatgtgacttgttcctccttgcctcccgccatgattgtgaggcctccccagccatgtggaactgtaagtccattaaacctctttattttgtaaattgcccagtctcaggtctttattagcagcgttaaaaatggattaatacagcttttttcagagaacagtaaaacattgtcttggttcttgggtgagtaagagcagaagggacacttttggtgccgtggcatctcttggcagagaagtctaatttcactgctaacttgctttgtgagggtgcatttgtgacaagaagaacaaatagatgtgcaaagaaaaaaaactcatacacacacatataggcatatccatgggaaattattcagatccttctcctaccccaaagtgcctaattattcaaggcttgactcaaatcccgtctacttgaaggaactaattgattttatgagcatatagtccaaaaagatttagtttgtctggcttcagcaatgcctacctggagaagtgacatttaagctgagatttttaaactaagatctaaaagatgagttagccagcgaagagttgggtgaagcagatgttggctcaaggggttttccaaactcagggtgagaagtccctgagtttggagagtgtggtttatttgaagaactaaatgctgaagtaagcaaagcagagtggcacattatggggttggacaaagagatcgggcaaccagggctttatagtatgtattaagaaactgaattttataagagcaaagaaaagccatggaaggattttcaggttggcaaatgacatgatctgcttttcaattaaaaaaaaaaacactcaaactcttgtatggagaatggattaaaaggtagataagggctgaagtgaggcagccattcgggaatctactgcagaaggaggcagcagaagagatggagcagagtaaatgagacttgggaaatatttaggaggaagaatcaattaagatttgaggatcaggtgttgcgaggtgagggagaaggcaatgtcaactatgaatcctaggtatctgtcatgtgccatttctagaaaaagagcaggtttgaggagaaagatgtttggttctgaacatagtttgtagagctcactgcacatacaagtggagaggcaagtgggagttgtaggtgtgaagcccagaggagaggtgtggacgggataagcatttaagactcctccatctagaaggaaactgaagctgtgggtgaggtcatcacagcacagcgtttaggagaagcccaggtaaagaagctgacgaatgtctggaccctgacaaccttaacatataatggtttgatagtggaggtggaggcaatgtagaaagaatgccagaggcaggaaaaagcaagaaggatgtgttatcatcatgaccaaggaagaaacgtgtttcaagaacaaaggcgtcaactctgccccatgcttccgagctgtcaagtaaagtgagaaaaacagaaaagcgttccctgggtttagcaacacggaggtcagttgctaaagggagcttctagaatgacgacgtcgccaaatctgtcctctgcctggattctcggcgatgaaactactacagagacctccaagtttgggcttctgcaaacacagcacgtccttctgatcgttctctaagatatgtaaacagaacgccagttcccagcgtggcaacacgggactgggctgcagctcacccagccggcggcccccgccggaagccggcggaaataccccagcgcgtgggcggagcagcggcccgcagagggaggcggtggcgcccacggaacagccgcgtctaattggctgagcgcggagccgcccggtgattggtgggggcggaagggggccgggcgccagcgctgccttttctcctgccgggtagtttcgctttcctgcgcagagtctgcggaggggctcggctgcaccggggggatcgcgcctggcagaccccagaccgagcagaggcgacccagcgcgctcgggagaggctgcaccgccgcgcccccgcctagcccttccggatcctgcgcgcagagtgagtg

SEQ ID NO: 25136 - DNA, 2300 bp, Homo sapien
aaataaaaatttcatccagaacagtaatacacaaacattccttgggtttgtcaacaatttttaagggaataatggtatcttgagaacaaaaggtttaaaaactgctgtggaagccgcaaggtaaggccctgaaaaggaggaggagaacaaactctgttttgtacagcaggcactcaacaattgaatatgataatgataaggacatgtaaaaccagtgtgactaacactatgaggcaggaagtgaaaagtgctaaataagtggtctagatgtgcactgtccaacacggcagccactagccatatgtggcttggaatgtggctagtcctaactgacatgccctgtaagtgctaaatatacaccagacttcagagattgagtatgaaataaggaatgcaaagtatcttattgataattttttatattgattatatgccaaaatgttaagattcttgtatatattgggttatttacaatattaaaattaatttcacctgtgcttttttcctttttaatatggctatgagaaaatttacaattacatatgtggcttacattttatttctcttggagagcgctggtttggacaggaagtatgaagaatttggagcagggaaacattgctgtgggttcaggtcatcgggaagtcttcactgagaactataggatttcactaagtaggtaggctcagggaggaatatccagttgaagaaagcctcggtagtgaaatatgaggttaatctgggcagctgaggtgactgcttgggtcacatcatgggctcttataggggagaaaagtttcctggataggttgggaccaaactgtacagaacttaaactgccaagaatttggatttttttcctataggcagtgacagcttctccagaagaaaatcagactttgcttagtagcttatggaatagcctgaaattggcactttcttatgtagggtcagagcagcataagctcctggaaactgcctgctcaacaagcagtggggaccaggcctacctaaccaggaaatttacagtgatatggaaagtgtgactttggattgattgacctatttgggggtgggtggtaagtttaagcacatgataatgtcacctgggagagaagaatccagagggtgtacctgtgtgaaacccgtcagggaagagggaggcaggcctttcaccttggtatattgctctaagcatgtgtataaccaaattgagtgacactttctacctttctttcagtctgtctgtctgtctttatttttgtctttgttttactatttttactttcttaaacatttttattgattttttaatatacggtgggattttactgtgttgcctgggctggtctcaaactcctgggctcaaggagtccttccacttcagcctcccaaagtgctaggattacaggtgtgagccacacgcctggacttctctttattttattgaacccctactgtgaatcaaggggttaagagctaactacaaggagatgaaatgaaaagaccactgaagtgggaagggaaacacctgggctattatcgggctccgtggctaacttattgagtcctcttggtcacctcactgggtctcttcagatatgaaagaggatttagcattagatgggaccaagacttcctccaactctgtgattctagaacaggctgatgtcacaaagggagaagaacgcaccgtagcaaccaggggcaaggctactcaaggagagtaggaggaggctaggtcaggaagggcaagcactggtggcctacccaggacttggcccaaccctctgggtcaggtcaccctcgtcggagtgagcggaccccgctggaattggagcccagtaaggtctatgagtttggtgttttgatcctggctacccatcccttccatcccaggggtggttcaccaggctgagtggagccttatactagggagagaggaagctgaagaactgggctccaggtaagtaactctgcagaggatctcagattgtctaaggaaaccactgaagaaaatgtatgccccgcccctcccctttttcctggcactgctgagccacctgcagttgcgagagccgctgggagggataagagggaagaggacgcccggtgaaggggctccagcctggcagtttctgcgtgttagcatttctagaatagagtgggtgggaactgacccaagtaaagtcccagagactcgaacactgacgcacaggaaagcctcaagtgggaggagaaatgcaaatcccctactgatgatggcgtcagcggctttctcctagggactgtgaggggcg

SEQ ID NO: 25137 - DNA, 2300 bp, Homo sapien
ttcagaaactaccactcattgagttttgatgtggtatcaaagaagaataattatttgaaaaggtcattataatactccccttttccaactacataaatgtgtgagtccatactttcttcaaatatgtcaaccaaaataatactttgcagcagattaaatgcagaaacagatatgagaatccagctgtcttctctcaaaccagacattaaagagatttttaaaatgccactcttctcattacgtttttcatgttggaagatatatttgtttttcttaaaacatgtttaacatggagtgggtttattattgtcattttgaaggaataaatacatattttaattttttctcagatttaagttttaacacagtaaataaaaatttcatccagaacagtaatacacaaacattccttgggtttgtcaacaatttttaagggaataatggtatcttgagaacaaaaggtttaaaaactgctgtggaagccgcaaggtaaggccctgaaaaggaggaggagaacaaactctgttttgtacagcaggcactcaacaattgaatatgataatgataaggacatgtaaaaccagtgtgactaacactatgaggcaggaagtgaaaagtgctaaataagtggtctagatgtgcactgtccaacacggcagccactagccatatgtggcttggaatgtggctagtcctaactgacatgccctgtaagtgctaaatatacaccagacttcagagattgagtatgaaataaggaatgcaaagtatcttattgataattttttatattgattatatgccaaaatgttaagattcttgtatatattgggttatttacaatattaaaattaatttcacctgtgcttttttcctttttaatatggctatgagaaaatttacaattacatatgtggcttacattttatttctcttggagagcgctggtttggacaggaagtatgaagaatttggagcagggaaacattgctgtgggttcaggtcatcgggaagtcttcactgagaactataggatttcactaagtaggtaggctcagggaggaatatccagttgaagaaagcctcggtagtgaaatatgaggttaatctgggcagctgaggtgactgcttgggtcacatcatgggctcttataggggagaaaagtttcctggataggttgggaccaaactgtacagaacttaaactgccaagaatttggatttttttcctataggcagtgacagcttctccagaagaaaatcagactttgcttagtagcttatggaatagcctgaaattggcactttcttatgtagggtcagagcagcataagctcctggaaactgcctgctcaacaagcagtggggaccaggcctacctaaccaggaaatttacagtgatatggaaagtgtgactttggattgattgacctatttgggggtgggtggtaagtttaagcacatgataatgtcacctgggagagaagaatccagagggtgtacctgtgtgaaacccgtcagggaagagggaggcaggcctttcaccttggtatattgctctaagcatgtgtataaccaaattgagtgacactttctacctttctttcagtctgtctgtctgtctttatttttgtctttgttttactatttttactttcttaaacatttttattgattttttaatatacggtgggattttactgtgttgcctgggctggtctcaaactcctgggctcaaggagtccttccacttcagcctcccaaagtgctaggattacaggtgtgagccacacgcctggacttctctttattttattgaacccctactgtgaatcaaggggttaagagctaactacaaggagatgaaatgaaaagaccactgaagtgggaagggaaacacctgggctattatcgggctccgtggctaacttattgagtcctcttggtcacctcactgggtctcttcagatatgaaagaggatttagcattagatgggaccaagacttcctccaactctgtgattctagaacaggctgatgtcacaaagggagaagaacgcaccgtagcaaccaggggcaaggctactcaaggagagtaggaggaggctaggtcaggaagggcaagcactggtggcctacccaggacttggcccaaccctctgggtcaggtcaccctcgtcggagtgagcggaccccgctggaattggagcccagtaaggtctatgagtttggtgttttgatcctggctacccatcccttccatcccaggggtggttcaccaggctgagtggagccttata

SEQ ID NO: 25138 - DNA, 2300 bp, Homo sapien
cagtagaggtcagaagttccatgaactgccaaactgctataagcagtcacttgggaacctaaactcagacaagcaaaatggagaagtgagtctaacacacgtcaccaggtagcaggttcatatgttgcctattgtgaaggctgggatctccagggttttcattatgctaggttatcaaggtctgaggtagtgtgcttgatagtgaagactatagagtcagactatctgggttcaaattccagctctgtcactgttctaggtgtctattgctatgtaacaaccacccagatgacaatcttttattattatcacttacgtttccggggcctgatttggctcagctaggttttctctctaggtctctcaggcagcgtggtcagtgactgtggctggagttctttcaaaagctcgccaactcacatgcttgatataagttgtactggcagtagaccaggtcctcagctggcaccatcagcccaaacacctacacatggccttccctgtggcttgagcttcctcacaatatggcagctgggttccaagggtgagtgtcccaagggagagccaggtgaaaacttcatctccttttatgacctaggtttggaagtcacatagcatcacatctgctgtattctatttgttacaatcaaatcactaagtccagaccatattcaaaaggagggcaattaatatccactctctaatgggagtcttcaaaccaccatagccatgtattccctgaagacctctctgtccttggctttgctggtctgtaaaacaaggataatgagagaaacttacctcagagctttttgtgaggattaaacaaagaacagtccctggtacccagtatgtgttagtttcgcccattatcacaccacttgtacatctgaagtgatgctgatggtgacatcaatgatgagacagttcccagcagatatagtctgtgaaggtcccacctttccaaactctactagtggcatttaacaaatcccagcgcctgtggttcttatgccagtgggaacagttactatatatggtctgaattctttggttcacctcactttagtgacagtttccagatacaggtcagtccatttaaacctggcccatttatggcaatttatttcattataggataaagtagttagaaccatgagtaataattactgtgtctacagtgcttttaacacctcagccaagtaatcctcatctcacccagtgagtaagtttgaatgcgcacccttccctgtgcgaggatgaagaaaccaggacctgggtcaagaggattgttctaaattctccaatgaggcaatagggcttgagtgagaaggtgtgtgtgtgtgtgtagggggggtgtcctgattctctggcccctacatgcctgtataatataccccatcactgatcattactcaggacctgttaatacactctattcaaatacgtatgggtatttgaaatttcttttaaactacctctcatgtatttataacacaaagaattggccagtgtctatttcccacaatgtgagattaagtaatttaaaagatactaaaagtcttgtaaatgaagacacaccacaccactcagtataatttttttctttttctgtgaaactaatattttctgatattctcggcatccaaaaattttcatcttggggaggaggaaaaattgagacttactcccactgtttgccggaatgtgaccccaggctggcttcgagttgtcaaatgttgtatttctcattttatgtcagtgagtctggaagcaaaaaaggtagaaagactgccttccgtgggggccgcgacgatcgcccctccttccctcaagcctcgtcccatccaggctcgccccgggtgcggagggtcgggccgcaaacccgcaaggcgcggaggccgccgcgacgctcaccggggggcgctgtgaagccggcaccgggcggacagaggtgagtcggctcggaggcggtggctcccgttcctgcccgcgcgccgaggggcgaatcccaggcagcgaggtcgccgcccccgcccctcggccggcccctccgccagcgggcgagaggggagtggccgggctcctcccgccgccgctgagcactccgcagctgggtgcgcacgggagcctcaaccgcggcgcgtggaggcagtaccagagcgcgcggcgcgcagtcggccggcagccgcgggacagccttggcagaacagccgcggcgggagccccgcagccccgggctgggcccgcgtcccggagcgccaccggagagcgaggacgacgtggaggcggagtggcgc

SEQ ID NO: 25139 - DNA, 2300 bp, Homo sapien
atggtagttggatatacttttgaaaagccaaccagatttttaacctggtaataccatagtactattcattcttatgattgtccagactcacagctttagaaaacagtctaagcttttattgacttccagacttgctggatttgttggtgttctctttttctctgtaaagtggatcagccgatgccatagatacactaatgctccaagctagagggctaccctgtagtgtgctcttgagtttcttttcccaccagttgagaagaatgcttctccagacctgactgtgttaattcccagacctgcgtgtgcccggtgtacttattatagtttaatacaatgattttaaacatgtgtgccaaaagaattgttgtttctatgaaaattcatttgaattctttggaaatcacctgataagaatgaatttccataaatgactgcagctaatttaggagtggctgagataagtaaaaaatttgggggatcataaaataaaagtatcctcactgatattatcagtcattcatgattggtgggttaagttgtgattatgtaaaactcgataatcgtactggctcaaagcagtaacccatgttcacactgtgtgtccgttgtggatcagatggggactctgctccatttgtccttaaccttactccagaacacagtctgatggggcagtaccttctggaacgttgctggtccctgtggcagaggggacgcctgctgcaaaggtcttattggctatatgcctgaattcagcaaggcgggacgtagagaggggtatggggcatttgtaaagggtaatgaggtctaccgcacttcactttccagggctctttagaacctcactgttctttaaataaattggacttggaggatgatgccttgggatggtttatagaagaaagaccattgagtacaacagtggacatatactcaaagaaaaggctccagcactataacaaaagattgacaataaatgtatatttgtagagcttcatttaaaatgacttgtttaggtatgtatcattttttatgacttccaaatttaactgacttaaaaaaaaataagccaaattgtcaatccttatgcatttggataagagaacctctactttagtcttaaacgctcctgtctctcttccacctctgtcaaattagtttcccaccttttatgatagactcatctgtgatttcccttggcacatctccttttcatttccattagcattatcctaattcttgttcctcaactactagattggggccccagatgaattccttgatatactgtcttgtatagggcctgtatgcagtgagaaaaaggcactctttggggcagacacaatcccacaggagctcaactttattttagtcaccttattctgccgccccccctcctccccagctggcccacttttatgcagtacacaaactgaacaactgcacagagcagtcctcctccctgcatttagtcgctttgccaacaaattcagactgcccatcctctgcttaagcctcctttaaatttgttgtctctattgtgctcaaaatcattttggtggctccctgtcatctgtatgtagtggctgacctcagttttatcttccatgggaccatcaccagtgactctgagccttagttgttgccatcttgatgtgtgacataagtaatgactgtagcacagatgcgctggttaggctatgtaatgcttctctctccccgcccacccattcccaccactctaacacctgtgagctccttaggtctgactcctagtctagccttggcttacctttcatcccagcttcattgttcatcaggctcctataccggccgtcctctgctaccattctgccaggtcaccgtcttctgaatatgttttttattcttgctttaaacttcttttctgcttaatcacatccaactcacctttcatggtcgagtttcacctcttcagctatccttctgtgattctcctgctgtatgatagtagctgtacctctaaacagaaatgttcatctctatattcctccttttgaggtgaatcgcctgccctatatgaacatattatactggttatcttactcttaagtattctttcctcagttagattgcacatgcatgagaagcagtagatgtgtctctcattctttcttctttcattgcctgctaagtactgtttgtataccagtagcatgggtcagagtgggaggttgtcaacagaagagtccagcatgtatccatgatggactctcgatcaactttatatgattaactcatataaaacagccctgtat

SEQ ID NO: 25140 - DNA, 2300 bp, Homo sapien
taaaccatgagaataatggaaaatgtagttgaggaactttaaatgttggtggttgtgttatgtggacagtaagtgccctgtaaaagaacggtattgcaaaggtggaaagatggttgtttctcagttacagtctttaaagggagacagcagaaatcaaccacacagatgaccagacaacctatttggattccttttcattacccagaaagcaaattggagagagttacctccaaccattgaagaagcacctaatgtcccaccatagttctgtgctccatgagattgtttacttcccccttaatgtatttgccagtactccagaaacagacatcttaggacttgagagctttatgtgacctgcatagattcttggtcttcagtggctcctattggttgatgcttttaggttgcgcaaaagccctcaggaatacgttgggcagtgtgctcaaagtggcattccaatttttcacgtattattttcccaatggtgggagatgggactggaatccacctgcaggtctcctgtgagacagttaagattgcctcattatacctgtaggcagagagaccctccaacttggaggaggctcacctgcccactgacagtggcagtagagcaaagacttgagacaaagcaggatgtggagagactggtttccttaccttaactacccagaccagggaatatgttttcttctgccaacataaaatagtcaagcattttctgggtcccagttacggaacattagaacaactaattaggacagcccaatcaatggaaaacagattccatagaaaataaattagggaaacagcattctagatccttttttagagttcagcagtgcacgcgatcatattaaaagctctgagaagccttttgataatgaaagtggtttcactgcatctgactcactgtagctccacatccactttggaccttattttccttaaatatctattaacatttcttgaaacttagtgttaaaagaatcagaagctaggaggcagatgccgagagaggggacacggactgatagggaagggataaaaccaccaaagacatgtttagtccccagtttgagctaaaaaatttttaggtggttttatcctttgcctcatgtggcctattctttagcagctttagtaacggggttactagtgaagcctattaagactaccatgtctggaaaaggctgcgtttttttgttattaaatccttacattggctgcttagtttttgaattaagttgaagaataatgaatttggtctaattatgagcaaaccagttttttggtttttggtgtttttttttttgagacagagtcttgctctgttgccaaggctggagtgcagtggtgcgatctcagctcactgcaacctccacctcccgggttcaagcactccttctgcctcagcctcccaagtagttgggactacaggcacgtgccaccatgcccggcttatttttgtattttagaagagacagggtttcaccatatcagccaggctggtctcaacctcgtgacctcatgatccgcccacctcagcctcccaaagttgctgggattacaggcgggagccactgtgcctggccgagcaaacgacttggaacttgtgatttggaacatatctttgaagaagagcagtcttttaaactttaaaaatacgtttggtaaagatacccaggttatcaagttatttgtggcttatcagtatataatataataattatatataaatgattgctttaagaagataattctgatattttgttggtcatgttactaagcagtttttttaacagcccagtgataaactttaagcacagtttttattatgtctgaattaatgacatgtcactgaatagaaagcacaaatattttagaaaggtatccaaaacattatttactcctctaggaataaagacatttgaaaatgccgttagtgggtcttctcccacatttcctcctccccaaaaagattttttaaatttctgtgttattgattaatatggcttattttcatccacagaggccagtaagcttgtcatgtcctatgtggcagctgtttgtggaaaaggagcagaagttaatcaagttaaagaacagcttttacagtccaacccggtcctggaaggtaggatgtgttatgttcattaagtcggtgtgactcaaacagtagattgagttatgtgggtgctttgagtacctggtctgctgggaggtattctgggagggaagaggaaggaagagattcaggccaagacctgctgagcaaataagccgtgttctagaac

SEQ ID NO: 25141 - DNA, 2300 bp, Homo sapien
gcctggatggcatgttttctttttcctgataatttataattagaagcattggattttgaagctttaaagcttcaggcaagttatatgatgtatcattatttcagtcaaactgtttttatcctgaagaaccctcccctagcaaaccacagttcagacaccacaggaaggtattgtggtcctgtcttttgaattgactggatatgggtcttgatccaaagttttacactgatcaaaaatacagcctgaatggtaaaagccatcatttgtaaccatgaataactatcaatacatgctcacttttagaagtttattgctaattaagaactgactgcattttgtgtaatttgtccctttttgcaccagaatgcagtaagtatgacctgtttgcagtgctggtctgttgcatgctcttgtgttaatagcttctctagctgtgtgagttttgcagtaagtggttgttgaataaccatgtggatataaaatacagaatccatacaggaatttttaaaggttatgggcaaatttaatttagttgtaacttaatccttaaattgttttgtaattgtgaagctttgcctctggtttctaatctgcttgtgtgtatttcatggtcctgttttagaagtgtactttgagctgttcatagctacacaatgtgtctgaggacactagtgctttcctttccttctcattatttgctgtttgatgatttagcataatagggttgaaatagctccatgggcacagacttgccagataacacatttgttccatgagactgttgtctaaaaaaaaagtcaaagatctgctcttataagttattaatgttttacttttacttataggttttatttatagttgcatcatatagggacatactttagcaaagcaattgagactttctgatatatggaatgcctttatgctgagtataataataataaggcatctatactagaccaacttcagtttctaattgaaattgttagctctgcgaatttgagcacagggttttaaaaaatttgtgtgaaaatgaggactgaggagtgccctttgtatctgactatatttgtcaaaattattgaaaataaatgtttgccttttagtaagactcttcaagacataaaacaaacaaacttttatccttaactaagtttagcattaacaagataagtcactgacaatatattcacatgtgttatttatgagtttgagtttaaaatttcctctgatcactgcatcactggtgattagaaattcctagctgacttccaggaaagaatgtagttagatgctgcagcataagtatcatttttaagttttcctaagtaagaccaaagttgatttttaaagatcaactttcagaagactctgtgactttttcacttctatcatgtatggagggatttgaaggccagtggctctgcctgttcacaaggagcagtgagctttggctgcaccattacatgtgggctctccttcctcattagaccaggactggccaccattgtgggagaagagtccagtttaccagtggtggagtcatactatccctcgctcccactgccaccatctttgggcgataaagaaaaatagaggtgaaaacaagttttagtgtcagatctacttcttcctggacgatgtggttcttgataaatttattcatttggtgctctcaggatgtacagcaatacattaagccctgcagattgttcagaaatgatttaggcataaagcttctgtcaacaaattcataagagattaatatgaaggagaggctgctgagacttctaagagtgatcaagggtatgggccttctacagagagagagattgtttcttgtcagggagatgctttaatctttgggtctccatttggtaggaacttcatttgttcatacagtcagccaatacatattgagaacttgctaggtgtgaggtgctgtgtaaggggtaggaatacagtgaacaagagagcatggtcagccctcacccataagaatgtacagtctagtgaggcagatgtatatgaaactaatctgtacatgtgtatacttacacatacacacatgttcgtataacatgatttacaaaaagggttaggatgcaagagtcagagtgagggatctgtccctggatggggacaataaggggtcagttcagggggacttccttgagctctgaagtttcacctgagaatgggagattcagaacttggtgacagagattgtggagctcactgtgtctttgctgatccttcagcaaaggaagtgagattgtttctagcttttctgtttgggg

SEQ ID NO: 25142 - DNA, 2300 bp, Homo sapien
aatgaaatgtcagtgatacttatccacattattgcatttattagtgtgttctttttaaaattactgtgcctgcagtattgtatttatttttaggtggttataaaatgatttgaaataatttcaaaagtaatgactaggtttcttaagaataacataattgttttgctatgaaacagttatatataatactttgtgaaaacatagacaattatatccataggaggcagtttataacctaaaatctttgtgatctttaaggtgtatcaaaccgaatgataaaaaagcagcacacatcttcaacgaggctctagtgtgtcatcagatcaggtacctggggcttttggagaacgtccgagtgcggagggcaggctacgccttcaggcaggcctatgaaccttgcctagaaagatacaaaatgctttgtaaacaaacatggcctcattggaaaggaccagccaggtaagaaattcagtgaccatatttaataatgaatgttttaagtggtcaaataatacggtgttttttcacatgctgttagataaaacagaattttatgaaaaactggatgtaacctctgttttggaccttcttccattaggataccattttgtgctaaggtcaaaataagacttaccaaatccacatttgggacttgtatggcaataatattaatttttagaatatgcccaaggtaggttcgtaggaggtggtttgtaatttgatacacttatatttgtgtagaatcatagaagggtagaattagagacaggttggattaccacttgtcacttttcccatgaagaatttggctgcagagagaatcagtggatgggtgaaggtccctctctttgcctatatctataccagttaatcaatagacgatacgagcaggtaggattcacagtgtcagcattactgctaggagagctggattagagaacgtagcttggacccagggccatacagctttcagctggtctgtcctgaattgcatttactcatccagtcccagacagagtgctggacaccgcaggcccagtggtgcatccccatgtcctgtgagctctccacaggcagagagaactgtgtactgacgggcggctgttgcaggagagaaatcaagccttattccttctgccctcaccagagaggctgctcctctgcaggctgaagaaggcttgcccctgaatactgctggagggctgacatgcctgtttcatgggcctaggcaggaaatgggcgattttcatttaactgtactggtattgcctacacattattctcactgcacctggcctttcacaggaacatcaacacacctaggacacttaccttgtattataagaagatctagaaactccagatgtatggtgcggtctctgatgcctaatttagtaccctaatttaatgtaggatttgggtactgtttcagttcccattgctaatttccggggtattatggtaaacaggtaccataatacagaatgtgtattcactccctgcctggcatctagtctgcaggtgggtggagtgaggtttagttctaaagactgatgttgaaaccggggtccaggatggagaggtcagggccaagtccagttcttgctcccgctgggtaaggcccacgttccttagcgtcccgttggtctgggactgtttcttggtctctgcttttattctcaggggcagaaacaatgtttaaaatattttcaggaattaactgagtgagtttaaaatagatctgaatttcttgcacaccctcctggcccaggttggtacatcattataggtatttttgatacaagtattgcctctactaatgaaatcaagaaattggctttaataccacattttcttagaatacatagttatgaacccaaatttactttttcagtgtttactggattaagtttaatttgtggaaaattctttgataaatggatgattgctgaaagagcaattacacttggaaatgaagctatgttttataccactgagaacctgataccatgatagaagataaaactatttttgtaactcagaaaactcactgtttttatttttatttttttaggtctggtgtggaggtcctatttaatgaattagaaattcccgtggaagaatactcctttggtagatcaaagatattcatccgaaacccaagaacagtatgtaacgaaaacctttacactctgaacttaagttggaatcgtataggaaagttcttaaaatatgtttaactttataacattatatgaggggccaccatgaatgccacaaaacacttgtgtgtttatcta

SEQ ID NO: 25143 - DNA, 2300 bp, Homo sapien
tgggggaagggaagggctgagccacagcttggagtaccagcttctgcttttgtggggcttgattttctgtgtctgatttctttttataaaatgttcatataattagcctgaacagcccaacctaatcccttttctgggggcaaatgattgagagttgagtggcaaactttctttgcccaaactcttggccgtaactcttaacattcttaattggtttcctgtctattcttaatcttttgaagatcttgtcaaaccttaaaaaaaaaaaaaaagagctctgccttaaatattgcttctgtgagaatattttgcctgtttaagaaaatacagctttgagtacaatccaattgaagtgtcaagtcctgccagataaccatggtagaattagagcttctgagctggattgggattgaggttggacgctggctctgccattaactggcatgtttcatcatttgttttatttgatgttgaaattatgcttataattttattttacaccactttccagtatgacatcagtgtctttggcaccttgggctttattagttcatgaaatggaagcttctgtttccttaaaaatgccttgactctcttgctaatgttgtgataatgtttccaactctttctagggctataatatctatgctgcttgtttgcaaatacttgggaagtggtggttgatctaaagatactcagaaagaatggggagaaaattaaggcttctgacacttttcccaacatttctgttatcatcaccaagaattaactagatgattctttaatgccccactactttattctgctattttatttcttcagtctgtttttgactcttataatgacaccactggaagttaagtctaaacattacctttaggctggagagctctggggtcaagattgactagatttaaaacccagctcagccattctctagctatctggtctctggtgagttccatcgcctgtaaaacggggattaaaaaggggaaaatactgagtatgtactatttgctaggcactagttggacaatttatgatccatttaatcaatcttctgctaggcagggatccccattttattatggttaaaaagctgtaataaaagccaattgacctaaagctctcacaagtaaatagctggagcccaggtttgtctctaaagcacatgctcttttcactacgcgacataaaaaaaactttattaatctttttttccagattatgtttcaagggttcccactgctgttgaataattaattccttttagatgtacaaaagcaagtgcaaagtaaaagaagaaaagctaaatggggaaggtgtgtaatatgagaggcagggggtaaggaaaaatgagaagtctgcaaaggaatttacgtcctatctgcttagcattacacagtggaagcccacgtcagacatttgtgttgcagtcctgcctgctcaggggttgctgggtgaccttctgcaaattacctcatctttctgggtttcaatttaagtatgcctgaaatgaggcggttgaattgatctccaaattcccttctggtgctaaacttccagccttgtagccactgacgccttcaccatcccagcctgttttcccttggtaccggaccagctgcccttgcccgaaccctgttcttcctcgactgcgaactttctaacgtactcacaggttctaaactctaccgttcctcgtgaccgagggactaaagggcccgggcaggggctcaactctgagagaaaaaaaggcaagaaaactccaaagttggacagcaagcgtcaaaagactgcacagcaggaaggcgaaaccgaacagaactgctgctgcgcggcgacagctgaagtgggtggagaacgggagggcgggggaggcggggccgagagcgattggaaggacgagggggcggagcccgcgctgacagcccccggggaggagcgagggaagctctgcgggctgcggcggccgggtcccgcccctttgcttcccctccccagcaccaggcgggcgtggcagcaggcgtgccgacgcagcgtgacttcacaaggggaggggcgggccgagggtcctgccggcgcgcgggcgtgttcatcagtcgctgtttgggacgctgggtgtgcggtgttctgtctccgctcccgtttcgctgtcacagcccgttccttcccggagcccgggacaggctgggcgcgcgcccgtgtgagtgagcgggactcagggcagaagtgtcccctcactgcgtttttttttccttttatccaaagaacggggcagttagtacgcttgccttcct

SEQ ID NO: 25144 - DNA, 2300 bp, Homo sapien
aacccagcatggtattaaaaatcacatgtttggaaaggcagataggtgaagctttgtgaccttagtgttttttttagcactttgaaattctaccagatcttcggtagcttaggaatcctgtgtcttttatggaggcagaaggaaaactgttatatcattatttgactagactgtaaatgaaacattaggatgattttacatatcttgtggctgaaaaatagtttctgtttaaatttctgcaattaaaagcttttgttttgttaattgactaaagatgtgatcattgggtataataatactggctttgcgaaaagacttattttccagaatttgttatgatttagataattatgtcaaaattcgacagaatttttgtattcttttgtaaatagcaagttatcaaagttagatttattgtatttgatttactatggtggatagagagggcttgatcctcacttctaccttaatacaaaaaatatatagtgtgaagatttacttgatttaaatagaagaaaataaatatatttctaaagaattaatgtttcttttctctctaggtatgcatccatgtggaaaggatgtctgacactttatactggaaggggtggtgaacttcaaaaaattggggagtaagtattaaaatgcattttgtataattgcatatattataaataatatctacggaatgattggtaggtatgaattgtaaacctctttggcttttttgactagtaaactgaatgtctttggtagcttaattgaaaaaataacttcgtgtatacaaatttaacacttgtcagtactgttttctgtggttaaaagtgtcaatttttcctggcaaagagcagtagaagaagctgcagttgagaccagccctagtggaagcatttctgtaggttttagaaatgtgcattttttaggtgtcacaagagccatttgaagtagattctcttttgtagtgattcaccatatacgaagctagtgattcaccaagtttcaggccataagtttaaattttctttttctatggttatgggtgaatatgtactcatgttaaaaaggacttgcagcaacgaaaactgaagtcctctatttatccacagtctaggtgcggtgcaggcagccgcaatgcgagattccatacactactaccctggtaatgatctccaccctgacctggaggagccatcctctctaggggtgtaaggtaattcagcctccatgttagcctagacattgggttgtattcataaagtatggtacaggcaatgagccaaatcatcagtccattctgtttggttaatgctctgccatctacttaatgcctgtcaaattggaagatatttaaaaagagaagccacaaatggcaccagataaaaaaggaaaactgtttgccactgagggaataagatgcttatttggagaacctgtggttaataatgaaggaaaagaaatgatcatgctagcttttaaagatcagaaacacttaacgctttgcctttgttagaagggaagttaggattcacttagagtagcattaatagagttatgtgttatgaaaggtcttagtgtctgttactgaaaggttcaggattctgtcctgaccttcatgtattcatacagaggtgttgataataatggaggtcagttacgtgaaaaaccgttagaggtcactcatttcttaatgactgctctttgtcagggtcagtcgaggatttaccaaaactggttctgatttgtcttcagtatggtgaggagtaataaaatgcttctttgtaatgttagtacacattatatggtcaacttacaggaagcacttggataaactggtggctatgtagcctgttgttattatttattgcctagaaaccactcttaaccctaaatgattatctttgcagatccacagtgatcgatcaaaagagggactgaatgggagtgggtgaatggatcggtgcaaatccattaccactgctggagaaaccaccctggaaccctaaacatggttcactctcatgttatttttcctttgatcagcttttgtggaaaaacaggacagagatgtttttgtgtccttgatttttgatgtgatttttttttcagcactaaagaagaatttaaatacaaaatagaatgttatatatcttgtagacagtcaaatatttgatgttttatgggacataatcatttgggaagtttttgttgtaaatgaagagttagtttgttgctattaatttgtttgacacataagttcattcctaaaagttagagatgttacataaagaagggttgaggac

SEQ ID NO: 25145 - DNA, 2300 bp, Homo sapien
tagaaaggtagtcagcacaactagtgccatctactgggtcattgctgcatagtttctgtctgtttagaaatctggcttagtttaacacgtgggggaaatggttctgttccaatgaatagcgatttttgcctgatagtggtgttaagtatgatatggaaaatccttaaggggcagttgggccatttgtttagtttatgaacaatcaacactgacattaaatttcagttaagtagatgaaaccctgaactgcccctaaagctatagaaaatatgggaaaggttgccaagttttgtattctcatcacatttgtcaatattgttggtgagaagtgtaaactgttaaaaatgccttttggtgagtggtggtttggtaaaaacaattgaagtagaacacgacactgcccttagaaatttcattcctttacccaatggtatttggtaaaatcctggccaaatgactgctgctgttgtaattatgtgagctttgcagaacataacctattttaaatgccagaatgtgcttccatgaagaagaacatggttttgggctgaggagatcttggtttgagtcctggatctatttactggctccaggaccatgaacctcgttataaaatgatagtggggctatgtactcatagtgttaggaggactatgtgagctaatgtatgcaaaacatctgctccatatctaagggtcaacaaatgttaagccctttctccatcagcattggaaataagttaaaatactgttcatttctccatgccattattagaaaacaatcttctataatttaaaatctgaaatattaagcaatttatgtgaattattacaattatgttcttttttaaacagtcaaaccaagtttttcctgtcttgtctgggcacagacaagcacttatgctgacggtttaccgtgacagcatgtagggttgggtcttcattacaaagatctgcccactagctgagtacactggtgtttttccattcacctctgcccagcaggacaagatgatgaaagtacagagaacttgtgggtccaggtttgtgtcagaaaggaggttagtggcttgcttagggccaggcagagggcacattggaaggaattctctgttcccggtgacagcccttggaattgctgtgcacccagagttgcggagtaatttattggcttctgataactatagtattggataacttcccaacattttattaaaaattttaaacatataggcatgttgaaagaatttatactcaccacctagattttgccactatcacatatctgtgcatcctattaatacatttttaattattatttttttgagacagagtttcttttactcaggctggattgcaatggtgcaatctcagctcactgcaacctctgcctccaagattgaggcgattctcccacctcaggctcctgaatagctgggactacagaggggagccaccatgcccggttaatttttgtatttttggtaaagaaggggtttcatcatgttgccccaggctggccttgaactcctgggctcaagtgatcctctggcctcagcctcccaaagtgctaggattacaggcatgagtcaccgtgcccagccagccattaatgcatttttaatatatttttagtcaattgcagacatcgtacaattttccctaaacgttgcaacatgcctattcattacagttcagtatttttcaggattttttttttttgtaaaatttacaaagaaatgtggaaatcttagttgtgcattagttgagttttaacaaatacctaggctttatcgcaacctctatcaagatacagaacattgctgtcattctagaagcctctgtaatgtgccttccccagtcaatctctttttccatggccccagcagccatcattctttcaatactttaaaaaacattcttatctgaagggaaatttcatatgtgccaaagtcatctctagatttctccaagtcttaaccatgccagagtacagccaaacctagcccttcatgcatctcaaataaagttctaagatcttggtattttattcttccctgtttcaacttagctccaactctttttttcttttttccatcaagatttaaacctgtcatccttgacatttggggcagaaactgctgaaatgaaggaggacttgccatcaaagaactggctgaaaggagttagcacaccactcctctgccctgaacagttctaagcaagaggaggagcctgtggcagggcgtgatatgaagtcctcagagatagagtgccaagagtagagggagtatcctggaa

SEQ ID NO: 25146 - DNA, 2300 bp, Homo sapien
cccagctgaggaggcagacacgtgaatgagtccatctcagattcctcagctcaaactacagatgaatgcatatgcctagcagaaataatccattctagttgagccctgactagccaaccacagaatcatgagtaaataaaacgttattttaagccactgagtttcatgctggtatgttacacagcaatagatgactgatattacttgtgttattcaaaatatatattttaaaaataaataagcccacacgcaaacctttctttctatttaacaactagcctctttccttttaccacctcacaccccatctctttaatgtctctattcatctagctgattatacaatatccaacaatgcaatgcaaaatcagcgcaaatcaatgcaaaatcagggtgaagtgattataatgtgaaatcgcaaattttgcaaaatatgtaggaaatcatgaagttgatgaaggtaatgttagagaagcccttgaatcatgggcaactcctctgacaaatgagaatctgcagctggaatagttaacattaacatttgaagaagaacaaatctacatggatgatggcacaataagtgcttcaaaaagaaatgatttgaatgtcaaaatttaagagaggctcttggaaaattgatgaagccctcaaatatttttgaaatagtgacactctatgatttgcccacaaaagtcaaatgtaaaaggacgtcgtgtcatgatatcatataattttgttagaaaattatgcttcttaaaatcaacacttgattcatcctttattctaatatttaacacatttttgaccaactaaattttattaaatataaggtaaattaattttaataatgttcttacttttttaaaagataacatctcaaccaaaccttcttttcaccttttttggtctctatttttaaagcatttgctttaagtgggttttggtggcaccaattatctgaagaaattgaaggcctctgtaaatatctttagttcatcttcctaactggcagctatactcattgagagcagggtctccgtcatgctttgccaatgtcttctggatagtgcttcatgcatatagcagaaggcagagattcaaccaacgtgataaccaatggcctgctgattgattggcttacatgtaggtgttactattgacgaatggcattgttccattatcaatccctgacctggtatgagctggcatttgttcgtctcaaaattgttcatagaaggcctattacaaacttcctgctgaaagcactttcaaaggctggatacgtttaaaatcaactcaagcatgtaaagccattttaggaaaataagccccacatcccaaggttcagctgaggagggccacatttgagaacaggtgtgccacttcactgagcaggaattttaaaatgtcaaacattagaaccacttgagaaactccaactcagcctgccaacagacacttctgggcacgtgtcaataaatgccttgcagagatgggcatttgagaaagtctctcctcaccaactcaaagttagttaaaacaaatcatcacggtaggttcttaaaaagaccacattttatttttcctcagtctcacttcttgaaaaaaacaatcatttttttaaatgtggtcattcaaaaagtttccatatattacataacagtcataacagcagtattactttttttaaatatccctgaagttcaatctcttttaacttattttgtatctgcaactgcaagagtaataagaactgagctgttttccttatcattatcagagttagtcccattcctttgcaaatgagaaactaataatacaaacttggctgcagtaccctttaaactctatgcctcccagtaggacacccggtgttctgcaacccatcagtcagttctagggcaaatgcaaacaatactttccgttacaataacttgtatccaggaaaaagaaacaggcaccctgttgcatctgcagcatagcagccagagaaaagtttaccagctttagccaattggaagctgtggagctgggccaagttagcatgtttttctccgcctctagatgaagtcatgattgaaatatgacattgaaagggaaggggaacaggaaagaaaagctaaacctgcaacaaagtgtcctgtgcccagaacgcggttaggaagtgtgtgcatacgtctgaaccctaaatggttctcagttctgtaaacttctcctcccactgggtggagtagggcctttaagagcagctggaatgcagttcccctgatcagcgtagccagttgttgcctgtctgaacc

SEQ ID NO: 25147 - DNA, 2300 bp, Homo sapien
ctctgctgaaagcctgtagcgaaagaaatttctaattccttgttttgcaatattagttggcagctctatctaatgggtattctgtttccttaaagaatttagctgctctgtctagaagccgattttctgatgcctccaacgtctggtctaattgatctgttttaatggagtcttcgtcggtgaggagcgagatgccaccgactagaatgctgggatctgctgcttaattgccaggagtgagagacactgagattcagaaatctttggaggtgggaggggagagggacagtctcggacggaggcggagatgtaagataaagggatggatttcacacaggaaaaaaaaaaagatttcgttgaggcactgaggtgctgcacgatcacatctctcaaaggagaagttaaaaagcaaggaagtgggaggaggttggaggttaaagtacttaaaaggattactcgggtacaatttgtttttctgctggtgtctgcaaaggatagatagtcccgttttcaaagtatatgaatgcctcttttaagtgattgggaatggacactaattgcctgttaaatgttatcaaatgctctcctaaattcaggggacacagaaagaggggcacaaaaggagaatttaaatagaaaaagggaggatccggaggcttttgaaagcggggggagaagaaggaggagggataacagagaggaatagagaaggagagcggagagaagataaacaaaaacaaaaacaggaatcactgaataatcacacaccaaaaagaaagctcttccctatggggcatccaaaacactgagactgcaatagtgaccccggtcatggaagaaagatgttcctctccacccttgtccccgaaagctcttggtcccgttactggcgactaaaattccattaggctaaagagtgtgtctaactgcctgaagaatgcagcagacggaaggcgggtcccgctatgccgtttgcccttcccgctggagagaatgaaagaaacgcgcagagccagagactcctgccgagttagaccttctctcgtcgccccaggtcaccggccatccggcaaagacccgagtaaggaacgcagggtcactgcctgggccaacaaatggagcccgctctccccttcccggacgccgctgcccggccgatgctcccggcaacccacccgcggcgtatgcagaggagcctttctctttctctcagaccacttgtcccgaccaatctgaccttccaaacacatctgaccgcacctcccaggtggacacactaataggctacgggctggagaggagcgggtgatgaggagagggattcaaacctgcgaacgcttgggctgggtcggagctgcggggggcctgggaggagagaggggagaagagagaaggaaggagagcgcctgccgggatggctgagctgcctcggcgagcagccttggggttgcacgctcttgtgggagatgctgctgttgcttccaggtcggcaagagcggttctaacaccatcgcctctcaccctctttcctgtaaatccctagagaaacgtccctggcctctccgccgcgacattcccagcctgcatccccctacagcctaggcggcgcgctcccgcacgctggagcgccggtcgccagcaggacgccctctcccgcgccgactcgcccctctctgccctgctgctgctgctcctctgacacctccgcccccaccatctccagctcggagagacgccacccagccgcggcccgcactcgcggcccggggtcacgcgcggaagaggggcgctagtccggaccccgccttcggtagggggcgtcctggagcggagagtgaggcgaatggtatatgagtgtgcgggtagcccaccctgaagcccgagcttctcatttgagccatccccgcctagccccactcgggccagcgcctggcgagcgagcccatctgtggcttccgcggccgcctcctccttgcatccttgcacctcctcgtcgacccctccctcccgggacctgcatcctgctccaccaatcagagcccgactgcctcttcccacgtgaccccgggcgggctgaggacctgctgcttcccaaacgccagagggatgcgggcggcagagctcgagaggcggctgccgggctgcggggcgccttgactctccctccaccctgcctcctcgggctccactcgtctgcccctggactcccgtctcctcctgtcctccggcttcccagagctccctccttatggcagcagcttcccgcgtctccggcgcagcttctcagcggacgaccctct

SEQ ID NO: 25148 - DNA, 2300 bp, Homo sapien
tggtatgattgtgtcatattactagcaatcatatgatacgcaatgcaaagtacagttcatagacttaaatttaattctaataagtaaactgattttgccttgctggggaaaagttaaagcactaatccaattgctaatgcagtcttgtctacttctttggtacctagtgacaagtctaaataatgtatatatttttatttacatattcagtaatacaattctctgctcaatgagtgatgttcttctgccacttggtggtgcttgccagtttcagaatttgtttcttggtggcactataacactaagtacagagtaagtgcaacaaaattgcagcattcccattgaaaaggctttgcttcaaactgtttaataatttaaaggacctctgtggaagcaaccgcatttgttaaccagttacaaccagtaattaactcctttggagttttaacttacttttggcaaaacgtcttaggaagagcatatattattagaaagtatgccaaaaatttacttagcagaaaattcaaaaacagttttcctctgctaagaggttctctaaaattctacttacatagccaaactctgaaatcctagcaggtcctgtttcattatcataattactgcataaacacttttaaggactttgcctttagtttcaagcatgacttattttcataagcctgattagttaccacaccagccttgctatggaaaatgacatgttctcattctctgctgtagagttgttaaatcttgatctatatttatgttgccttctctgctgaaagcctgtagcgaaagaaatttctaattccttgttttgcaatattagttggcagctctatctaatgggtattctgtttccttaaagaatttagctgctctgtctagaagccgattttctgatgcctccaacgtctggtctaattgatctgttttaatggagtcttcgtcggtgaggagcgagatgccaccgactagaatgctgggatctgctgcttaattgccaggagtgagagacactgagattcagaaatctttggaggtgggaggggagagggacagtctcggacggaggcggagatgtaagataaagggatggatttcacacaggaaaaaaaaaaagatttcgttgaggcactgaggtgctgcacgatcacatctctcaaaggagaagttaaaaagcaaggaagtgggaggaggttggaggttaaagtacttaaaaggattactcgggtacaatttgtttttctgctggtgtctgcaaaggatagatagtcccgttttcaaagtatatgaatgcctcttttaagtgattgggaatggacactaattgcctgttaaatgttatcaaatgctctcctaaattcaggggacacagaaagaggggcacaaaaggagaatttaaatagaaaaagggaggatccggaggcttttgaaagcggggggagaagaaggaggagggataacagagaggaatagagaaggagagcggagagaagataaacaaaaacaaaaacaggaatcactgaataatcacacaccaaaaagaaagctcttccctatggggcatccaaaacactgagactgcaatagtgaccccggtcatggaagaaagatgttcctctccacccttgtccccgaaagctcttggtcccgttactggcgactaaaattccattaggctaaagagtgtgtctaactgcctgaagaatgcagcagacggaaggcgggtcccgctatgccgtttgcccttcccgctggagagaatgaaagaaacgcgcagagccagagactcctgccgagttagaccttctctcgtcgccccaggtcaccggccatccggcaaagacccgagtaaggaacgcagggtcactgcctgggccaacaaatggagcccgctctccccttcccggacgccgctgcccggccgatgctcccggcaacccacccgcggcgtatgcagaggagcctttctctttctctcagaccacttgtcccgaccaatctgaccttccaaacacatctgaccgcacctcccaggtggacacactaataggctacgggctggagaggagcgggtgatgaggagagggattcaaacctgcgaacgcttgggctgggtcggagctgcggggggcctgggaggagagaggggagaagagagaaggaaggagagcgcctgccgggatggctgagctgcctcggcgagcagccttggggttgcacgctcttgtgggagatgctgctgttgcttccaggtcggcaagagcggttctaacaccatcgcctctcaccct

SEQ ID NO: 25149 - DNA, 2300 bp, Homo sapien
aaaagggatgatacttaggcacgtcttgagactttgctgtattcataataaaattatcctgtgaggacacccctcatttctgctaaactgccactaacacttttaaagtttcaggttgttggcaagtatctgagataaagagagagcctatgtgcttagtccaccagtgatggcagaaaggaatggctcatgaacctgtctacatgtggagctaaatggaaccaactcaacatcattccccctcccacttgccacactaaaaataaataaataaataaaagacttatatttctgagtcatgtttaaaattaattaaaaggatgtttgtatgagtccattatggcattaaaccaattccacaaagtagtctagggaaaacctcatgctatcagatccctcttgcgttctgcaatttctgaaaaaaagatgttcattgcaaagtgatatgagcactggaaaggtactaattccaatttgattctaattggatgagtgacatgggtaagcgattctaagcatttgtgttttttttagtagtatggaatttaattagttctcagtatgttagtgaagattgaatgaaaacatgcatatgtttccatgtattataaatattttaaaatgcaaaaaattattctaatgaatatataaatataaagcataacaataataatacaataccacccataaagtcatcatctaatttaaaaactaaaacattaacacttgaatctcccccattgcaacatctttcccgacttgtgtgtttttttcttttgcttttaaaatttttgttttatcatatgtctgcataagattatatagctttccttgttttaagctttttaaataatatattgtagttatattatttgtgctttgctttttttacttaacattatggttctaaaattcagtaatgtgttgggcatgtataatttgtttatttttaatctctttgacattcgactatataaatttcagtttgtttattgactcctttgtctatagatactctgctatttctgtttttgctgttacaaaaataatgctgttttaaatttcattttgtatacttttttgaggcatgtgtatgagttattctaaggtaaaaaaataagaaaaaattgctgggttataagattgtcacatgctcgaatttacaagataatgccaaatcatttttcaaagtaattatacctatttatactaccggtatgagtatattggtgcccacatagttgcttgttctgccaaagtttggtatgatcgaacaataatttttgcccatcaaatggcataaaataaaatctcagtgtgcttttaatttgcattttctatgtttaagaattgtttcttttttaaccatttataatttacttttgctgaaatgcttgcttattatttttgctccccattttttcctattggattgcttttctcattaatttataagaattttatatggtttagatactaattattatattactgaaaatacctttatcagtttgttgtgtactttctactttatgtcttgtgatggataaaagttttaaattgtattgtgttgaagttaacatttttaaattttataatcagcatctttaataatctctttataaaattttcctttacatagatgtcataaagatacatctctataatttcttatttttttggcatatgttcattaagtcattttatcattttttagtaataaattgcagttatttatgaaacaaataatttttaaaattatatatgctttctttaaaaattgatcttagcatgcttcactatgaagcttgaggcttcactgcacgttgtactgaaattatgtataaaacagtggttctgaaaatctctgagttcatgacacctttagtgtctcaggtttttttgcttttgttcttgttttttctcacaaagcacctaagttaaataaaaacaaagcacaaagctatcagcttcatgtattaagtagtaagctcccatgttaacagttgtaacttgcctggtgcccaatagatgtcactctgttttcctagaaactttaaaatatccctcagtgctcctgttaattcatggtagtgccccaaggcactctggcacccagttttggaactgcagttttaaaagtcataaattgaatgaaaatgatagcaaaggtggaggtttttaaagagctatttataggtccctggacagcatcttttttcaattaggcagcaacctttttgccctatgccgtaacctgtgtctgcaacttcctctaattggggtgagtaagagatttt

SEQ ID NO: 25150 - DNA, 2300 bp, Homo sapien
ccaatagacagtaacatctattgggtcagagaacagtctcttttaatgcagatacttcaattcttaatatactgtgtagattttcaacaagtgattttttcccagtgatttaaaaacttttataaatgattctggaattctcaagaactccagataagtttattctattgcccatagtatttttctacttgaatatctcctcatagccacctcctctagattatatatttaaactttaactgccctctcttgacacacgtatctctagttcttctcactgtcagcgtcacatgcacagacactctagctatgtgcattgctaccttggaactttcgcatttggaatttcctcttcttgcatcaaccatcatttggttaactcctatttagagtaaataacccatttcaaattgaacttccctggaaagccatatctgaatccttaagttaaataagattattctcctgtgtgttctcctaccacttaccagtttatactgtaaggactccctaagtgttttcttcacaatgtccctttgagaaggatatttgagtagctaaagacctgacagaaacactgttaggtcttcttttgagattttgtatttcatctgtgaaaaatttgcttaactttactcaaaatgtttactttaccaaaaatttaactgtacaattttttttccacatagcatctgatgaaatccttatagaagacttagaggtatgtgatcaacattcagtttgcactcatgacacagagtaagaatttaacagatttgagagaaactagttatttaatgtgtttcaaatgttaataatataaacttcatagtaataatattttcttatttaaaaaatgaatgtaaaacataacattcctgacagattcctgacaggaatgcctgacagattcatgtttaatgtaaaagttatctaacagcatttccattatgataaagcagccaattttcttcactgaataaagactactctttcaagatctgcattatcctttattcctatggggatataaaagataattgcataatgtcatgaattttatttttaccaattttatttctgtcattacaattattttatttttgtaaatggttgataaaaatttctataaaataagaggtttcccaataaaaatatgtttggatatatatatatatatatatatgcgtgtatatatgtgtgtatatatatgtatatatatataatttgaagactgtatatatctatatatctatctatagctatatataacacatatatggctcaatttgacagctaggtgcaaattaaagttttatttctctgatattagaatgctgaaatattctgtagcaattgagattgcactttaataatcttgatatgaagctgtaatactaaagctttccattttaatataaattaaaataccaagaaaacatgctattccacattacaacttaaatttttactttgccctatttactgtgcttcaaaatttacagcttctgactttcttcttacaatacctattatatccagccagtgagagcttaattgataatgatgaaaatcatctctatatctgtggcatatgttgagcatctgtttcaggctataattttaaatttatgccttgtgcttaaaactaaagcattgagcaaataagttttcatttttcaggttttaaaaaaatatatggttgaccaagtagactaaaatctacagtagagattttcactttgaaattaaacaccagaatagaaaagaatcagaagtacaactatttaaaatatacaaattgacttataaaatatttctgtcattctgatttaactgtacatatgaatatgcctccttgcaatcacatgggcatgtgaaaataattcaccaaattttgaacatctatctggcattttctggtagctaaaatgttaaactgatacatatgtgctagcctttgccttataagcattgtgaaaagaaaaagagagtgaagtttggaaaattacaagctgatttccttggccaaaattaatgtacctcatcactctgataccaataagagctatattgtagggaggaggagccaagatggctgaataggaacagctccggtctacagctcccagcgtgagcgacgcagaagacgggtgatttctgcatttccatctgaggtaccgggttcatctcactagggagtgccagacagtgggcgcaggccagtgggtgcgcgcaccgtgcgcgagccgaagcagggcgaggcattgcctcacctgggaagcgcaaggggtcaggga

SEQ ID NO: 25151 - DNA, 2300 bp, Homo sapien
agtagaaatatttcttccccactcctgatgttgtcttctatgcggaaggcctcttcttgtccctcactctttttgtcccaggagtcccagagtttaactgattggtaaactgaaaaataatatttaagtttcccgcccacattaataagcctgcctttaacttccccctggtcctcctggatgaagccacttccctggggtctgggccagtttagaacttcctctgctttaggttgataagtttgccaaattcttgggtttgggtatcagtcatatttaattagattcctcaacattgtctttattggtatattgatattttgtcatccaatttgctttatgtttttgtcttattttttaatttgttgagaatttgagaagagaaaaagggtgtctttatcagaccagttaacagactctcacatgagtatgtcaggaaaaatagtctggtaaattggtaaattgagccaagtatggaatggagggtaaagatgcagctaagcagctaattaaaaagagatttcagtgttcagtcatatgtgaaatagaacaaggtgtggctttaaaaatatagatgaaaagtacatttcccagaaaagagaaagagaaattctaatgtgtaaaaaataaagaatatgtagaatttagataatcaaagatatagctttgtgcacttgaagagtagcagttcattaaagaacagtttggtctcaaaagttttttttttcttttttttgtacatgtcttcacttatttaaaaatatgttcttggttgaggcttatgatttttaatcatgcattaaaatttatcatgtccaactataatgagatgttttcaaaacaagttaatcaacatttgcatttccaccattagcttacttcttaattgtggttctaatcaaaactgaataaactttaccaaagaagaaaatttacagtctttacatatactgaaagatacagaggagtctgctaattaagttataacaacttttcccaagtttacatttgtatcacagaaagaaatagaggggaggaaagcaggatagaaaatctaataaaactagtttctccccagtcaaaaaaaaaacaaaaaaacatgcctgggcaaatttgtaacttgagttccagttcatgaaatgtgttgcagtaggccagtcatatttcatctgggaggtctagaattgcagtttcaaataaggtgtggaggtttgtaagtcaagagagaagaatgctgtacttcatagtggctcacactggtagttattttatgaaacgaggtttataacgttagcaatgaaaaggtgaattatccaaatcacctagttgtttccctctagtattaccttcaataagtgtttaaatcattcagataggctttaccgtgtcaacagaatcattaagatcaataaaaacagtaataataaaaataatgatattcaaaatgacattatttaattatagattactacgtcagatattttttctaagcaatattgttgattttaactatatctattttgaatctcttaaacaataggtatacattgtgtgtttgtgtgggggtatgcacaggcatatgcagtaagtgtttgaaagtctttctcctccagtaaaacaatgataaaaatttttgaatttgatgaagctgctattagcataataactggacaaaaatatagatatagttatgttaagacatttatgtataactctttttcatgctattatactttttaataaattcagaagaaatagaggtgtttagctttcataagaagtactctataccttttaaatttgtaaaaactgtctacggccatgccaccctgaatgcgtccacacttatctaagtttataaaaacttacatgactgcagtggttagctaatgacatgagtaagtaaatgaactctgtgaagattaggaagggccaagatgaaatgggagagattgaattacaaattaacaaactgaaagaaaaactcaagttgcaaaaagatagtctcagagacagcagtaacaccttctggctatagtctattttcatctttctcatcctagtgttatcaagagaaaaacagtcttagatgcaacataaaaatttcagagacagaagaaatcttcctttgagggcaggtaagccaattaatattctgctttgtaacagattatatatcccagtcaaaatagaaatcaatgacttgtaatgttttatgtttgtttattttttgtaaatatagaagcataagttatcattatccaaaagtcccatagatgcaagaaaccaaatcaaaatat

SEQ ID NO: 25152 - DNA, 2300 bp, Homo sapien
agcctggtgccttgcagaagtgtcactggaacttgacatgaaaactcatgtttgcttgtttgtttttcatcttcctgtcctctgcttccatataatcagctcaagtgaacatagcacaggaaacagatcaagatgttgtttgcttctcaacattaacacactagttggcctttggtaaataaatcatttgtctgggagctttttctttctcctccaaattggtatttatttggaaaataacacactttttcttagacttacattttcgagattacataaattaaatgcctgtaaaaattctttgggttttcttagacagtaaataaaccacaacattataaattagaattcaatgtgacttagcctatgtttgattcatgaagctttgcagtggagcatttaatacattctggtaatgctttgatttgcatatcttatatgtggaacagccactcaaatttgtgacagcttccttaagattcaccttggtcaagaattcctagaagatgcagcagaggttcataaaatatctttgggaataccagaaagatcagtcaaagtgtaggatagattttgggaaatacaagttcgttatgactctaatttttttagttgtttatgagattaacaaatcataaaagagaagaatcttggacttaaagacatattaaaaattaggactctgtaatgtgccaaccaaggattgcttttttctccattttcaacaggaacaacaacaacaaacgtccagcgactcttatagaacatgatttctactacatttttgagtcaatagtatgaaagctatgagaagtgtggtttgaaaatccaattaaaattaaaagcgaaatattctaagtcaaattttatacatagaattaatcttattcatatagacagtatatttttaaaaattagcgtggaaagctgtcatatgacaggtattttagactgtgatgtttagttaaaagtgtgtacaactgattctaccatgcactactcttaatctgtcattgagattgcaggaaccttgtttttcacagtgggctaactgttccatctggcccatttctgtttatattttttcttcacctttttctttagctcattctatgtgattctcattcccatttttaaatatttgagggcccttaaaatgacacagctattctctgaataattctgaattcattgagagctgtctatggccataccaccctgaatatgcccaatctcatctgaattcatggagagatcattttttaaatctggtagaggaattttggtttctgataacagtaaattcgccttgtgcaaaccatctcttttataaacagacaagcaacaatgaaatctggacaaaatacaatcagacaaacaaataagcgaatttttgtttgaatgcatcaaagaatactgaagaaaccaggacttttaagggcagaatcctgaaaaaaaaaaaaaaaatgaagaaaatgtggtacatatacaccatggaatactatgcagccataaaaagaatgagatcatgtcctttgcagggagactattatctttaacaaactaacacaggaacagaaaaccaatgaccacatgttctcacttataaatggaagctaaatgatgagaacacatggacacatagagaggaaaaacacatactggggcctgttggaaggtggagggaggaaggatgtggaggaccacgaaagataattaatgggtactgtgtttaatacctcggtgatgatataatctgtacaacaaacccccatgagacaagtgtacctatgtaacaaacctgcacttgtacccctgaacttaaaataaaagttaaaaaaaaaaaaaaaaggaaagaagctcttcgaggtcagcctaaccctacttctccctaaaggcaagattcttaagtgacaacagttgggaggttaagaagttggagcagagagtgatagctagaagagaggtattgagttcagcattagtcagtctcctgtggcttggtctcagtaattatgactcagattatagaaaatcattcccttgcttataaatattagctgccttcaatatttataagactttttgatcttcacctttagcttagatacttttggccatccatgaaccaattctcttggcttctaccttctaacccaaatatatctgggaagcccaactgaaaccccagaagtagtcatgacatcaggtaaatatcaaaacttaaatttttttgcttatctttctaatttatggcatgtaagtaagagctattttgccaaattcctctccacttgatt

SEQ ID NO: 25153 - DNA, 2300 bp, Homo sapien
tttatgaatcaagtgaggtggctggaaaaagaaaatgtcttacactttcagaaagttttatgattataacatattagaaagtctttaccctaacatatttcttatatataaaactggtaaagataaaatgaaattcatatattgttgctgtagtgtccattatttgactcagcaggtgattttgtgtaagcctgcaagtcattttctgagattccttttctcagtaggaaaagtaatatgctagtatgcagagaatcatttattctatctgataattttgcttgaaaatctgcccaaatcagtgtgtatacacttgaaagtaaataaatgtttgggtgagtttaaaaagtgttaggagacacagtctctattttcaagttgcttaccacatagttttctatagggatgacatttaaaatatgtaacaattagtaaagaataggcaccaaccaagtagaatgggagtgactaataagagctgggtccaaagggctctatcttagccaggtattaacccactagttcctaaaatgtggaggtctggggaatcttgagaggaaggactggcacaggggtgagaagcatggggggataccactcagagttgcagctgttaaccaacttgcattgaagtatttcagtatttgattagttggttcagccgtacttgtgtgtaccagctgaacattagccttgtatatccataactaaaaaagcagtgtaggtgccctaaaatgtaaggactgcaagcgctatatcttattgatatttgaaagaaaggttatgtatgttttaagggtgttgataataatgtgttcaataaaataagtatgagccataaaatatcaagctaatttggaagcttcttatgctttgcacacaaaggatgtactatcatgattttatgaactctaaggactttagttctaggatgaaccttagaatatatttaaaacgatccccttaatttatcaatgaatctgaggaccacagctattgtctcacatttagtggcaatggtgagacttgaaactaggactcaggcttaatctcttttctccacacctcaggacttctccctttgtaagcaggagtgaggtccatgctctggctttccaaacaaggaaaagggcatatgagtagttcagtgttctgaactacgtatggcaatcagtaggcatttatcaagcaccattttcgttgttttggatgttttttgtagagatacaaaacaaaaaataaccttctttcatgaaggtataatatgcaggttagcgggactacctagccgtccatactgaatgggtttggaaatcccaactcttttctctacctgctctgtgataccaggcaagttaaagtcttgtgtgcctcagtttcctacctcaccgtgttatggtgattaaattaatatatatgtggagtacttgacacacagtcaagcctgcgattactgctgttcatggttttattttctctactagacaccagtaaggcacccccagaactcgctgtgttaagtagattctggttggatatagaaacacaggcaccccaggcggaatgcagatacgcctcaacatgtggattaagtaagagccaggaagcagagtaatgaagcaaaaataagacgtccagagtcaccttttaagaaaatgtgggttggtggttgcttaagaggggaggagacaatttagatgggatgtatggcgtgagcaaagggcaagaatgagcacggtgtaggcacaagtccatggaactgcttggctggatcgggatttttttgtcatagagtgttaagaaatagtcgatcagttgaggagtagaggagtgaagaccttggaaagttgccaaaagcctcgagaatttctctacatgtgtgacatgttctcaggactcaactttttcttttaggtttggaagacccgcagtaagtgtgctttagaattaaatgggtgggaaggggagctaggcaaaacacctcgcacttagcactaaataaagttcgctgttgccctaagagactgaaaaggttactttaacaaagggggcggggttaacttaacgtagatgtttaactcgtatacagatgaacattccagttgatcactctgaagctttttggctaaagcgtttgggtttagagcttccattactcattcgccttgcccaaggcctcagcaaccgacgttcgaaagccaggagaaaaggcgaatgataaagggcgctccacgcatgcgttaagaagccgccccaactcccccgcggcgttctttcttggaacaaaactagcgcggagc

SEQ ID NO: 25154 - DNA, 2300 bp, Homo sapien
ctaataagagctgggtccaaagggctctatcttagccaggtattaacccactagttcctaaaatgtggaggtctggggaatcttgagaggaaggactggcacaggggtgagaagcatggggggataccactcagagttgcagctgttaaccaacttgcattgaagtatttcagtatttgattagttggttcagccgtacttgtgtgtaccagctgaacattagccttgtatatccataactaaaaaagcagtgtaggtgccctaaaatgtaaggactgcaagcgctatatcttattgatatttgaaagaaaggttatgtatgttttaagggtgttgataataatgtgttcaataaaataagtatgagccataaaatatcaagctaatttggaagcttcttatgctttgcacacaaaggatgtactatcatgattttatgaactctaaggactttagttctaggatgaaccttagaatatatttaaaacgatccccttaatttatcaatgaatctgaggaccacagctattgtctcacatttagtggcaatggtgagacttgaaactaggactcaggcttaatctcttttctccacacctcaggacttctccctttgtaagcaggagtgaggtccatgctctggctttccaaacaaggaaaagggcatatgagtagttcagtgttctgaactacgtatggcaatcagtaggcatttatcaagcaccattttcgttgttttggatgttttttgtagagatacaaaacaaaaaataaccttctttcatgaaggtataatatgcaggttagcgggactacctagccgtccatactgaatgggtttggaaatcccaactcttttctctacctgctctgtgataccaggcaagttaaagtcttgtgtgcctcagtttcctacctcaccgtgttatggtgattaaattaatatatatgtggagtacttgacacacagtcaagcctgcgattactgctgttcatggttttattttctctactagacaccagtaaggcacccccagaactcgctgtgttaagtagattctggttggatatagaaacacaggcaccccaggcggaatgcagatacgcctcaacatgtggattaagtaagagccaggaagcagagtaatgaagcaaaaataagacgtccagagtcaccttttaagaaaatgtgggttggtggttgcttaagaggggaggagacaatttagatgggatgtatggcgtgagcaaagggcaagaatgagcacggtgtaggcacaagtccatggaactgcttggctggatcgggatttttttgtcatagagtgttaagaaatagtcgatcagttgaggagtagaggagtgaagaccttggaaagttgccaaaagcctcgagaatttctctacatgtgtgacatgttctcaggactcaactttttcttttaggtttggaagacccgcagtaagtgtgctttagaattaaatgggtgggaaggggagctaggcaaaacacctcgcacttagcactaaataaagttcgctgttgccctaagagactgaaaaggttactttaacaaagggggcggggttaacttaacgtagatgtttaactcgtatacagatgaacattccagttgatcactctgaagctttttggctaaagcgtttgggtttagagcttccattactcattcgccttgcccaaggcctcagcaaccgacgttcgaaagccaggagaaaaggcgaatgataaagggcgctccacgcatgcgttaagaagccgccccaactcccccgcggcgttctttcttggaacaaaactagcgcggagccacggaactccgcagtttgcgtagacttgaatttcctattcctcggacgatccatgtggaatccgtgagtagtgcgactcctttacgcaactggcgttatccgaagtgaatagctaggtggcgcgtgtacgcccatagcgtagcacccataggcggacggggtgcggctgcgcagggagctgagtggaccttgtacgccgcaagcgtagcagggtgtcagacgcgccggtttctgcgacgcagttagcgcagtctgctttggtgaatacacgatttggtgcagccggggtttggtaccgagcggagaggagatgcacacggcactcgagtgtgaggtaactataaaaccccgatttgtttacattccctcccccagaaccggccccgtgcgcggcggagactgcgagtcccgggacggcgtgggggtagaaagggagaacagaaccggggagtcggggctggttccct

SEQ ID NO: 25155 - DNA, 2300 bp, Homo sapien
ttatactaatgttgactcttaatttcttttctacagcctggatttgtggtatcatttctatcactgtcattagcctgctttccttgctaggcgtgatcttggttcctatcattaaccaaggatgcttcaaattccttcttacattccttgttgcattagctgtaggaacaatgagtggagacgcccttcttcatctactgccccatgtaagaaatgtttttaatgtttttaaaaatttaaaataaaaatatttaagctgaaagggtccttcattagcaagctatagcacagtaatctagtatttgtattgttttatttgcttataggatgaagtatttttttctccattttcagagttttaatagcaatatttttttaaataaattgaatcattaggtcaactttgctttcaatagtctttaaaaaaaactcattggattaaaatttgcaatatcagtagcagtgagtggtcttttttatctgtgtagcatatcaggttagcctttaggagaaatgcataagatatgttgtaatgattatgcctgtaggtggtatgccatcagcatctttgagcgggagtaggcagatacactcagtgcgctgttttacacttagctctttatacatgggggcatttatcttttcacctgtcatgccagtccttttcttctctttggggacacttctaattatatgatcacaagcccatattcctagtaccatgcttaccaacctttttaaaagttgctctctataacctatcaatagttagttaggtagatagctgtctatcaccagctaagagtatttaattcactcttactatttttacttcaaattatgaaaacaatggggatttttcttttccaaatataaaattgaagtattgagtatttcccttctagagaatttgggagacaggattatatttgtgtgttgtgtatatctcctctcttctgcactcttggttgagaattccagatttagtatctacagcaatatatggcattgctttttttttttttaataaacaggttaatgaatcttaaggctgtgaatatgaagtttttgtttcaccatttctactagccatcaagaatagcaacagtttcctttagaactgggcctagtaagagttattgaagtgagaacagtatttaagtgctgttcaacttgtttttgtattaagaagggttaactaaacctagctgttacctttttgagtggtctgatatcctctgagaggtttagatatctctttggttgaccactagttaacaggaaaagaatacaaataaattttagaacgaagaaagatacctaagtgcagttatctaacttatgttctataagattactgttgtgatacttgtacatttcataatgttgaaacataaccttttctatacatacatttatgattgctaaagctttaaaatatagaaaattacatatttaaggataccctcttgctaactttccacagtatatgcagagatagcgaccttattacctctgaaataattttataagagaagaaactgatgaaataatctgtacaacaactccccctgacataagttgacctgtgtaacaaacctgcacttgtacccctgaacttaaaataaaagttaaaagaaaaaatatatgataatcagtttaagaaagaattagattacagggaatcacaagtgactgctggtgaattagtttgtgtgttttgtttcatttttactaaatatttggcatgtaagtagatcatgttcacttcaatttacaaagaacccatcactccctattgttacttctggcttgattctctcactgtagtatgtatcttattcttatagcatttgacttggtgtctttgagttactgtaaaatgtagtagtattttggacaactgagtaaagcaaattaaatggaagactaagtgagataatatctaggggagcactttaaaacttgaaaggtattttttctgtgtcatttaggagattataattattataatttcaaaattttaaatagcatttcaattatttgtttagaagttttatttgttcttattaatagtctcagggtggacatgatcacagtcaccaacatgcacatgggcatggacattctcatggacatgaatctaacaagtttttggaagaatatgatgctgtattgaaaggacttgttgctctaggaggcatttacttgctatttatcattgaacactgcattagaatgtttaagcactacaaacaacaaagagtaagtattttttatttatttaattttataccata

SEQ ID NO: 25156 - DNA, 2300 bp, Homo sapien
gtgatcttggctcactgtaagctctacctcctgggttcatgccattctcctgcctcagcctcccgagtagctgggactacaggcgcccgccatcacgcccgtctaattttttgtgtttttagtagagatggggtttcaccatgttagccaggatggtctcaatctcctgacctcgtgattcgcctgcctcagcctcccaaagtgctggggttacaggcgtgagccactgcgcctggcaatgctacaaaccttataatcaaattagtaagcttaagtgattatattttaattaaaaaacagcatgtataaaataaaaatatttcctataatagctgattttaaagaaaataagtgatgaaaaaagcacataatctcttttatatacttacctggtataatcataaagaactctcttagaaactcaagactagtggctgggtgcggtggctcacgcctgtcatcccggcactttgggaggccaaggtgggcagatcaagaggtcaggagttcaagaccagcctgaccaatatggtgaaaccccgtctctactaagaatacaaaaattagccgggtgtggtggcacacacctgtagtcccagttactcagatggctgaggcaagagaatcgcttgaacttgggaggtgggggttgcagtgagccaagatcgcgccattgcgctccagcctgggtgacagagtgagactctgtctcaaaaaaaaaaaaaaaaaaaaaaagaaattcaagactagtaatactgacatcttttaaactaggcttgaatttttacaaataaatataaagaagcaatacagcataggtgtatgctttctgtgacactaatgtgacacttgacatgttttcatagtcatagtagggatatccatttatgaaatagaagttctcaataaactttccacagcaagggaaataaatttcacttaataaacgtgaagtcagaaaaacttatctatttgtgtggctggtaggcatgcaataaatgctttttatgcagaaaagttgcagtgtttgccactattgctggcagtactaattatgaaaacagtttaactggggtggttataccagccagtcacagcgtgcatgttactagtaaataggactgagaaggaatattttggtgtattaagtttcactggaatttggtcaggcagtcaacactacagttagtaaatacatttgaaaacaagtgtcagagtatcacaagccatttactgtctgaaataatgcctgtacatttcagcatagctttttgggttctggcttttcagacatcacaaattgtcagagaacgaggatctgcactttaagtacaattctgctctttatcattattgtagcttctaatttgccagctacagttaataaagttctcagtaggctgctgcaataagggaggagggggtctagagggagtaattttttttaaaaaaggctttctatccaaagatgaactctttccgaacttttatcttcatgctttccagtttttctcctcactttgcctgcttttgatttcagttccctcccgttgacctcatccggagcatcttttaaatctccccccaaacccaatttcttctttgtgtgtgtatgtttgttttgttttgttttgcttattttttaatttaactccagaaatcatttttctattagaatggcttctaaataattttaggaaattatttaagaattctaaaagacattcacttaagaaatgttcattgcactgctattctgtttaaattagcaaatatccatgcatttaattattgataaagcatatcctttgctataaatacaggaactgatgactcggttgtttctgaagatcgacttaatgaaactgaactgacagatttagaaggccaacaagaatcccctcctaaaaattacctttgtatagaagaggagaaaatcatagaccattctcacagtgatggattacataccattcatgagcatgatctccatgctgctgcacataaccaccacggcgagaacaaaactgtgctgaggaagcataatcaccagtggcaccacaagcattctcatcattcccatggcccctgtcattctggatccgatctgaaagaaacaggaatagctaatatagcctggatggtgatcatgggggatggcatccacaacttcagtgatgggctcgcaattggtaagtggactggaaaccactgtctatgctaatcttatggactataatatgtatgattaaatttggctggagcttaacaaatatatggttatgtatcactctggtcag

SEQ ID NO: 25157 - DNA, 2300 bp, Homo sapien
tagtacttattatttgttgaagaagcattggaatgtggctgtggtgattggaggagatgaggtctgagatgtgtgaaggaccagatcatgtagggtctctggaggccacattaaggacattgagtaagatgggaagatggaggagtagggttttaagcaacaaactgacatgatctgacctataatttataaagttcatcctagttggagcctgaagaatttatttgggtggtgcagaatagaaggaggcccctagtaagggcgttggctattgaaagtccaggaagagcaatggtgggtaggagtagagtgggaatggtggaagtgttcacttctacgaaggactcacctcctagtcaacacaagcttgacgaccctttgagcccctcctagttgcttttatatctctcctcacactgtacatatgattattctctggctcctatgtgggtcctgctcatgcattctcttctcttgctgtctcctcttcttccagaaacagcaggatccagctctactttgttttctgctgcctctaccagctagtgacaataagccatgggcattcgggaggggctgagaccccactcttccgtatccaggcctcttctaaaggggcagtctagtgataactaccccagaaaggagacccagaagccagggacgaattagaatacagtaaaactgaatataggaaaacattcccacagaattctctaaagaaactgacatgggaatcagtggcaattttaaaaattctcttttatacagtagccaaagtaactaaaatatagttattcaaagatatggaggaaacaggacaagttcatctgtctctttttagttttcttttcagatttggattttaggagttgctgcaagactgccagtgcctttcatctcctccttatgttaaaagtctatttaatttattctttctatcccttctatcaacaaccaaagactctacagaattttccatttattgccatgactatttcctacgtgaattgacttgctttttatcgaagtgtttataagattctttgtcaaagagagttttttagggatgcatgtgtttggctttttgagacatgtgacccaattaagttgtaatatagtcaatgttaacttttaaaaaaacaatattgatgtttcttaaaatgtgattttaaataacatctctactattcttgtacacagggatatgggggatcaaaacttagctctttatctcttggtcaaggccaagggcccattgctatgaagatgttagaaaaagctgtcaaggaaggaacatgggttgttcttcagaattgtcaccttgccacctcttggatgccaacccttgagaaagtctgtgaggtaaaaatgcaagtttatacttattagattgcattccctggatctaattagtaatatacataacattcgggtagctccattcccctctaatttggagcgttgcaggttagtgctttggctggattgcaggagagagaggctcacattgaaaaccagatctggaggaacagaggcgagcacatagccaggcctgggcaaatccctcttaacagggacaagggctcatccagtgagatggaaatatcctcaatcctgaggagcaggctgaaggaggagagtaaaccacagggtagatatacatcaacttactttttataacaatggcctaaagcaaccaaggaggactgttcaaggtgaaattcatgtggccactctcaactcaaaggcttcagaatgtcacttttctttaacttacttctctcccacttggccagttaccctgccacagtagagaaatctgaaacccaaagggcactgttcccacccaccttgcagtgggtcgtgggacttccctgttctggttggcagaaattccaggaaaaaaactccatgtagctcaactgagtaaacagaaagcctggcacttgatctcaacaaacagagaaaatgaatcctctggaattacccatgactctagcccactcctaactcccttctaaataaccatggtgatgatagaacttgcaccatccacccatctggctttgttttttctttacgtcacttagcgccagtttgttctggccgtgtctcccactagaatgtaagcatcatgaagacagtgactttgtctttatctgttgtattctctgctttccctccagcaccttgaacagtgaggcccataggatacaatcaagcaatatcttcactgcctgacacttttcaatggcctcccaaggcatgcaagacaaagttcaaacccccaacatgac

SEQ ID NO: 25158 - DNA, 2300 bp, Homo sapien
gtatatgctacattttgtttatgcatttgtctatcaagggacatttgggttgcttcaccttttgactattgtgaataatgctgctataaatatgagcatatatatacatatatgtatatatatatgtatgtatgtttgtgtcccagctttcacttctttaggtttgtaccagaagtggaattgttggatcataatatatttctattttaatttttggaggaactgccatactgttttccataccagctgcaccattttacattcccaccagtggtgcacaagagttccaatttctctacatcctcattaacacttgttaatattctgtacattaatccctcatcagatttgcaaatatctccttccattctgtggacttttttttttttttttttgagacggagtatcactgtgtcgcccaggctggagtgcagtggtgtgatgtcggctcactgcaacctccgcctcctgggttcatgccattctcctgcctcagcctcccgagtagttgggactacaggtgcccaccaccacacccggctaattttctgtgtgtgtttttagtagagacagggtttcaccatgttaggcgggatggtctcgatctcctgacctcgtgatctgcctgcctcggcctcccaaagtgctgggattacaagcgtaagccaacacacccggcctgtgtggattgtctttttactgatgagagtattctttgatgcacaaaggttttttattctgatgcagccgaattgtctattttttccttgtcgttttggtgtcatgtccaagaaatcactgccaaatccaatgtcgtgaagcgattcttctaagttttcttctaagagttttatagtttaagaccttacagttacatctttgatcaattttgagataattttgtatatgatgtttttaggtaaaggtccaactgcatttttttccgcatatggacatttagtttccccagcatcatttgttgaaaataaattgttaaggtcactatagtcttgtagtaagttctgaaatcaagaagtgtgagtactccaactttgttctttaatttcaagattgttttggctatttatgaccccttggggttccttgttaatttcaggatggaattctgccatttcttagcataaaacttttcagtggaggtcagttgcttttgacatccaaactcctgcccttttatagggtcctttaagatatatcacctgcttatcacctcagcttcttctctagactggctccaatcccctttatccaaacctactcatcgacctctcagaaccattttcactgcttccaatagctatgctctcttgtctcaggcctttgtatgtgacctgctttttgcccggcattctttgcctggcatttcttcttccttcacatttcagcttccacatcccttccatgccctccatgagaaaattagttggtgctttatgttctcactgaggactgccattcttagcaccgtctccactacacggtaagtgcttggcttggacaccccccagcctgtggcgaatggatgtcttggtcacatttgtgcttagcacaccacttttcatgtagtaaaccatctgtgaatgttggtttcaagaattgttggaaggttcctttactggtattcttccaaaggatagttttctggagtgtgggaagagtcaacagcacaggggttggaagcacatgaataatgaaaggtgtttactggatcctgcctcgcattactccactcgcccacattagcaatgaaatctgtaatcatttcattccagtgtttctccgagacctctgaggggttaaggcagcagtcctgggcatccggcttatttagaaggagggtgcggaagtgtgaggatctacttcagtaatcagaggatattggaggagacccacccagtgtctttggttattcaacgcacaccttagacctcacaacactggcagcagcgccccagaaagctcctcttgcgggaccgcgcgccagcttccgggtccagccccagaaggaacagatgaccggaaatggaacctgcgcgggcccgttgcttagcaacaaacgctgcccggacgctagacggctctggtgcggagggagctgagaccgctgcaagtcccggggccctgcctctatcgtcctaggggttccgcgggcaggagcaacccagaagcaccggtgaggccagcgcgtcctcgcagccatgagcagtgagcaggtgagagggctgctctttgccaggctcgccgccgccgcgacgcttcccaggcgtttcggaagtggt

SEQ ID NO: 25159 - DNA, 2300 bp, Homo sapien
tgttggccaggctggtcttgagctcctgacctcaagtgatctgcctgcctcggcctcccaagataatgtatcattttagtagtgaagaataaatataattctgtcttatcctgttgttatagtttgccatttacatttgtacgtgatagcactataaattttataaaagtacgtatgatatttgaatcaatttagagaacaaagataaattcctaatgacacagatatttcaaagaattgactttaagttggaggtataacagaatctgtaatatactaacgttgttctctgcagaaaaattaaaattgattgttctcatcttcccccagaggaaaatttgctgtggttagacaatgtatatcaaaatctactggccaagaatatgctgcaaaatttctaaaaaagagaagaagaggacaggattgtcgagcagaaattttacacgagattgctgtgcttgaattggcaaagtcttgtccccgtgttattaatcttcatgaggtctatgaaaatacaagtgaaatcattttgatattggaatagtaagtatatactaaatagtacctattttagttggtatgaaaagatgattaaaatgtcaagaataagaatgataaaggtgtgacaagaacttgtaaagattcctgttaataaaatgtaaaagggacctaatttatattcagatattttcataagactaaatgtatagcctcgggcacatacacaaaaactaacagcacagaataagcaaatgacaaatacaacatttgaggaatgtggagaaatgaatatacattattttcttaatggctaattgattgaatttttctggaacacaatctgatgggcagatagaattgaagtaatttgtatattttcttcatctatttgaaaaataccttcaagaaaataagaatagaaaggagaattgaagtaatttgtatattttcttcatctatttgaaaaataccttcaagaaaataaggagaatagaaaggtaaactgcataaaactttgcttaatacattgtttgttaaagaaatacatttggtatatgtaatgtgtaaagcactatgttagttgtagcaataataaatatatctcttgccacaagtctgtgaaaaagtgaaaacacccccagtattctacagttcaccaggtggtaggggtagaggattgttaaggtaaccggtttgttacctagtatattgacatgtgactcttacagagtgcctttgttgcatgattgtctgtcacgtttattctaaggatgtaaaatgtgtttgaacatctgcaacaactggaagagatcagctagatttatgtttagtataccttgggtgccaatagtttttaatgaagtaaatatattttatgataaaccaagaagagataagtgtttattttagtaaaaaatgtattgctaactatagtaattctttttagtaactaacttgcatcattgcctttttaaatttaaaggtatattaaccttatttttgtatttagttattttaaaattaatgtttttgttccacgaaatagattggctggaatcaacttgtgaatgaaaatgaagattttgcaaaatgttaaactgacaagtagttcatttaagaatgaatactatgtacatttcccagaaccgtcttaaggcgtgttatatagcactttcaaaataaattagaattgcagaaaaggccaagatactaccaatatgatttcagttttcatatattttgtaattatttttgtcaaagattcttcagctgacctttaaaaagttacctacttgcataacatctgcatgtttgaagtgtgtaaaaagtagctaacatttgtcaaaacagtagtggaatactaggtttggaggatgaatatacataagaacattgactattttcataaaatcctcttttgggggttcatccaaacagcaacgacaaaatacatcggaaagatttgagacattttatggatggaccttgttcatactccggaaaattgactcaggtaccttacccagtaaactggcagaacttactgatctctatacctctggctgaaatgtagcaagcactcagaaaatgtttaagtagattaatgtattacatttcttaccagagtgactaagacccactaaaatttattgctagaacttcggcttaattactatgccttccgcttttggggtggcattgtcacatttagtagtctcagttgaaggtaaaaatttaatcaggtttagttgttttagtagtgtggcataatttttatatggtgaaattaaaacggtgga

SEQ ID NO: 25160 - DNA, 2300 bp, Homo sapien
gagcaggaacatatatctttgacacggtgatgaatgagtttaggtaaatgaggtggatggaggaatgtattgacttctgaattttcctgcaaggccacagatgtactgcctcctcctcagcaccaggaattccttgttacttgaaccacagtgcctgagaccaagtaagtgtagttgaatgtccttgggatagtgtggtaagtcctagttaacaaatctgacatcaggcacaagggttaacaatctatttagggtcataaaagaaacacaaactatcagccctgcaccaaagaacataaggcagaggtgatcaggctgggaacagaaagtaggaatcagcagagttctgattcctgaagagggtaaccttcttaaagtcagaaactgatgaacaggtatggatgaggaggatggtgataagctggagctaaggcagaagcaggaaaatgcaagacatgacaatatccctaggaggctggctggttacagcagaggtattgtgaccaagaggactggcttacagtggtgccagagagagaaaagtctgtgtctaggtgtgaagtgatctgggactggattagtgacggggagtatggggtgagtgtgagaagattgctaaaagctggcaattgatgaaatgttgaaattaaggaggtccaaagttaaacacacaaccccaaaaccaccataatgatgtaatcctgtgacccccaagaggttactagttttggtactggtgctgagacctctggaatgcaacacctatgctcatgaaagaaaagatgggaacagtctcattgcttacggattcttataccccagaaaagttaattccagtgtgtggcattttattttcatcctaactttaggcttctctagtcagcccaattgttagcaacaagaaattagatagatggaagcaatattctccatttgacaaggtttaggggcaagacattattaacctgggaggaggagttaacctaagtaacaacaaacagacttcataaaagggctgtgatgcattctatacctttatcttggggaaaatgcagtaggaaagggaaacagctagcttcacaggaatttgcttggcttactgggatagaacaagaaaacctgtcctttatatgctaactgaacattaagtcttttgaaagcaagaggacgactccactcccagtatcctttcccacggaagggttttctgcaattatcgtaaatgtcctctgaaagcaatcctagattacataactaatcccatatatgtatgagtatgtgtgtatcctatacatataaactaggattatatatctatgtaaaacatttgtgtcttgcacagaactttgaaaatttccactgtcttcaaaggataacagatcttgagtaggttgctgagggctttcatctttttccttagcactataaatgcaaaatcggctattcagcctattgggaccctccctacactgccttcagtcagtgcctcagaagggacaccattcgcgacagcggacgttagcagtggggtctaggttccataaatccccaactgatgttgacactccgaggaacctctgccaagttgtagcaaactgggttctccacttacagggtacgttccggtcctaaggaagactctcaagaagagtcagaaaataggtctttggtaggcactgaagtttggtaactagtcgcaggcagctgggacgaattttgcggcttccttctccccggtctccggatattcacacctctcgaactgacctctctgaaggtgggaaggagtacacagagcagtagttccagccccgcgcgccccctctgcagcgccgccccctccgcccctccctcgcggcagcccgagtgcgccccacctgcgccgccacgccgccgcgcctccccgccccgcctcgggccagccaggcgccgcaccctctcaccgccgggccccgccccgcacacgcgcccccggccggtgccccgcccctcccgtcacgtgacagacccaccctccgcacccgttccgattggctctcccgacctagggggagggatctggcgaacggcgatgccccagacgcggctgcagttttcaaaccgcgactgcaagcttcggtagtcctctccgctgctgtcgccaggagtcacttcacgagaagccaggtcacaaccgtcggcccttgtctggaaaagtaaaagtggatcctgccacgttcggagctccctggcgcctcgcccggctggagctagagaactcgtcctgtggcggcccccggcgtggggcgggacagcggccc

SEQ ID NO: 25161 - DNA, 2300 bp, Homo sapien
tatgtggcagctactgtgtaataccctaggaatacacatccaagagagacatggtctttgccttcaaggggggggatcttgtaagcatcaacacctcccagttctaatgttgtggggagaaagattctttcactggcttcatcattttgctgcccaagtactataaatagtatactattcaaccaataaaatcagtgtctgctttgagttaaagctgactgtgggcctgaattttagcgatatagtcttacgctgatgccctgctgttccaaaaagggattgtgttgggagagtcatctattttcctgaggccatacctttaagttgcatgtgatgagctcattcctaattggaagcagatagtatctatgcattatatattcagtgtaaaagcatatgtatatattcagtgtaaaagcatatgccttttttaaataaagaaaaaactgaaatactttgctacaacagttggtgaaatagattgtgtgcatacctgtgcaaatgtatatatacatatacatatcaaacacaaggtgagttatttctaccattattttgttataggtaaatgtgataccagcttttttcttttttgtttgatgagtcatcatcatgtcactattttcaatttgttatatgaatacaattttaataatttttttcctagttgctttcttcccttatttacatcatgctatttcaaagcacaccatattaacttttataagatgaagaaaaatataaaaacacaaattatggtactaaaatcattctatttcattggaatatacaggataatgcaaatatgcaattttattctgagtgctatggacaatatattctgattcctataccataaagtaaaataccaatcactgatacaagtatttatttagatttagttcttatctacaagcaacttgtttttctacttgatattttcacaaagttccactgatttttttgtttgtttgttttgagacagggccttactctgtcgtccaggccagagtgctgtggcatgatcttggctcactgcaacctctgcctcctgggttcaaatgattctcctgcctcagacatttgagtagctgggattataggcatgtgtcaccacgcccagctaatttttgtacttttggtggagatggggttttgccatgttcgccatgctggtctcaaactcctggcctcatgtgagctgcctgccttggcctctcaaatgctgggattataggcgtaagccaccatgcctggccaagttgcactgatttttatattcccaaatttgaaatatttttcttaagattgcttgctgacttgaaggcactgaggtggaaggcaaggtttcatgttcacatgaaaaattccctaatgcatagaaaagtcaatggatttgcccttagccacacagcttatgaggtatgacaaacagagttcagtccttggtttcttctggctagatccattttatatgatagatgaagcagctaatctttagtatttgccaaactttcctttctgtactttattgccagcagctaactactattttttttttaaagactattagaaattagtggtaggcatgtacgtaaaggagttgctcagaaggccagcctctctctgcttaaggttatttcagtgaaggcttgaaccaggcagaacattttccctcaagttttggaatcatacatctgaaacacgtgatggaaacccaggcccattatctggtgaatggtttttctgataagagatgtaaatgttggctgataaaagctaaatcagaggaaagttatcttgaagaaaaatgaataataacttaaccaaagaactactcttataagggtcagtaacaccatgctttgatcttgaagaatcaaaagctatctcccacaaatatgcagcttatctcttttgtctatcaacacagtgaatccaggcaaacagaacaagacaaaaaacaaacaggctgagcactctcccctccttccttaactggagctacacagaaggagttgagtgatggtagatatcaggccctggtctgcggcttggaagtttcctgtgaataagaaaaacatcatcgcttcttgagtcacaaggatgataggatgagaaaaagaaaggacaaaggcaccagaggaggtatgccaaatgggaaacttttcatcactttccagataaaaactagcagtctgtgaaggcaactggtctgatttttcaggtaagaacatatgagaggcaggctgagaccaattttctaccaggccagctaattcatcacaatgacaagctat

SEQ ID NO: 25162 - DNA, 2300 bp, Homo sapien
ctgggaaatctaattccattatgatagtgtcttatgctggggggaagtaggttttctccatataggaaaatagatagtcacatgtaggtgttggtaatacgtgggtaatccagaacctagagcgcaggtaaagtggtatatgtaccaaatgttatggtatttggaaggcaaagaatcattgcttggaggaccagagttataggagcctcaggtgggattcagagaccagggagtgagtgatagtaagagctgcaccataagcagagtaggtgagtctctcttctacccaacagagtctattggtccataactagaaagtagtcaagagctcaagatgatactctattcctgcctggggataaaaacagagaggcttacattgttaagaagtctatttgttgtccataggctgtagccaactttgatgccaaaaagaggaaatatatttattctttctagatttcttattctttcttttcctcctttctttttctttttagagacaggatctcactctgttgcccaggctgattagcattggcaggattgtagctcactgtagcctcaaactcctgggctcaagcgctcctcccacctcagcctcccgagtagctggcactacaggtgcatgccaccatgccaagctaagtttaaaaaacatgtttttgtagagatggtgtctcaccatgatcttgaactcctggcctcatgcgaccctcctactttggcctcccaaagtgcttggattataggcgtgagccatggttcctggcctagatttatttttcttaatctcccagtggtgactgagcccactgtggacccattggccacctaaattagtgaggttgctggcattttcaagagtgttatatgaggaaggcagagtatcttaaaagagcttgggtttaagtgtctttcagatgagactttaaatcctggctgttatcacttcttctcggtgagccttagttttctcatctgtaacatgggcctaatgacactactgaccttattcttagagcacagtgacactcatttgatactatttttaaagcatcttctatgtgtccctggcacatagtaaccattctgaacatgcttgctattattgttgtttgctaggacactggaaagtcatagtgatttgttctaaaactgggctgggtttgcatgtccagaagaggcctggacagggtgatggtgatcctggagtgcctggcttgctgtgttcactcatccaattccagaatcagcccaaagctctgtggcccttcgaagcttcagggcaaactgtgtctgggttaagggaacaatagagaggtaattgcagccatcaaatgtagtgtgaagcttaaatctagtttgcatcttttcacagcaaatgtacctgacatgtaagaccatttcatctagttttcctggaggttgctggagagagatggtcttatagcctttgattacattaaaccagcaccttgtaattgcaaccactgacacaggtgggctaacagcttcagaaagcccctttctccattaaagaatggtggatctggactggggatttccctaccccaactctttccagtataagacaagagcattagctagattgatgattctatctgttttcacattaaaagtcaggtttgaaaataacttctgcattgataaccgcatgtttgaattttcattaaagctatattacgtttgaaaaagctttagtcctttttcacagtttgaaatcacaagtccacaaatttctctctggattagttaaaatactgtaagcccatttcagtaacctaaatgaatgctatgtctgatttatggtaatggtaagttggagttctcaggtagtgaccactctattctgagtaaatcaaatagcaagctcccctttctgggattgcagtcagcttgtttgacatcagcccactctgtgtgtgtgtgtgtgtgtgtgtgtgtgtgtgtgtgtgtgtgtgtgtgtgtgtgtgtgtgtgtacacataactcattctttggaattctcccatggaaaagcaaaggaaggaagctgaggggaggatggggcgattgcatcctgtaccctttacaggggtgtggccacgactgcctcagccgaggggatgtgatacattttttcacttaggatgcctggacagtgataagtcttgatgaaaggcaggagtggcttttagtgtcattcatactggacaggagcctcttgttagagacctgccggaatcctgtctagtatttcatttctagaactttgggggaagaggaagagaagcagga

SEQ ID NO: 25163 - DNA, 2300 bp, Homo sapien
aaaacacagctgacactgacttgaaataaaagagagaggatttattggcttcaagggtagagttcactgcagacacatctacctcctgaggttcctgagagggtgggacatcaccctctcaccagcagcttttcttccctcaaagttggcttcattggcatgcactgttggtccttgttaccgtaggcttatatccttccaatttagttatcctagtttaaagagcttatttttctgcagtaatacatccaaagccctaggccgagttcctggatcaacatgcccaacccagaaccgatcactgcggtccggaagatgactggctagttctgggggttgagggtgggaggtgtcagtaccctggagccacaaagactcattgtgggtgagggggaagggcagttcccataggaataatgaactgctgttaccagaaaaggcggagaaatggataatattgagcacacactcaaaagtcccaaaggaatggctatccattatttggggacttactccatatggatatagttaaattgtaaaattgaataaatcttccctaaatctggacagatgcaagggtgggtggggagggacacaatatatttacactttagcatttttactttttctcctacgtgggactggttgatgaagatgctatagaagtaaacagaaagccgaaagtattaatacagtaattttaaattttagtgccctctttaggcaaagtatctgggaacgctttcaataatccattttttcatcgtgaccacaccctgtgtgtgcgacatgagtattaccgtcttgcccttgcagttggggaaaccgaggcatgacactcccctattcagctttctggtggggttgaggaacagtgttgtctgcacgacctcagagggtctcctccaccctccgcgacacctctaggaatcctcctgtccttcgacttcgcagaaggagagcaactcaggctccgccgcagcctcgggactcgtcctccgcccagccgcacccgccccgttcttccgcaccttcctcagggaggtcccgctggccaaggtctggctgtccctcctgtcctctgcccccgcctcccttccaccggtccccgacgtgccgccagctcccagcccagcgtcccgcagggcggtgcgggcagatgccgccgaagcgtctagcgggaagggcgccggcgcggctggaggtgaggaggccggactcttcgctctccgcggaccggggcaccgcggctggagcggacgcccggcacccgggcgggaggaaggtggcggcagggagcggcgagagggtggcgacgcaggcgggtcggcgcctggagagcgagcggcggggagccgggcgctgcggggccgctcggggccgcgccgcgctcggccacaaacctcccggaggcgcaggacccccggcgccctcccgagcgcgggcgggagccatggcttcgcgcgtccccgctgccgctgctgactcgacacaatcggcgggtcgcgcgggggccgtggcgtaacccgggggtgggtggcggcgcggagccgcctcgagagctctgggtgtcgctgggagctaggaagatgccagcacaaaggcgagccgagacccagcccgctgcggagggcggcgggaagagccgctgaggggcgcgccgagcgcgctctgcccctgcgccgcgtctctccgggcgcttctcgcggtctcggggtcggggactgcagcgcagagactctcggctccgtggcagcggccgcagcagccgtgagctgcatgcaacgcgcggcggcgcccccggccgcctgctttctcctcggcgcgcacggaccggccgcagggcgccggggccgcgggtccgggcgactttgggggcgccctcccgccccgcggccgggtccccacccgcagcttgtggcgacgggcgcaaagcccaggtgagcgcgcggccctcgccgcaggtagcggacggcgggaggtggctttgtttttcctcccttgcgccccggcgcggtcattcatttgccatttcggtttccgctgcccaggatgtgttggatggtttggttctccagggaaactgggactttggggtctatttgagcatcagttgagggagaggacgcttcatttcctttttggttgggaatgtgccgtgaacatcctctgctggagcttggggcctggagcaaactggggctgcagatttagacgtagacgtttccgaggacgcgagactgcagaggtctgactctctcatgccttgtcttcactattagcagcgctcgggtgctttt

SEQ ID NO: 25164 - DNA, 2300 bp, Homo sapien
ccgtgcgcagcagagtgagcataacctgcaagcacaaagacattctatggtagcaggcttgacttcagagttccactggggcactaggtgcagagtaggctggagggtttggctgaagctattaccagtttggtcttcatcctgctcaatggaaaacttttcgttcaatgggggaacgattaaatgtttttaagcaaagacctgagataatcagatttacttttttaaaagatctggtagccatatgaaggatactttggaaggggtaataggaaaaccagttaggaggttatcgcagtgaaacagaatgtggtcttcatggaatatctaggatttccgtgaatgaaatgatcttgtttgataaatggggtaatgtctgagaactatttatcaactgaaaatcaagagggaaatcagcaagaaaatcggtatgtttggcattatttcaatcaaaatcctggcagaatttttgtaggtatcaacaagttgattcaaaaaatttgggagaaaggtaaaggaactagaaagttaaaggaacagccaaaacaaatttgaaaaaggacaaagttggaggactatactccctgatttcaagtttattgaagacttcaggtccttttctctaactctgtaattgcttaagttcttatacggtttgccagacagtgaataagggaaaacaaatgaaaaacacgaatttaatcagtttggttccctgactgctgcttaatatggagatttgaggagaaggtgaaaactctcattacacaaaaacacgtggatacatgtatcactcatctcttaattccactgataaaccagaggtcattgcaagataaaacatacataatgaaaataattggctgtttgcactgacgctttaaaatacattttcatttcctattaaaagctttatttggtccctttctctgaataatgtatgcagtgctcatttctcttcaccggatcggctcaaagcttgatgaatatggctgtggtttgatgggcagtctctgcatctcacattgaggctccgctatgaaaagaattagaatagcaagatcaattgtcaggctaagtaaatgagctctcatctcggatctgattgcttatatgagagggctgaagtgattcttggctgcactctcagggagaagagagaaatgcattttaattgccctggcagggataacaggtgttctgtccagctaccaaaacgcaaagccgcgtctttgcactatagaaggctttcccttaagtgagaatacatattcttaaagcaaaacaactcagaaacgctggtgtggtgatgcacgcctgtaatcccaggactttgggaggccgaggtgggcggatggctcgagcccaaagagaccagcctgagcaatatggtgatgaccccgcctccacgaaaaaatacaaaaattagccagacgtggtggcgcgcgcctgtggtcccagatactggggaggctgagatgggaggatcgcttgagctcgggaggtcgaggctgcagtgagtcgagatcgcaccaccgtaatccacccttggcgacagaggaagaccctatctcaaaaaagcaaaccaccaaaaaaaccagggacagctcaatgctcttttccgtttcatagctacttacactcagatttacaaatacctattaacttgtagacagggcaagaaataatttatgctgaagagacgaaagacctgaaaacagatttctgtgttttactctccatgtggccatcatggacgaggacgaagagggacttgatttttcctttaacgagaagaatgtttaagctctgaatttttaaccaatttttatgctcgttactctgctgtagggtatgtatttaccaagattagcagaacaccgcgagttcaccaggcggagacaagtcactgtgaagtgggcagcacaggaccccccggagggcaggcgccggaaactacatatcccggcgtgccccgctcgcgagcacagtggagcctgccgccattcggttcacggcgctacgcattccctgagcgccgccggatgccggcctgggtcccgcccagggctgagggccctcctgggccgggaaaactacagttcccgacatgccctgccacgggtgcgcctgcgtaccggagctactgcgccggggagcgggttggtttaaaatgctgtgttagttccacggaaacccgctcgcctgctgcagtacggagcctcaggcggacagatggactgtaaggtgaggctgccgggccccgggctggtgaggggtggtcggaggctcgcgaggct

SEQ ID NO: 25165 - DNA, 2300 bp, Homo sapien
gccccatcacttaaccactaggatttcaacattgtgttagctgcctggcccctataagcaactgcatttgtgaccttaatttagaagttaggtaagtgcttggtttaccttgttttttacagttaatttcttgttgaactatagcatatatactgaaaagtacacagggcacagcctgatgaactttttataaagtaaatatagctatgtgatcagcactcagatcaagaaacagaacatccctaacacccagtaccctcttccagtaactgtcacccacaaggctaattaaccatcctgatttctaacaccccattcaaatgttaacagttgctgaaaatgtccagtagctagtgaaagagatgtttgcactctacagataggaaacaagatattgagagatggaactgttgatttaaataaaattttggatgaaaattttcctgatttaggggtaggttcggtaacgttaattgttgtgtgtgaatggtttggggataagaggaagcaaatatggaaaaacgtataatttggagatttataagtatatattaaatgattttgtcctccaaaatgataattttctttgaagagagacttgtgagtatcatctttatgaattagttttaaaatataattcaacatataagaattccatttattcaacttttataatattgtgtcagtgaaacacaagactctgcctgttctccaccccattccattcttctggtctgatatgtctgcttcttgcacattgacagttctaattatacacattcaaaagggttttgaatgccaggtaccacaattcaaatatattagccacaaatttttgaattacattagccacaaaatctcactgttatattcatgagtcatgtccatttggaggcctataagcactagaaaccaaatgagttatctcagtacatttaaatggctacagagtgtatatcattttttgcatgattaaacttaggattgctttttgcaagttttaaagattctctgtaatttttttttttttttttttacaactcatgaccctttttcccccttctggagtatataaatatgtgtaaatatatatgtttaaatgttttattttttaaaattttttttgtatttttgtttttcctctagataaaagttaaacagctagaagaacaagtacagtcttttactgacaccagcttacagaatgatcatctacgcaagatgaataagtatttacagactaaatatgctcaggtgtgattaatatctacaaaagcggattgctgctatatttcgtttttaagaaattgtttgatgtctttttccccactttaccacacaatcccagaaagataaatatgctgtcacttgactcagtttaacaaactttttttcaagcacctagtacatacaaggttctgctaaagcctcagaaattgtaaagatacctgaagcaggattgagacattcaacttgcttattatagttaggaaatgtactccataaactttattagagaatagaaagttatgcttttcagaaaaatagattgtattactgaacattcatagggagcattattatgagtagaagcagtgagaaatgctttcataaaggcagtgctttttaaaattttggcagttgtgaggaacaagtatctttgttttttgaattaaaggcaaactcagaactcagtgccaagagggtacacctgcagcaggcagatgctcacctgaaagaagtattggtaatgaaagtgcttacttgtcagcatggtggctcttgaagctaaaaacctttcatagttcacataatattttaacgaatgaatagaaaaagttaagcaagataacaaaaacatttagtgaagaacataccccaggaaggtgttaccagaagaaagtgactcatttcaattatttacaaatttagcactcatatcattaggttattttttaaatcattaactcttaataaaagcatatgtaacttctgtgtctatgatatttgtgtatctatacccctggtaaccaaggaactaaaatatgttttcaaatggaatactcatagagttctaaccacttgactctgctgatgagtgatgaggtcacagagttgttaaaggaggcctcattagatgcgctctctgacagggaagttggcataaggtctgtttctttgctgggtcatattttacagtgtgatctcttcactctgaaagcagagaaacacattttcaatatattttccattacggctccttctagaacactgtgttgtttctcctagtaaaggggcta

SEQ ID NO: 25166 - DNA, 2300 bp, Homo sapien
acgcccagcctaaagtaacattcttgacagaactgtagaaatagagaacaaattactgtacatcagtgtagtatgggaaagaaaagaacaaattagtggttgccagaggacaggatgagtttttggagggaagagtgaatacagagatagcacaagggaattcttttctggtgatggaaattttgtgtcttgactgtggcagtggcagtcatgtgaatatgtaaataggataaaattgcatggaactgtgtgcatgcacatatacacatgcatccacacatagatgaatgaaggttgaaaaaaatggcaaaaattgaataaattatgtgatctagttagtcaagttaacaataatgtatgcatgtcaatttcctggttttgatgttgaactacagagatatgagatgtcagcaaaagaagcaggataaaggggcggggcgtggtttctcgcgcctgtaaccccatcactttgggaggccgaggtgagcagatcacctgaggttaggagttcgagaccagcctgacaaacatggtgaaaccccttctctactaactacaaaatttagcttggtatgatagtgcacacctgtaattccagctacttggggaggctgagtcaggagaatcgcttgatcccggaaggtggaggttgcagtgagcccagatcatgccattgcactccagcctagatgacagagcgaaattcagtctcaaaaaaaaaaaagcaggatgaagggtacatcggactctgcactatttttgcaacatcctgtgagcctaaaattatgaagtaaaaagtttaaaaggggtaatatttaaaatagtatgattatctgaactgatggtgtggctctaccaaaactgtttcaaggatatgaggttctaatactatacttctaattaggattcattctgctgtaacactgttttcttgaattttcttgtatttctttctaaatacactatttagtatttatacatctttgcttttataatatcaatttgtgctttttttaatattttcaaaaggaagctagtctcataataatttctctcccattttacatctcagcttcatagatagtcttattctccctattcttgtgttttcatggagattaatgtattggatttgtctatgtttattcacacagatatttttgttgtagtttcctttaaaggaataagcagctaataaagatgggttctatttatagtagtgaataaatatatttaaacatttaaaatttggtttctaaatttctatgtcttattctaatcactgatttgtaatgttatttattgtttcttttttcctacttaggtgaaatctattcttgaaagaagtaaagaggagctgtcccgaacagtgaagtgtcgtaatgcggccctgaaagagagtcagaagttgaaagaagacctcgaggctgtggaggacagggaaaacaagaaggcaaggaatcagtcccttctgaccgtctgtcactgagaagaagcacttatgaaatctttcatgagccatatgtttcgctttcttgcttccattagaataaggattgatcaggggaggatttctttttctggagaaaagataattttagaatagtttaaaatttttcccttaaaaatacattatatgtatctaactcccaatgttttttttttaactttctgtcttaaatactcaaaagagaaagttctaattttttcttttgaaacacatctgatcttggtaataataacctttatagttatgttttattaatgtggtgtaagatttctatgatgctttctccttaacagtgtgtgtatgcttagtgggaatagaggtcacatcccaaacttctctttgtcagcaagtgctggattttgtctctctgaggagggctgtgagttacctcattcttcagcagcttccactttctcttacagtctttttttctcagataattctaatgcgtttcagatgtattattctcatctgaccccgtcagaagacagctgagaggccagcctggcgccacctctggacgcaggttgtgctgagtcaggcctctctggttaatgtgtatgctgtaacatgaccacagttgggaagctgcagagttcaccaacttttctggggatcagcttttctttttctcaacaataacttaagaaaccacctaaaaataaaatatactttaattattcccactagcatcctactgtgtctgcttgtctgctttccatgctctttcctgggagtaatgagatccacaagcagaagagtaaccagaaaggatcaaatgtctttgtgt

SEQ ID NO: 25167 - DNA, 2300 bp, Homo sapien
agaaatggcagggctggacaccttatgaaacagcacaggccatgcttacttacaaaaatgaacaggacatgtgagcagatgaaaagtagcctttcttgattagagcagagactttggaaaatgttagagagagagtgttagcttaaatgggaccacctgatggatggccttagttatagaaatgttggatgtgtgctcttaggtagaaacggagcactatgggtttctgagcagggggtggtatgatagaagcatgagtttaggaaggttaatgtaacagcagaggacagtagaggataatgaagagaaactggaggcatggaggctcgagaaaactataacagttaattcgagtattagatgattagggccaagcaaagtagttcagttgaaaatagaaaacaattaagtcagaaagcccattttaatagaaaaaaaatcaaacaggccaggcgaggcggctcatgcctgtaatccctgcactttgggaggctgaggcaggtggattacctgaggtcagaagtttgagaccagcctggccaacatggtgaaactccatctctactaaaaatacaaaaattagctgggtgtggtggcaggcgcctgtaatcccagctattcaggaggctgaggcacaaaaatcgcttgaacccgggaggcagagcttgcagtgagccgagatggtgccactgcactccagcctgggcgacagagtgagactccgtctcaaaaaaaaagaaaaagaaaaaaattatcaaccagacattaaatgttgtatcctggagagggagggattaaaataattccttggttggcatggctggtctgtgtttcaccaaatttgttacgtttagtagttgcaattgacagaccattcacaaaatcaaactcaaataatggtatataaaacaattttgtgaattgcaaagcactatataaatacaaatgttataaaaagcaaattctgctttttatagaagaattagggaacataaaggtgtgctaaatgtagaaatgtacctttagtcggagatcattgttaagaatacttacagccgggcacagtggctcatgcctgtaatcccagcactttgggaggctgaggcagggggatcacgaggtcaggagatcaagaccatcctggctaacatggtgaaaccctgtctctactaaaaatacaaaaaattatccaggcatagtggtgggtgcctgtagtcccagctactcgggaggctgaggcaggagagtggcatgaacctgggaggcggagcttgcagtgagctgagatcgcaccactgcactctagcctgggctccagagcacgactctgtctcaaaaaaaaaaaaaaaaaaaaaaagaatacttacaaaatgaaatcatttgaagaaggatcagtgacagtggagaacagtgagagagtgacagcagtgagaagttggcagcagcaatgggctcagggagcactgcctgagtcaagtttgtcttgagtattaaattggaaagcatttgtaaagtaattatcacagtgcctgaacataatactcagtacaaagtaaatgatagttgttagtgcttatccagttttagaaaggctgtgattgaggtaactggaatatctaacaggaagttagttgggtagtaataaaagactgtagtgtaaagttaggatctaaaagaaggaactagtatagagagaaaaggtacagatatccttgacttcactctttgctgtgttaaatgctaccatccatagagaataccaccttcctgtcttctcccttctcaactacctcctcttcctaaagttttcaagtggcaatggtttaagggcatattagaaggcgtgaacgctgtaaaattatttaagtaactactatgcagtttttttttcacgagagaagtttattaaaatccttaagaacaaaaagcaaaattataaaaatatatgccatggcagtcagtacctgacagatatttatataaactgccatataattcattttcatttcttcagacatgaggttgcaagtgacagagaagagcttatagcatgataatcacagagtaattgtgtgtgccagcctctacttctttctttatatgatcttatttaatttaattgttatttgtattctatgaagtaggctatacacacactgttcagatgatgaacctgaggcttaaggtagttaattgctccagatcactcagctagtaagtactgaagctgatatttggacagatgcctgactccaaagtcatgctcttaaaatgcaaatgatgaatatacatttgcattc

SEQ ID NO: 25168 - DNA, 2300 bp, Homo sapien
cactgccctgtagcattatgaagtgacctccttacctttttaaatatagttggtctgaattctacattgtctcatattgagattgtgacacctattttttttttttgtttgcacctgcctgctatacctttgtccttttattttcagctttcctgaatcacttgattttaggtatacatcttgcattcaacataaggttgagttttactttgtgatttgatatgaaagcagggtttttgacctatgcatctatacacactatatttttaaggcctatgccgagatataaagtatttcatatactataattttcttgctgaaagttaaaacacgtagatatattttattgaacagtgtcttagtccgtttggactctctaacaaaagaccttagactgggtaatgtataaacaacagaaatttattgctcacagttctggagattaggaagtccagggcaccagcagatttggtgtctggtgagggcccttttctcatagatggtgccttcttgctgtgtcctcacgtggcaaaagggacaaacaagcttcttcagacctcttttacaagggcacaaatcccacccacataggcacctcccaagacccacctcttaataaccttgggcattaggtatcaacacaggtattttggtgggacaccaacatttcagactgttagcaaacagcatttctagaatgaaaatcaaagtgatacagttggaatgtagaacccatacatgataaagatagaatcagattttagtaaagaaaaaggctcattaaaatgactgcattgtgtttagtccttactcagacaggtgactttagctactgtctacagaagaaatgtgctgtggatacagccttgagtcagacatggttcttgtcctcatggagctcagggcttagtgtgagtaaatttacatggtaggtaaattctgctctctcgttgagcagactaaatatattaattggatttctgataccagttattggcttagagctcagtgataaaaacagtctcttaattaaacttgtccgaatcctcctataacttggtaattttaggcaatatagtctcccctcagtgttcatgagagattggctccaggacacccctcataccaaaatccttggatactcaaatcccttatataaaatagtgtattatttgcatataacttatgtaccttctcctgtatactttaaatcatctctagattacttataatattaatggtaaaaccacaattacttctgcaccaacctaataatacaatgtaaatgctatgtaaatagctgttaaactgtattgcttcttaagtttgtattatttaattttatatatatatatatatatatatatatatattttttttttttttttccccttaacatttttgatctgcagttcattgaatctgcatatgtggaacctgaaggtatggaagactgtcataatttatatgacaagttctgtaaaacagatagttatttaattcttgaataattttttatttcaccacttaggatacatctgtgatgtcctctatacttcaggtttttctgaaacgaaaacatgtaaacttatttggaatttattagactttgcaaactactttaaatgtggataaaaattcctgtaatttcccagggctttaaaaattattttgttgtaatgaggttttagaaaataacacagtattattttatccttttcttagcctgtttctagtgaacactaaaaagagacttttcaattcaagaaaaaaaagagagagggttcatatatcctcattatttttgtctttttagttctccgtagtttagtagaaggtgtgaaagtaagttttggataagtacataaggtattagaaatcgaataggaagcatacttgctaccaaaggacagactgagagagatataagaacttattaatagagttggccacactaagaattgactgtggaatcatttgctttgaatgaaataaatgagatcttacatagaagatacacatctcaagcttgcatatagtaactgcttcttgtctgtgtattctccagctcctgagaatgttacctgcactatacctgatggcgtgccaatagatatcacagtgaagttgatggtctgccttgtacatctcaacattcttgaaccacttaatgtatgtaacaagatctgcacttgagatacttcagatcaaatgcaccatctcttttctttagatgtcaagaaattataacttgaccctagagtttcacatttcttaataaccaaggaggtaacaataag

SEQ ID NO: 25169 - DNA, 2300 bp, Homo sapien
tatgaagaaaaacaaagcaggaaaaagggataggaatttgaggtatgtggtgggggtgtgttattttaagatagactggttagagaaggacataattctctgtattatggtcatactgactaaaggtgaactgaagtaggtacgagaacagatattcagggaagagtatcacaggtaaaggaaacaggaagtgcaaagtatggttagggaagctgaagaattaaggggagcagtgcagagaggtatcaggaatagatcatttagcccttttgggctattgtaagggctttggcttttattctgaatgagtatggaagtcactggaagattttgagtagaaaagtgacatggtctgacttaaattttaagtgcatcaattctggctgctcttttgagaatagattgaacagtggaagggcagaagcatggagaccagttaggaaattactgtagtgatacatagaagggaaaatggtaacgtggaccaggatggaagcagcaggaactggtacgaagtaatcagattatgtatgtattttgaaggctgagctctcaagattttctgatgtattgaatatgaggggtgggttggggaggtggacagggtatagaggactgaaccctaaggcacttcaatgtttagaaatcagaaagaagaagaaacagctgggagactaaaagaaaatggccagtgaagtagcaggaaactgagaacagcatgatgttctagaatttaattgaagaaagaacttcaagtaggagggatgatcatctgtgtgagatattgcagatagatcacgtaaaatgagcactgagaattgacagatttagtaacaaggagattggaaatattggcagaatggggagaggaaaagttgattggattaggttaaaaagagaatggaaagaggcattggagacggtatgggggatggacaactttgggggaatttgcaaggggagcagaggaatgggttgtaggggtgggagaattttttaagttgggaaaaattaccatttatctttatttagatgggagtaatcaaaaattgagggacacgttgaagatttgtgagggaagagacaattgcctgagcaatatccttaagtagatcatagggaatgggatcaaactaggggttattttcatgtatacaattatttatccttgataaaggggaaggcagatgatatggccaaagatactggtaagtaggtagatgtgctggaaatatgtgggatgttctgatttaattctcttttcttggtaaaaatgtcaagcaaggccatcaactgagagtggggactgggagactgctggaggtttgaaaagagagagatgtcaatagttgtctaggacattactgccccacagactggcagtatttgtatcacctggaagcttgtcagaaatgcaggatctcaggcctgccccagctctactggatccgaatatgcgtttttacaagatagccagttggtccataggcttatttaggtttgagaagtactgaaataggtaactgtagtaatactgctcatcagtaccatggacctgcttgaggctattggtcatcagtttagagtgagaccagtcaacatggtcagctgggcaggtggtggtgaagagtagatatagttggattttaaccaggcttggagttttattgagtgattttgatcaagagagtgcagggcaagagaactgaggatgtatgcaaaggaatagctataacgttgggccatggagaaggaagaaagtgagcccaggcggggtgtaggcaatagtgaaaaagtggtaggacctatgctttgtagatctgttgaggtagaagagttggtattggattacatagggaatgagctggaatgataggaggtagcatttggagagtgagatgcttgaaattatgacactgttttactgactttgcacattttttctggatcagttctgattacgattttaaggaaatacacattcctctcaaattctaagaaaatgaaaatcactgttcattgttagatagcctaagcaaggaaatgagttttataattggaattaagtaaatattcatccattttgccacttttttttaggagttactatgaagccaatgatgttacttctgctattaacataattgatgaagctttctcaaaacaccagggcctagtctccatggaagatgttaacatagcagctgaactatatatttctaacaaacagtatgacaaagctttggaggtaggaatgcttatgtgtttctctgttaagttttgcatgtgtttctgtgttc

SEQ ID NO: 25170 - DNA, 2300 bp, Homo sapien
aaatctcttccaaagaagtgggggaaagaaaaacagaaagattgaaatttcaagatatgttgcaacagtctgacctctaaaataactttcatgtcattaaggtgttccatagccccccccaaaaaaaaacaaaaaaccaaaacacacacacaaaacaaacaaacaacaaaaaactaccctcctaccccttgttcactgcttcctgttcttcataacatgaatctatatctccagaattgttattcccatattccagatagccagcaataagacaagatagtctaagtcatttgggtcttaggagagtattctccttacaggtaaccatcccttctcacttgatttcttttcttttcccctaggagagttaggactgaagattcctaaattcctcttagacacaattgctccactgtctggaaaaacttaggggagaatttccctataagtggtttaagtggattactttaacacactctaccctgctcaccttccatattttatacccaggtaggactctgaggatccttcctcatgagaaaggggaagacttctagctgcgagatatttttttttctcacttggcagtcctgcccttgcaggtcctggcccctcattctcccatccttttgctgtttattctcaccaggattgtcataaagatggctaggtgatactctccctgtaacttgtctttaaccttagcttcatattgagcttcattcccctactccagctcccttgcccaaggttccaaaggcactttcaattccatccaatataattcacaaatgtgttttcagcacaaattattaggccatacagtagggtttacaatgatgcatcagttagggctgttgccaagatatttacagctagtgtctctagaattggacaaatagataattataatacaagggaaaatataaatcacaggagtgtgtagaagttgaaaaaccgtaccattcagaggaggcagtatattatagttccaagcataggacctggagtcagaaaccagggttcaaatcctggctctactacttattagatagagacaatagcgttaggaataacatccacttagaaggaagggttattttgagatatgtatgtaatatgtataaaacagtagatggcctatgtatttattatatagtaaatgggcaacaatgtgtagtaaccatatcaagtatttggttctttctgaaagtttgctgttaggaaaggaagaaaacttgggtgggagaggtggaacaggaagcccaggtgaacgtatttacagactgagacggtgcttgaggaaagggagagtttgaggattccgggtgggagcagggcgcggggcggtgggagcggggaggaaaaactggcgggagtgaaatttaaagcatacattgggggaggattttagctttctgtagcaggagagaactggaaagtgaaacatgcacatggcagagcaaatggttaaattaagaaaaaaatatcacacagcagcgaccaaattaatttaaagaaccttcagaaaagaaaatggattgggagaggccgggcgcggtggctcacgcctgtaatcccagcactttgggaggccgaggcgggaggatcacgaggtcaggagatagggaccatcctggctaacatggtgaaaccccgtctctactaaaaatacaaaaaattagccgggcgtggtggcgggcgcctgtagtcccagcttctcgggaagctgaggcaggaaaatcgcttgaacccgggagacgaaggttgcagtgagccgagatcgcgccactgcactccagcctgggcgacaaagcgagactccttccaaaaaaaaaaaaaatggattgggagaatgaaactaacacttagtgaagaattgagggaaattacctaggttaaagaaaatatatttaaagcacttttttttttgagctatctaataaccttcaacgagggctgaaagacgcggcctagggagtcagcatgggtcgcgcctcccatttatacgtcccggtctggcgcgcacgcggaacctgagtgctgcagctgcggcgcagaccgggcgagtttcccagaaggacgccggttccttgctcttgctggccccggcgaggtagcttctggaaggcgctgctcttccggttctctgtcccggttcctggggttgcacagacagaccctgtaaacatgtcagggttcagtccggaactcatcgactacttggaagggaaaatctcctttgaggagttcgaacggcggagagaagagagaaaaacccgcgagaagaaagtgaggcg

SEQ ID NO: 25171 - DNA, 2300 bp, Homo sapien
attttgccgaaggccttttctgcatctattgagacaaatcatgttgtggtttttgtcattggttctgtttatgtgatggattacatatattgatttgcatatgttgaacctcagtaaaaatttaatatttcaatattattatatactttaaagtcctggggttttaaagagagtgatgtaatacaattccagggtattcatttactcacctaaccgttgacatttaaacaaacaagtctctcatattttaacaactacaacacttttccttgactctacttttaactctagtaactaccttctttcttttcatagctgcgtttccaagagcttgctatactcactcattttcctctccatccagtcccttctaatctgactttctactaaaacagttcaaatgctctatagacctaattttatccaatgtgtcccttcttgaaacactttcttctgttgcttccatactttgctgattttccctcaccttcagggtctcttttgtagattcctgtatgtggctgttacatgttaaaatttctcaaagctcaagtttttggcccccttttttcctcatattctaaactttactgaggtaatctcattcacttctatgccaacaactcccaaatttacatttccttcccagatttctcctttgagctccagatctgtgtatcctattgcatactctccaaccccacgaggaaatctcaaagcctcctctaactcaacacattccaaacagaatgatgatcttcactcctccatgcctcggtttgatatcttggtgaatggcactgtaacccactcacctgcataacccacggacctagcaattggttttgaaactcccatctccttagcccccctccccgtagtacccagtacattaacaatcccttataaatctctctcagatctacccataatctgtgcatctgtgctaacatcgccctaatccaagttaacatcttttcctgcctggactactgtgtaaccacctaactggctttgcgcagccctcttttctagctcagtctctcctccccactgcaaccagaataaccttttaaaaatgcaagtatgatcaagcttctttgatgcctaaaaccctttaatcagttagcattacttgtagcctaaagatcataatctgactacctctccggccccatcttgcgtcaggcatcccacctgctccctctacgcctggcataatttcagtacctttaaagtgccccattcctagcacagctgttcacctttttagacacacttctccctctgtcttcctcaggttgcctgggtaactcctattcagttgactggatgtaaggtcatttcttcacagaagacttccttggctctcagactgaatcaaattccctttttctatactttcatagcactcgctatttcatagaaatgattgttcacttatatgtacacatttggttgtacgatttgattaatgtttgtcttgcccactactctattttaatgagggcaaggactgtatttattattcttaccatttcatcctcaaatcctgttgcagtacctggcacatagtaggcactttgtaaaagtctgctgaatgaataaacagaggaaatgaacaactgaagggcagaggtcatagtaacttgcccagggtcaagatggcaagactgagactatagccaggtttgctaatttccagtcgagatcaccagccttctgaataaatatcttgtcctaaattttgttctaaatcattggaaccaaagcaacgtcacaactcaagtccaatttctcggcctaccattttctacagatggcatttattcagcaagggaatgttgtaggtatagtaatttatcttttttccatgaaacatgtgttatcttcttgctctattttgaagagatattatgataaatgatgccactatttaaaacttgtaaagcttcttgaggttctcagaaaaaagtacaaggtataggtcaaaaagagtaattttgtctctcacaaaagaattttctgttcaaaaaatgctgttaacttgaaaaagtcatatctccaaaagaacgttctaataggtgggataatcatcatcatatttccagctataatccatcatatttccaggtgtatcccttcccttaaaagtaaaaaaggagaaaatcactttgctgtgtggaagtgctttgtgtgttttataaaatccacataaaatgttcgtggttcaaggagtggctgccgcatttctaaggcaaataagcttatccctgaagaagcttgaagatctgactctc

SEQ ID NO: 25172 - DNA, 2300 bp, Homo sapien
atacttaattactgtaaattgcatgtaactttttttaaatcaccaggttgttgcttagaatatgctaccatgttggataaagaagccaaaccatacaaagttgatccttttgtaattatcattaagtttctgttggggtaagttttattatctgtgataatgattttaattgtgttttacatgtaacattatatttggttccataatgcaatataaattttcatacagatttggcagttgacttgtttcattaaatgaggttttttttttctcttaggcaaaggtctaataagtatatcaatgtctacttcaatagtatcatttcaaaagtaattattcactttatgtatatcagtctaaacttagactgcctttaatgtttgtaaataggtgtatatggtccatgatctgtgagtatcctagattcaaacgcaaatcattacagggtattgatgaaacagtgcctctctgatcacttttaaaagtatattttagacctctctaccctagttaacattccattcttaatttagtcacattttcagatttttggttaagcatcaatatgtagatctttttttccatcattacaactaacttggctttctaaaaaaaaaaaaaaaaagaacatattactttctactagtatcaatatagattagtaaagctatactgaaatgcagatcttcaaagatcagtaggctcacttggaaaataaatgacttgttccatacaaagaattaaaaatttgtttttcagtataattataaattaagtatcatggaactttagagactctcttgaatagtcagacacctcaaatattaagtccttaaatttcagttgttgggttttttgcttttatattttcttttctccacaggtataaatggtttaaagaattgtgggatgtattattgttaccagaattagatgccgtcattttaacttgtcagagtatgtgtttccccctgatatccttgattctctttctgtttggaacgtgtactgcctactggagtggcctactgtcttctgcatctgtgagacttctttcttcattgtggctagctttgaaaaggtaaagaatgaatgattaacagctttcttattgctttaagaagaaatatatattctgataaggaacctgaaattaattatttttactaaactattttctaaggaaaaatatataactagcgaaagtatgggttagtgttcaaagttatgtctgtgaaagctaatcatttattaagagttaaatgttacatttgattttgaccttagcgctcaagagttaataagaaaagtttgacaaattacgcagatagttttacatttcgtggttgtgaatctttcccaggagggattgtttctcccataatattgcttttatatgctgacttctatattgaaaccagggggcaagagactgtaaaccagatattaggatcagattagatgagatatataaaagctccaaaaacattgcctagagttttattatgggcccaatgacacagtttgaatctgaagttactggtaggctttcctggtaaatcatcaatctagtgcccattgccactcctccttaccagacatgtcatgtgatttcctgtcacagaggggattatggtgggtgtgatgcttcttcctccacccttctgagatgcttcagataggggttctgatagtaacaccatcaagggtctgagtggtctctaggctttaagaaatagaacatagtttctcctcctgtcaagactggagatgtatggcacagagtgtataattaatgattatctttggtaacattttttcacctgtagtacaagtatcagctatagtattatcaaaatggtagaggagttatcacaatacattacagaacttaaaatcaaatatttgggaccacttgcctttatttaaaaaataccttgttgtttaccttatgtatttgcatataagcaagagagactgggagggtactatattgttttcttcttatatgtgactatataaatatttgttaatatatattttaaactttattcttataattccagaccctctgaacttcctaaagatatcaagatgatatcaccagacttgccctttttgacaattgtcttgatcatagttagttggacaacttgtggagcactagccatacttctttcttatctttactatgtgtttaaggtatgtcaaatcagtaaagccaaaatgattgagctttgtattaggcacatacatgtaggatgttccgtaggcattgttaacaaaaattctcataaaca

SEQ ID NO: 25173 - DNA, 2300 bp, Homo sapien
gctcactgcaacttctgcctcccaggttcaagtgattctcctgcctcagcctccccagtagctgggactacaggtgcccaccactacacccagctaattttttttgtattttagtagagacaggggtttcatcatgttgcccaggctggtctcaaactcctgagctcaggcaatccacctgccttggcctcacaaagtgctaggattacaggcgtgagccaccgtgccctgctgatatgaagatgacttttgaggtctggagtttgagaccagcctgggcaaggaggccccgtttctacaaaaaaaaaaaaaagtttaaaaagaatacattagctgggtatggtggcacatgcctgcagtcttagctattcagcaggttgaggtgggaggatcacttgagcccaggtgttcaaggttgcaatgaactacagttgcaacactgctctccagcctgggcaacagagtgagaccctgtcttcaaaggagaaaaaaaagaaagagttcttgttaaggttttttcatgaaaaacttgattgcaatacagctgattgcaaatgcttttggagaagaatttaaaacaataactgtggatgacagaaacttatcatagtcatggttaaaatctgatgaaagccccaaagtgataaggaaattttagttatttctgttacatgcagcattttaagatatcacctagaatcatgactgacagcatcatatcaggaccatcagacttttatcaattttatgtaatttttagaaatgctgacatcaataacatatccatacaaatataactttaaagaagatttaacatagccaaaattatgactgataacatatttgatttctatgaatttatgtaattttgtagtatatcaataacatgaatataactgaaagaagatctagtatcacttatcatttgacaatgttttccatataatttaccaaataagcctaatcatttaatatctctacaagatgagagatatattcttggaggcttttcaggggcccaactagaaaatctgaaaattaattctaggtaaaaaagacttagtttagaattttcggccgggtgtgtggtggctcatgcctgttctctgagcactttaggaggcataggagggtggatcacttgagcctaggaattcaagactatcctgggcaacatggtgaaaccctctctgtacaaaaaataaaaaataattagccatatgtggtggcgtacatacacctgtagtcccagccacttgggagtctgagaagggaggattacttaagcttggaaggttgaggctacagtggaccatgattgtaccattgcactcctccaccaaaaaaaaaaaaaaaaaaaaaattcatctttgggaagcttgccaaatatgtcaaaaggttcaaaacgcttgatcaaaagaggatcacaggtcattgtgaaataatagtatttcggttaaagtagtaaaagacttcaaaagcaatacagaaagttgtatggatgtaaaaatcttaatcttcttaaagctcagttatcctaagctttaagattaataaagattaacacaggaaattatcctataaaacatcagtactgtgtaattccctgtgttatctttattaggttttttattaccaaaagataaagaaaagtctgttgcagtgtgactgcatttttttatgggaaactcatttagataacccagaacttgaacgaacctgatgaatgggtacttgaatttaatcagatacaggaaaaatgtgtctaaggttataagtgtaagcccatattatagaggaatataaacaagaaagctagtattgggaacagaggaataagtggctcttagaaaaagtaaaaacatgtgacatagtttcctgattacatggaacaattgagatgtatcaagaaaagccaagaatatagaatcaagttatccaagaggaaaacattgtttttctagatgaagatttcggcctcaggccataacagtacagttagaactgaagaaaaaagttacaggaggtgacaaaaaggttgaaagagaggttatcccctgaggccttctcaaagggagagaggaagaacagatctcaggaggaaatgtggcagaaacagaaactctggacagtgtagaggatggctgttaatgaaacagatttcagagttaaaaatcaaaaccctttccaattttctaagagtaaatgaatatttcaagaaagccttgctgcttctacataggggaccaaatttttagttttgcattagtatatctttaatatcgaatcttaatctttag

SEQ ID NO: 25174 - DNA, 2300 bp, Homo sapien
ccgagattgtgctactgcactccagcctgggcaacagagcgagactctgtctcaaaaaaaaaaaaaaaaaaaaagaaaagaaaaaggcttagcaaatctcttctgtggccaaccaccaccacacaagtactatttaaattcttacaatctatctggacaataccattgacattagtcttaggactatgctgctgctgtggaaaacctcagggttagggttcaacccatttattgtaacaagtacttcaaagggaagaacctgcagacaatttttcactttgtctattgaaggtgaaaaaagcctagtgtcaaagattaaattgaggctagggcaggggatttctcaattctttttgtgattatcaaaatttaatgcatttttatcctgacatttgatcccactcagggcttcaaacactgggtacagcaagctgcccccattaaagatctcagcagtacttacttagattaccacctagcagactgactcttaacatctggagagcctgggatgttaagtaccagtggggcacacatgccatatgtctagatagtttaaaaagtcaaaaatccagctaataacctgttaaatcaaatatatttttttctgcctatctttaaaaatatatcattgaaataacctggaaggccaggttcaaattaagaattctcagacacctcagagttagccactggatggtggcagcatgggaagagcagatcttcagtctcttactgtgcttctcttcccatcctaattcgatcccgcattgcaagggcctcatgtgcacatgcaagctctgtctgtactttcagcagcgctatgcttggccacaactcaagcttaggattctacatacctgccctcaggaaaacaaagaaaatgaagagacccacacaggtcttagaagcaggcttagggcacatagacaagaaaagtctagaggcagctgggcgcagtggctccctcctgtaatcccagcactttgggaggccgaggcgggcggatcatgaggtcaagagatcgagaccatcctggccaacatggtgaaacactgtctctactaaaaattagctgggcgtggtggcatgcacctgtagtcccagctacttgggaggctgaggcaggagaatcgcttgaacccaggaggcggaggttgcagtgagccgagattgcgccactgcactccagcctggcaacagagcgtgactgtctcaaaaaaaaaaataaataaaagtctggaggcttggttagctggatcacagtgcagaagtaaagatacaggctccacgtggggaggctacttagccttcatacttctcaccctgtgggaaaggctaggggcagagcagcaggaacctctaaagtgcagagcccagtgcagggcctccttcctcctattgaaaggcagtattttcaacaagtataaacagggaatctacttctgaggtcatatggatctctgtctctcaaaaccttaaaattttcattctaattttgacttagtaaaataaaaagaataaatatagaataaaaaggaaagactaattacaggaaaggtacaggattcttgaccctaagaatcactttcagcctgagccttatagagacagaacagtgccaccctccaaagcaataaaacctattgagggtgcattcctcaagtaatttttaaaatatctttgagtcattctaatttaatctatacgggtcatctacatacaccacacagaatgcaacaatataaagagttctcaattacggtgacaagtactatgacttttagcctttaatttttttcctaaacctaaggtcatttaagattattagactacaacaaatttaaacaacttcattattaaaattaaaatgtttccttattaaaagacttctacaagcaaagttttaaatgtaccaacagaaaaaccgggcctcataataattactgttgcaccagatacttaagagcaaataaattattttttggcaatgctgttatgttaagatggtttggagtcactggggaatatttctcacttaactacaaacaaaattttcatcaaaattaagataatgcgggagggaggagccaagatggccgaataggaacagctccggtctacagctcccagcgtgagcgacgcagaagacgggtgatttctgcatttccatctgaggtaccaggttcatctcactagggagtgccagacagtgggcgcaggccagtgtgtgcgcgcaccgtgcgcgagccgaagcagggcgaggcattgcctcacctgggaagcgcaaggggtcaggg

SEQ ID NO: 25175 - DNA, 2300 bp, Homo sapien
catggtgaaaccccgtctctactaaaaataaaaaattagccgggcatgatggtgtgtgcctgtaatcccagctactcgggaggctgaggcaggagaattgcttgaaccagggaggtggagggtgcagtgagccgagatcgcgccactgcactccagtctgggcaacagagcaagactccgtctcaaaaaaaaaaaaaaaaaaaaaaaaattagccaggtgtggtggtcacacctataatcccagctacttggaggctgagacaccaggatcacttgaatccgggaagcggaggctgcagtgagtcaatatcgcgccactgcactccagcctgggcgacagagcaagactccgtttcaaaaaaaaaaaaaaaaaaattagccaggtgtggtggtcacacctataatcccagctacttggaggccgaggcaccaggatcacttgaacccgggaagcggaggctgcagtgagtcgatatcgcgccactgcactccagcctgggcgacagagcaagactcagtctcaaaacaaacaaaaacgacacgtctcatacaggacttacttcaatgacatattacttaattgccctcctgatcagtaccacctacagctcccctgttatcctggtctttccagacttatctccctacaaaaaaggagactgcttccgcattttcccatttctgtctttctccgtcaatactccacattccgtagctagctgtgtttgtttagacttgcaactgtttctgtgcagggtaaagactatcttgattttcaggatcactccacttcttcttcatagtttcgtaatctgaacatcagggtgttgtacaagataaactataagcttccttttggttttaaaattctttgattttatgtattgtagccaaacttcctctgcacagaaaatataccagaaaatcagcccaagttcaatgaaattcatttagtgccaaagaccattctaagaatcctgtggttactacacacacacgcacacacacaccgtctactgttgagtcagctttaaagagtgatgtctttttcctaacattctagtgttttgaagctgctacaagtgattgatttcgagctttttttaaaaactcctcctttgtacaaaacagaaccgaaattcttcaaaacgaattaagtcatttgcgagtttgaatggaagctggacgaaattgcctcctccagttaacgtggaacccattccccaagagatggaggttctggagagcaaggcgagtcagcgtcaaactgattacgcagatacctgttggggacgtcagtgctaatagatattttggtaacatattttaaggactaacgatgctttttgtgattcaggctttcatctgataccaagagcagaatctcgtcggcttgcgggtgtttttttttttttttttttttttttttttaatgagccggtgcttttaagcgctgttacctactgggcccaagtaggcggtagaagagggaaaataaagccatttgttccctcttcaagctaactgctccagagagctgtgagtgtgctctactaccgttgggaaaaccgaaattgcggaggcctgagtcttttcaaaattgaacgggaagcgtttttaaactgccgcagggagaggcgtttgcgaggtgacagctgatgacccctgggcttttaagtcctcctcccctctctcggtccgctctcggtccttaatcgcctctggactctgggctctagtcccctccccagattcacccatctgacacccgcctcctgcccaatcccccggctcgtctccagggctcccgcgctccgcccatccccctctggatgcttcctctctctctcttctttccctcccgccagccactcctcgcgtctttctctccccacttcccttctttcccctcaccctccagcccagcccaccctgctttctccctctttctctttcccgtagatccgcgctcgcgctgcaacacctactcctccctcggctctgggagtcgccaggccagaggcgccgcggacctggtgcgcgcaggcgcactgcgcggctggcgaacgggcaggccgggcatcagcgcaggcgcgcgcggctggggctcggctccgggggtggcggtcggacagtgtctagcacgctcagtccgggcttggggccccgcggcggagaaggaggtagagggggcggcggcggcggcggcggtggtggcggcaccatgtttcttcactcagttaatctctggaacctggcgttttatgtcttcatggtctttctggcaaccctggggctgt

SEQ ID NO: 25176 - DNA, 2300 bp, Homo sapien
gaaacagccccaaaataagaaatacatgtgcactcggcttactagacagaaacacagtgtggtcaaatctaccacacaatgtggtcatacatatatttatttatgatgcaagaaaagtcctgacgtaaaggcgggtaattttaaaaggtttgaatccagagtgttggaagatctgaagggataaatgctgtgttgctaaaccagaaaggtagactttgtgaccatcacctgacactgtgttggaactaatatttagaagaagaaatctgaagtttggttttggtagtggtaattttattttaaaattaaccaattttgctgttcttaatcacatctggattttcttctccctagcattctctagcacttgagtctctcttgctcttaaaaagatatgtatttctacagtctctaggtgatggttctttgtgttcttaaagttcctatttgacttcttcctttgtagggcaaagatcatgcctttcacttcctttggaaatctgagtcatagatttagaggtgaatgagacattggaggtgatttggaaataagaactgctaatgtttttctagtgccttgcaatttacaaagcactttcctattcacttaattctccttagcacctggtgaaatgggtagagaagtattattactgttgttgttagcctcgctgtgcagattagtggctcttggtcattgggccagcaggtgctgaaatcagaactcaaatctacatcttctgaccatgaatcccactgtccttccaaaaccgcattcatttcatgccacagcatttagcccacagcttcctgttactgaggccagagatgcctattgatttttgcacacccaaactgattttactgtggtccttactgacgtaaggagcttgaactccttcaggcaagctggtgttagtggaattaggatttaaataattttaacctggataaattaagcaacaattcatcagtggctctcaactttgacagcatagtatgataacccttgtacctgactccatctgaaaccaatgaaatcaaagtggaggttggatgggaggcattccagctgtctttgttttagggattatgttcttgttttctgtgattaatgctgttgatggcatttgttcttcttcagttaaagaaaagaatagtgtaagctctatgatttgttatttacttttagccagtgccttaaactaaacctctagttcacgtttacgcatggaagtccactgccttttaaaaaagtttctattttccagctatcagctggccttagcctcttggagattagtcagctcctgcttccccttgactcactttctcagcccttgtcctgaggcgccacctctgtgtttccttttctctgccttactttctagtttctttgatttgtttctccactctctgtcctcatgagctcccttcctcatcatcctaaggctagaattgacttctcttgctgcttctacaaagatacacatattttctcctcctctcctttcgtagcccttttataaaacatcccatctctgaccagaagactaatcaaaaccctgaaccccctaaaaggaagcttatatcagatgtcttagctgttcagacatggacttggtgggctggtgatcatggagaatggcgagggtgtcatggaaggcgggtgaactctgcttcctgtgaattcatttgcagggagcttctgttccatgatgatggcatggcttcatagagctgagcatgggcactcttctgagtgtgagctggttttggctcatgcttgagcctatctgcctaccccatagtttgagaaagtagtgagcaatttataggcctgatgtcctatctatccaaaagcctcatggaaactgacttctttttaccaaaatatctggctagtcccagatttttaggtaaagcagatttcttctggtcccctcagccttgatcaaatcttgtcagcacatgactaatacaaagaaaagaagaggtggtggttatgtcaggcaaatgggagcaagatacagcatttgatttaacgtcggcagggcttcccttgaccccattatgcctctaacttgtgctgtttgattccaggagctcgtgtaaatgccaaggacaacatgtggctgactccactgcaccgggctgttgcttccagaagtgaagtgagtgattaccatatttaatctaatacctactgtgcctagaaaaagaaaaagtcttgctagcgaattaagaatccttactggtaagcagaaggcttttacctctaatgtaagagggttacccaa

SEQ ID NO: 25177 - DNA, 2300 bp, Homo sapien
tactgtcttacacagtttaagtgttttgtgtgggttaggcttatttccccaactatatttggcagtcttttaggaaaggactatgtcacacatttcttttgtatatttcataaaaatagcatattgtaggtactcagaaaatgcttttggctctggtagcacttctctgtgcaatgtggataagcactgatagaggcttgtttgttgtggtacaaactagaaacaacccaaatgcccattcgaaggggaataattgaatatgttatggcatatccatacaatggaatagtattatatatagttattaagagaaatgatttaatcctgtagctatcgacctgggggatgtcctcagtacatcattatttttgcaaattgtaagagagggaaataagccaggcatggtggtatgcatctgtaatccagactacttggattacagatacttgggtgggaggatcgcttgaacccaagaatttgagaccaccctggacaatatagcaagacccccatctcaaaaaaagtgtgtgtgtgggaaatagtaaaatcccattttctgataataaataacgataatctcatatatctgtatctgtacctaccaacaagaacacgggctgttcacatttgtggtaggaaaggttattaagttttttctttatctgtttttgtattgttgcaacaggaaacctactaagattaaaatccagcaaacataagacaaagataaaatgcacaggggttttgatgcattaggtgtttcccatagtacttcctatttttcaaacttcgtgtgattaaaaaagtaagttttatccctgactaaatttcagtgtggaaataaagaaataaagatagcatgtacttggcttaggtatacttgttttgttctttcagctcgttacgtaaagatacatttttttttctttctcatgacatgaagataagctttcttcttaccaaaacctaaactgtgaaggcagcacccaagccaaaagcctcgaggctctggtttctgtggtgggatggggagagaagtaggttgcacagatgtaggatgccagctgacttcagaacttccggtctcagagctaaccaggctcggcaagccacaagagagaaggagcttgcataggtggaagagcaaagaaagccagtgctgcagaacttccggtgctcctccgccgatgtcgggctggcgctgctcccgagccctgtgtcctgtggaagaagttggtgagaatcgttttgaatgtaggcagccactcctgaggaggctagcccttgctacattaaaggtggagctagatttacattttattttattttattttattttttatttttcgagatggagtcttgctgtcgcccaggctggagtgcagtagcacgatttcagctcactgcaacctccacctcccgggctcaagcgattcacctgcttcagcctcccgagtagctgggattacaggggcacgccaccatgcctggctaattttttgtatttttagtagagacggggtttcaccatgttggccaggctggtctcaaactcctggcctcaggtgatccacctgcctcggcctcccaaagtgctgggattacagacgtgagccaccatgcccggtcaaatttaccttttagattcacatattaccaccagaagaatgcttcctctgacaactgagcggtactccatccccagagccctttgtgcagactattattgcagtttcctaacttgttatgacactccagccttttcctccaggtcatcatacaatccatttttagagtgattgttctaaagcacaaatcttaggtcactcccctgctcaaaaaccacccactgctcccccagttccacagaagagagctcaaatttcttagcttggtattcaagaccttccatgataggatccctgtctactactcagcttacctcacttctcccctcctccagccaaatgaaactgttccctgtgtatgttcaggctccctagcttctgctcacagccttctgaatatgaagaagggaaagtcccttaccattccatccgtctctacctgtttaaatcctccccagtcttcaatattcatttcagaggctgcgtctttcaggaggccaggtacaatttctctcccttctccatgcacttctcctgcggcctgtgccttacattctagctgtgcgtatttgtatacttcctgttacaccttggtaacctcatcaagggagagactgactctgacattccagtgtctgaatttctttctttctttttctttttctgtgtttc

SEQ ID NO: 25178 - DNA, 2300 bp, Homo sapien
tgaaaggtagccccaggccagagctggggtagctgacagtcatctcccacaaaaccagcacttgcacaagtgattaaaaagagattttcaaaaacaattgttaattatggtcacagatccttgacacatagtccttttcagagattgattttcctcaacatccttgtaaatatgtggtgcttatttctcccatttctacctggcattgctgagttgaaactgaagttatattataaaatttccaaatagatagaacatttctattttagacatgacattaaggggctcttcttctcttgaatggacagacctcaaatgacaagcacttttgggattgtgcctatcctcaggtgccatgttattggagctggaatagtagatgcttatacagggctcggatcaaatggagttcaccaagccactgccacataggtacatacaacttcctatatctttgggtctgcgtgaagttttgtgatcagctcacttactaaggtgaagctttgtgcttcattaccagcctcttaggtcatgtgctcctttgaacattgggtttcttaagaacaaactagattatcaccttcttgttctgttaggcattcagaatagcaagtcttgataaccaaattccttcatatactcaaagggtcagagcatgggatgcagtggttcaggagacaaagtcatccttccatccatccatccacttattcgacatgtattatgtgctaagaccaatcctgttcttaccctgtcccttgcagtcttgtgggggaggggaagaagaaatatgaaaataactattcaatgaccatgtgataagtgaagcacctggcacatagcaggtactcaaaaatggcccatgaatggaagtgtcatgacagatgcatgaacaaggccctacattcaagactttgagcagagtttcctagccttggcactgctgacattatgggccagataattctttgctgtgggggctgccctgtgcatcataggatgcttagcagcatcccgggcctctgcctactagatggctgttgcacccctcccttaagctaacaatcaaagatatctttagacattgctaagtgtcccttgccaaggcaaactgccctgtcgagaagcactggcctagaggaacataggaccatcatatcatgttgggcagagccatggaaagatatgcagggtaggacattcttaattgattgataattcagccttagctcaatttttttttttaaagagttaaggactcactctgttgctcaggctggagtacagtggcacgatcatagctcactgcagccttgaattcttgggctcaatgaacttcttacctcagcctcttaattagctggcactatagatacacaccaccacacttggctaactttttaaatttttaatttttttagagacggggtcttgctatgttgcccaggctggtctgaaactcctaggcttaagcgatcctcctgcttcagcctctcaaagtgctaggattatagacataagccatcacgcccagccctcagattgatttatccgtaagaagcaccgcatctgccagtgacttaggtaaaggctcatctgtttgttttgtcaaaatttggattgatttcattcccctcctcttggcagaaataatgctgtctttcctgtattcttttcttctgggcccatttttcagccattctttcaggtgggtagagccagaagactgagttctggccaatggaatataggcaggggtgatgcagccattttctggccttgccttcatgaaatctctcatgtgattctttcctctgcctctgctggtttgtccaccggatctagcagaggatcctggggtcccgggagatggtagagccactggaagaagagacccgaggccccgaatgactacgtggagcacagccctccaccagtgccagtttgcttcccactgtaacatgagaaagaaagaaactgttactgtgggatactacggagatgaaggggaaatttggtgtagttgttagctttcctgattaagatactctctcctgctcccttttcccattgggtactgataacatgccataaaaatactttttaattttacttttctttggtcactctggtgacctacacatggcataaccttaggtagaccccatcataggcagttcctgtgatagaattatgtgccttcctagctccacatggtttgtcttttccaaatctttattggaagggatgagtgtttgaatctcctttcatctggccctttgggactagtaggaccacag

SEQ ID NO: 25179 - DNA, 2300 bp, Homo sapien
gactggatgcctttatggtgcctcagctctgccctctcccttctgtgacttggtgcctgtaatggagaccgatgctcttcacatggtttgtgttatagcatttcttacaaatgtgcctatgaagggtgtatttgcagatgagctctaataaggctttccaggtaacaaagtcaaacagcttcaagttccagagaaggattttaacccatgtcaatgacttaggactaattcctattctccaccctacttcaattcatagataatctaagattacccattttatttattctgtatttttatttttttgggacagagtctcgctctgtttcccaggctggagtatagtggtgcaatcttggctcattgcaacccccgccgaccccctcctggggttcaagtgattcttgagcctcagactcccgggtagctgggattacaggcttgcaccactacgcccagctaatttttgtatttttagtagagatgaggtttcaccatgtcggccaggctggtctcaaactcctggcctcatgtgatctgcctgcctcagcctcccaaagtgctgggattacaggggtaagccaccacacctggcctaagattgccctctttatagattactcctttttaaccttttaaccaatatattatttggctttggctgctttcagaggtcgggaatgcaggtatttgcccttatcagtgtttatgtttgtaaatatgttggtagcctaagaggttgaaattaatgattcatgaatccagcttgtaattatgatattcataatttttaaggatcttttcacttgcctcctcttttgaaaacttaaaatttatattctataaagtgagctaagcaaataaatatatagtccactttgggctgtttcagggattactaagtcgataattgtttgcatttcttggtttttgtttgcttagagtccccttgctcccatcctggggagtcttaagcatccaagcatagctttctaggatatcttttataccagaagaccattttcccctaagaaagctttcagagcttttagtaaaattagggagacttgtggaaacatctgtttgagcctagacatggaaattaattacaattctaacctgtctctaaaagttttgctttttttatttaaaaaattttgttttgctttagtttgttttaaaaataacactagattgggaatcagaagacgtggattctactcatggttcttctaactgttgtatggtttggggtaagtcctggccttcgtttctttgtctgtcaaaatgggaacaggtagaaaattctctaaattcttccaagctctaacattctaagatagctcctcacatatttcaatgtcagtcttttctcatcttgtggaatctcagttcaaaaagtatctgccttttatgaacttctgattttctcccaagtgtgtttgtggcagctttaaagtttcccaggtttggtaaacacatcctgagttttgtctaagggtgaggagtcctttctccaagaagtttgtcttctggcatctccaggagcctggctgtggggacacagaacccctggggctgttctcagtgtggttctttgagaatcctcttgaacttcttacaggataaagggagcaatccttacaaaggccatgcttgtctcttgtgagctggggcccaccttagccttcttcagaggtgttgctttagcaaataccttgggtcctcccaggcaaaatcctattttattgaacccaaataacatgtgcatctaacaagtttatttctgaagggttggcccagagttgggtgcagttgacatggtgaccacagactttctcaagaaaggaagaaaattcctacatgtaatcaccagcctctgtatggttagtctctgtggaggagacttgttttggtgtctaagactggcaagatcaggaaaaaggaaagtgagcataagagaagtctaaagacagaaagccaggcagacattcaggtcagccgggacaaatcaaccaaccaattattgtgaaacaatggcctccaaaagtaggtgtggcctacaccccaaggatgaacacaatactttattgagttggagtttgggaaagagaatattggaattcatatttctttaaatcattcttttaaacttttaatttttatgtagttttagtacatcttatttgctagtactgtgtcatctttttggctgtatttttcactggctgccacctggccaaatcaccacttgggttataacagcagcctctgactggtctccttccgtctgaccttgg

SEQ ID NO: 25180 - DNA, 2300 bp, Homo sapien
ttttgtcagaagacaaagagagttgtgttttaccacttacctactgaaatacatattcattataaattactctcctttaatttttcctttattgtacaattaggacaatatattgttgctggtttttttttttttgaaatttgtattggtaggtaatattatccacaaattacctttcaggatagtaaggggagtgttaaagatactagttacaaaaagaggatgatggtctgattgggtggagaactgctgcctcctcactttggccccaggaacttaggtgcaggcatgtccgcgatgaatcaaattggatcttgagtgaatcttccaaattaagtcatttgttatcactcttctgaaagatggctctatttaagtagagaatgcagggtcctattcagtttacttacaaagccatgcagggtgttcagtaaatagacataccaataacagcagtgaagaactgactcatagatgcaacataaacaatctgttgtatgtctgagaaaggccttagaattttttgtttgtttgtttccatgcaacattgataacagaggagtggaagccaggaacaaagttccttggttcttcttgtctgcatgatctgaattataatctataagactaataaaggtaaatttgagatttagctgcttcgacaaccagagtggctggatggtaaatgtgaggatattaatgctcctttctctcctgtctcatgtggaatctttgggggaggttctaagagtagggaggaagaatggacatttggtttgtgaatatacagtagaggcagatgtttggtcttgaccaaagaattctgtagctctagtttgctcttcaaagctgttcaatgctgccctacaggtttgctctatggcctgccaggggcacatggggctgcctgggagcacttcctctccacttgcttacttaattctcccttctccagatctcaactcctgtcactttctcagggaagcctgccctcacccaccagtctggtctgattcctttgttgtgggttcacttcagaagcatgttttcccttgagatcccttatctcagtttgtaattacattcattagcagagactatgcggtttatgttggcatcttctgagagcaggttatcttatttatgctctccgtttattcccgtgcctagccagtgcctgacaaggtagggactcagtacatagctgttcaatgaataagtgtttgctccaaattccagaactatcaacagctactatgcttacgaatatgcccgttgtatctgtagcccatggtgtttgacagctgtcttctatttgttgaagagcttggtaacttgggattttgtagagatcagtaaggactggtgggaacacccaaaagacccatcaactcggtgatttaggactgctttgcttctccaggaactccactccacccccaccagcaaaaaccaaacccagggtgtttgaatttaacaatagtatgtgtgtgtgcatatgtgtgtgtgtgtttagctggaaagtggctggagaacaaggtggaagggccagagcttctgttccctccacccataaatgtttggcaaacaccctgtaaagaatcacaatgtgtccgctgcctcctggcattaaacaaagggagcatcataattgcggtccctgggatcttcggggcgctgccaccacctgattctgggttaggggaagggggcgtaaccccatctccccggttaaagtggacggcatgtgagtgagagcctttcctgccccctcggggtgtgtccccgcgggcttccccacccatatgtgtgagacccgtcagggaggcccgcgatccgcccagggcccggggccggcccggccgggcgccgcgtgcaggtgcggaaggcaggcggcggcccggtgcgggcgcgggggcagcgccgggggccgggctgcgcggctcggctgcgggcggcaggaggcagcgtcggcccaggcggcgggcggcgagcgagccagcgcgcggtgatgtcagtggcggcccggctggcagcagccggtacttcctgtggaaaggcgggcgggctcggctgcaaaccccactagccagtgtcagcctctcggcgggaggaggcggcggcggaggaggagcagggggagggctgtcaaattcgggagccagattttttcccttctcctggcaatcccttccgcttccccggctcccggcgtgacatctgcgggccggggacctgcatgtgtgtgcgcgcgaaggagcggaagaatggcagtgctcaaactcaccgaccaggtagcg

SEQ ID NO: 25181 - DNA, 2300 bp, Homo sapien
ctagaagccagtcatggactagttagcactttatttgggggtctcataccctaattgtaaaagaaagtgatagctataggtttcagaagctgagggggaaattgtcactttatctttaaataaaataagtgaggtgttaagatctggagaattaccccgtgttgcactttttattttttatttatttttattacaatagagatgagatctcactatgtatgtggttttgttttttggagacaaagtcttgctctgttgcccagaccaaaggcagtggccagatcatgcctcactatagccttcgcctcccgagatcaagcaattttcccacctcagcctcctgagtagctgggactacgtatgcacaccaccacgcctggctaatttttgtattttttttggtagagacagagtttcaccatgttgcccaggctggtcttgaactcctgggctcaattagtcccttgcctcggcctcccaaagtgttgggattatagatgtgagccaccttgcccagctgggtctctgttgcctaggctagtctcaaaactcctacactcaagccattctcccaccttggcctcccaaacagttgtactttttatactagaaaagtaacagtataacattgttctgtttaaacatactactaggggcaaataaatttaaaattaaatatttgtttctatggttgttaaattgtgttaaaaaacatgagttaaaaaaagaaagtagaaagttctaaaataagctgtagttatcaaattgaaaaaacattttgtcttctgtgaaaaaattaaatgcacaggtttttctagtccatacctactttatcttaattgacgtctatagaaaatattccttgcttaatcattttaaaagtaaagataactttactgaattgaatttaatagatttttgaagtgaaagaagaccaattgtgtttctaagttttatgaaggagggcttagacatcacactgtcaatagatcttttgatttcattttgaatctttgcatattctttctaatttttaagttctaacattttgtttatggctttttggggggttttcattgcaggatgacgatgactattcatcatctacgagtttgcttggtcagaagaagccaggatatcatgcccctgtggcattgcttaatgatataccacagtcaacagaacaggtgatctttcattttaaaagcatagtttattcagctaaagaaaagtgaatgtctgagttcccatagaaatccataaattttaggatgctttaaggataattataaataataacttattttgtaaaggtgtaatctttttctttttgacacaaggttttgctgtcttgctcaggctgatcccaaactcctgggctcaaggattcctcctgtctcaacctcccaagtagttgagattatacacacaggctgtcatgcctggctgtaatcatttaatgaagcattgaactatggaaatgtggatatgtatattaccttgtttccatgtgccttatttttttatatttaacatttatctgtgaaacggtacagaatattagtaggcatgtattaaacatttgtgctttatggtgttctgatttttgtttatgatattctgttttgttattttaataaagtggatattaagtgagacatacctcttttcagtatgatccatttgctgagcacagacctccaaagattgcagaccgggaagatgaatacaaaaagcataggcggaccatgataatttccccagagcgtcttgatccttttgcagatggtaattctttcccacttttctataagtattcagaaatttatttgtattaagttgtctttagccctttgattttttttggcatgcttctgaatttgcttttctttttaaaaatcccccttactatagatttgtatagatgtggttgaagtcacagatgccatattcttcatctttataatgcaagttttctttccaggtagaaggacaagaaaaaaatgagccaatgccatagaaacgcaaagggttaaaggttttacttttacttttgttttgggtacgctttctatacttggatcaaatgtatttttctgctcaaaatactttcaaattattgaaagttttcattccaaatcctagatttttaggattgttacccttgagaaactgtttctcacactagagctccccccatagtgctctaaatatagcttagtaaaggcacctactttgctctaagcatacttaaagttaaaacaaaagtatgtatacgaagagtttgatatttttaatag

SEQ ID NO: 25182 - DNA, 2300 bp, Homo sapien
tggtacctggccacacggagggccgatcttccccacctagcccacttgtactcacacgctaatctctggaaacacccatacagacacaccacaaaatagctttaccaggtttctaggtattccttaatccagtcaagttgacacttaaaattaaccatcacatctttttttcttttttttttttgagacggagtctcgctctgttgcccaggctggagtgcagtggcactatctccgctcactgcaaactccgcctcctgggttcaagcgattctcttgcctcagcctcctgagtagctgggattataggcaggtgccaccatgcccggctaatttttgtatttttagtagagatggggtttcactgtgttggtcaggctagttttgaactcctgaccttgtgatccgcctgcctcagcctcccaaagtgctgggattacaggcatgagccaccacgcctggccaaaaattttaatttatcaaatttattcctttactgatgctaataaaaatctgtggtggctcacgcctataatcccagcactttaggagtctgaggcaggaggactgcttgaggccaagagtttgagaccagcctggggaatatagtaagatctcattctacaaaaaataaaaattagctgggtatggtggcccatgttggtggtactagctactctggagactgaggcaggagagtctcttgaaccttaaggtcgaagttagggtcagctgtgatcgcaccactgccctccagcttgggcaacaaaccaagactgtgtgtcaaaaaaacagaaaaaaaatcgtttgtgtcacctgatctgaagaagggagggagtctggtgagagggaaagagggagcaaggctgcaggtcaggagtcaccagggacaggttatctaagctctcagtccagtgccattgtccatatatctcccacctaccgctagcctcaggaaaatggctcctcactttacccaaagtagatatggggtcttcctgcaagaggaatacacccataccatttccctcccttcaaacgaccatactgacccatggtatggttagtatttgggttgcaggtttatcacatagcgaggtactcctctctttgtgatggctctaaccttgataactacctgttttcctcggctgcttccgggacccatctttctgagcctttctttctttttcatcgtcgaagtcaaagaccagtgtgacagtacaaggttatattataattgatgcccaggaaaacagactgccgtattctgatctattaaaattcctgatttaggaataccgtctaggatttaagagaaacatctaatgaatgttaataatgacgatgagtggttttctaggaacccataaagtaaaaggctttaaaagggtggcaagattgtcactgtgcaactcagcaacgatttgtgaggctcaacgaaattcctacccaaattatttgcaattattaaacagaaagaatgaaaaatgaccttgaattacagggcgaaagatgggactgttaagactgtcttcgtaactaagcactgtaaagactgagacagctgcaagggaaagttttcctcgagctcttccagtgaattttgggaaaagggattgaatgtctgaggtctcttccagctctgaaaccgcagcgtttcgtacagtgttcatttttttttaatgggaggggtctcggggtcttgctctgtcgcccggtctggaggcttgagtacagtggcgcgacacgattacggctcacggctgcctcgaactcctgggctcaagcgatgctcccgcctcagcctccagagttgctgggactcagtgtctgttcttaactcccttcgtagaatccactttcctccagggcaaagttactcacttaaggaccttacggctcggctcggggatttcctgggtcaccacgcaggcgacttcagggcccaaccgtgtctcctcccccacccacaatgcacctcgcggttccctctaggtggcagttctgtcacgtgtcacccgacggagcgcgctcccgtttggcgcacgcgcagagtgcagcccccagctatttttctccgtggcggcggcgacgagcggaagttcttgggagcgccagttccgtctgtgtgttcgagtggacaaaatggcgaagatcgccaagactcacgaaggtaagcggtctttccctgcttacgtgttttcttcgttgctagcctaataaaagccttttttcctaggattctgcctttttctatggtttctttcgtaggagctgagcccgcgtttcggggccaa

SEQ ID NO: 25183 - DNA, 2300 bp, Homo sapien
gcttcactcctgaagtcagtgagaccacaaacccaccagaaggaagaaactccagacacgtctgaaagtcagaaggagtgaacttgggacacaccatctttaaaaactgtaacactcacaagtgagggtccgtggcttcattcttgaagtcagcaagaccaagaacccaccaattccggacatacaaggattgtgtatttgaaagtagttgatacagaattgtccatgcagctacagaaccacctcaatctacaagtacatcatgtgttgtactgcaaaatgtttgacaaaccttgtagctgatgatttcaatgtatctagtaaggggtgactgcaataaaccaagcaagaggagaaaataatcataggcacaacagctggaatattgctttaaatgtaaatcagatcaagtaactgttctgcactcaaactctaatggctttccttcacgcttagaatacaataaaaaattggtagcatactatggcttccgtggcactaagctctgcctacctcgctgaccttatttcctaccactttcctcctctcactgtgctccaaactccttgctcttcctaaagcatgccaagattgttcctgcctggggcctctgcacttgctgttccatacacctgaaagtcattttctttttcttttttctttttttttttttttttttttttttgagacggagtctcgctgtcgcccaggctggagtgcagtggcgcaatctcggctcactgcaggctccgccccctggggttcacgccattctcctgcctcagcctcctgagtagctgggactacaggcgcccgccacctcgcccggctaattttttgtatttttagtagagacggggtttcaccgtgttagccaggatggtctcgatctcctgacctcgtgatccgcccgcctcggcctcccaaagtgctgggattacaggcgtgagccaccgcgcccggcccattttctcccaagtaatcagagttcacttcctcacttcattttaggcctttgttcagtgtcatcctcttagagcccctcctaaccaccctatataaaacagcaccctaccatattcctccctcttcatctccttaccctgctgtactgtttagtctatgggacatataacaagctgccattgcactatatactaattggtttctttcccccactaggatataagctctgtgacagtgaagacttttgctcacttctccagcatctagtaggtgccacacaaatatctgactacatttaatcaacaatctcatttacacccaaactatattaaataggtagtattgtcatcctcactttacagtttgcaggaaaactattggtgcacaaaccttaagtaaagacctgaaaacaaactgagggaacaagaagtctggacttgatgactgatcaccaaaacaagtaaatcaaagcgaagtcgtctgattagtatggaataagggaaacccaaatcatacgagaacaccaattaaaatgtgggacacgcaggaagaaggcagacggaactgctgctggataactgagtctttcctaatgacaggaccttatgttgccctcacaattaccccgtgagataggcaaggcaggcattgtattagacaatcattaacaagcaggacgctgacagccaggcttcgcagccaggagtggtggcctgtctggctccgcactcacgggttcggacagttacagaattaacactcaagccctggggcttcccgcagcccccgggggggtggggctcactgactagcctcccggaagcggaccccaggagaaccaggcagttggttaatccaggaacagctcctgcgcggggcgtggactgagcagtcactgagtattacgcaaattgcgcgagcgcacgggaaaagcgattggtcggtcaggagagagaggtgtgtcctggcgggcccgcagctccgattggccgacaggctgacgggaacgtttacggtcagcgtgtgtcagcgacgtgcaacccggaagggaagaaggggcgtgtcaggctgcgcaggcggccagtccattggctggaagagaccggagccgggctccgggcccgaccagaggagggcggtgctgcagggctggtccgggaggtgacgaccggcttcggagagtctatcatggcagctcggactggtcatacggccttgagaagggtagtctcgggatgccgtccgaagtcggcgacagcggccggggcgcaggcgcccgtgcggaatggcaggtaatcaacagcgggggcgctgagacgagagtagttttcgat

SEQ ID NO: 25184 - DNA, 2300 bp, Homo sapien
cactagtctaggagttagaacatgccacctcccataccacctcccattccacccattgcacccattccagggtccttctcttctttaggaatttctgtgactacaacttctgctgtagttaacagagaggccacaccagcagcatccaataaagcagttctcacaacctagaaaaaaatttaattaattagttttcccttagtaaaatatgagcaagacttattgaaaatttctgtctgggcatggtggctcacacctgtaatccagcactttgggaggctgaggcaggtagatgacttgaggttaggagttcaagaccagcctggccaacatgatgagaccccgtctctactaaaaatacaaaaattagccaggcatggtggtgcatgcctgtaatcccagctactcaggagcctgaggcaggagaatcgcttgaacccaggaggtggaggttgtcactgcctgcactccagcctgggcgacacagcgactctgtcttcaaaacaaaacaaaaccctgttctgcgtatcttggaaagtattcttactgccaggcaggaacagggtgttccagatccatcctgattttttcctgcctccaggcatggactcaactgctactcaagggatcctgcttccttttagtggagtattaaatatctaggtgctggaaatgtacatgagaattgttgatgggcacaagagctattgctgttgctactgctattagactatttttctggtgacaaaatcaaagatttgggatgtgaggatacattaacaaaatgaacaacaaaagaatttttagaaagtgttcaaccatttacctttgttgggtcaatgattcctttttccaccatattcacaaaatctccagccatagcatcataaccaacttctgaggaactttgcataattttctcaactatcaaagatccttcaacacctgcattcttagcaatggtcattgctggaattttgagtgttcttttaataatttctatacctacagagaaatttcagcaaaattttaatactttcatttgtaaatattgtaacacatttataagttgtgaggatattgatgtagggaaatcccaatcctactacagatcaaatcatttcctctgaaaaagatgtgatgcatgtttagctctgacattagcactattctacttctgttattcaggaaatgaatgtgctattccatttaggggactgcaacattattattctaagaaaaactaaaatcaggccacaaactcatttaaaaggtaactttttaccaattttttgatcttcattagctggagtcaatgagtccaaggctggaatgcatcgaaggagggcacaaccccctcccaaaacaatgccttcttcaacagcagctcttgtagcattaagggcatctgtaactctgtctttcttttcattcacttcaacatcacttgtcccaccaacctaaagacgaaaagaattccagttagtatggcctcttcattcaagatgctaattgccaagtcatttaaaagcagtttacttaaaaagcaatcctgaggtgggcgtggtggctcacacctgtaatcctagcactttgggaggctgaggtgagtggatcacttgaggtcaggagtttgagaccagcctgaccaacatggtgaagccctgtctccactaaaaatacaaaattagccaggcatggtggcaagtgcctgtaatcccagctactcgggaggccaaggcaggagattcgcttgaacccaagaggcggaggttgcagtgcgccgagatcgcaccactgcatcccagcctgggtgacgaagagctcaaaacaaaacaaacaaaattccactatgaagttaattcctcaagtattcgtttagttctatggtactactggggaatactacagaagcaaaatcattcttggactcagaacccaagaaacttattcataataatgaatgttaccttcagcacagccactccatctgaaagttttgcaagccgttcattcagtttttccttttcatattcactagttgtgacatctaactgctcaatgatttcttgaatacgtttttcaatttgagccttgtcaccttttccttttaagagcatggcatcgtctttggtcacaatgacctctccaacttttcctaagtcatgaggctgaacgtcttcaagattcagggtcaatccctcttctccaaacacctacaaaaagagttaaacgtaaacctgttgtaggttacagtttctgccattataccaagtttattaatacaccatgcaagagaa

SEQ ID NO: 25185 - DNA, 2300 bp, Homo sapien
gtgcacacttaatggtaattttatgttgtgtacattttactacaataaaccaaaaaaaaatttagcatctacaagcacatacctaaggaattatggaagataagttaaactcttctctctacacttggcatgaactactgggaaaggatccaaattttaacttaagccagcgaaattctacctcgagtttaagaatccaccttgagctgtaagttactacctgattacatcacacattgaacaaaatagtttcgaaaatctggctgaagcagtttaagctttaagatcatgtctaagaaaaaaaggctaaccaatacttcagaattcttacatgtaaactgagttctctcaaaaatggagatgaaagtactgttgaatagttcagtgcgactatttgtgagtaaaatgctattaataataccgtaattacaataaaataaaaatactggtacctttggccccattgtaacggccacagcatcggctaaaaggtctacaccttgaagcattaaggctcgggcatctgcaccaaattttacatctttggcataagcccgagtgagatgaggagccagtaccctggacaccggtctcatctggcgaaagactgtgggtaaccgaagcatttctggggatggaagcaaaaagatcatcagaactaccacccgtggtgcgctgcagaacaaacatgcccacctgtgcaacagagcaagcaacgtgagatgctgagcctggctgacctccgccagccactacgcctgaatgacggaaggcgccgcagcttcggaacatcagccactagcgcaagctaaagaggccgccccggccggcgcctgacctatagcaccagcacaaagcacatgcggctccttccccacggccacctatccctgccgccaaaaacgagttaatctttcaccgcgaaaacggccttgtgggcagacccactccaactgtggcccctgagaaaccaagtcagccggagagaggcaagttacaaatccaagtgaccagggaagttaaaagtattcctgacggtgcaaaaagccgctcagcaaagtgtctccatggatccacccaaggctactgtatcagagcaaccagcaaggccgcgatgctgggggcggcggcccggcccactcggcgcgagcccacgtgtccttctttccgaacgcccccagcaaggtcaagactggaggcgcggtatcccagctgcctgcgggggaaaaaagcggttccctcacgtacaccaccctccccggttccctgaagtcggccaggcgcaggttgcaccagcgggcctaagtggttacaatcccccaaattcaaaccccacgagttgtccctcccgcgcccagccgaggtccaggatccgcgtcgcacgtgatggaacccgcatggacccgcgaggcctggacccgcaggcctgggcctgcggtgcggcgcggtgcggaactccaggttgtcgccgcccgcaccctccagctggaccgcagaggaggaaggcccactcgggggtcgcaggagccggggggaggtggtgcgggaaggccgcgtacctgcggggcggcggcaaggcgtgcgctcggcgagacaggtcgtcggcggcgagtgagggacagagtgcagggcgcacaccgcaatgagcccgtgtcccctccctccgcctctactcccgccccgcggcaccgcgtgtgcaggcagctcccacccacttcccgtcagcccgggccctgcaatctgcacaccctgcgcgcgagccccgcccctccctacccgcgcagggtgtgctagcgcgctcagccctctccggccggcttagtctagttcccgggcctcgctcggttccagaactttccagaaaatgccgcgctccctacggctcaagggtcaaatcgcgtcatttccgggaggggacgaaggggtagttctttcacctcggctgggcgcctagaaaagcctagaaacagctccttttttcttccgcctccgagtcttcgcgtcagcgtcctgcgcagggcccttggggcgaatcgcggtgcgcgtcggggcgaccgccctccctccctgggaggggcgagggggctagcggcgaccgctggggcgagcgcgcctgcgcgctgggtgattttttcacgtgtcgccagggccggactgcgagtctctttgcggcgctacactagagcagagtacgagtctgaggcggagggagtaatggtgagtcccgcgtggccccgaggcctgcaggcccgggcctgtctgaggcgtacggggatccctgacgcccctcttttgttggg

SEQ ID NO: 25186 - DNA, 2300 bp, Homo sapien
ttccttacgtctgttaggggtcgttgtcgctcctccggtgagcaaccagaccagctttaaggtcaaccttagtttattccaaggtcaaatgttttccttcttcaggtttttccagaaattttcaggaaacgctgggtcaagctccctgcctggcaccatgatttttacccaagatattacacatccacaaaggccctgcagaagcaggtgagacgctgcgcgtgcgcccgggttctcgcccccctgccttacacaccggcagcacacgcgcgtgcaaagagccctgggggagaaaagggtcgggcgggccttgccgctccaaggtgccatcgggcgctggtcactgagtggccaccaatccctcccgcccagcccaacaaaagaggggcgtcagggatccccgtacgcctcagacaggcccgggcctgcaggcctcggggccacgcgggactcaccattactccctccgcctcagactcgtactctgctctagtgtagcgccgcaaagagactcgcagtccggccctggcgacacgtgaaaaaatcacccagcgcgcaggcgcgctcgccccagcggtcgccgctagccccctcgcccctcccagggagggagggcggtcgccccgacgcgcaccgcgattcgccccaagggccctgcgcaggacgctgacgcgaagactcggaggcggaagaaaaaaggagctgtttctaggcttttctaggcgcccagccgaggtgaaagaactaccccttcgtcccctcccggaaatgacgcgatttgacccttgagccgtagggagcgcggcattttctggaaagttctggaaccgagcgaggcccgggaactagactaagccggccggagagggctgagcgcgctagcacaccctgcgcgggtagggaggggcggggctcgcgcgcagggtgtgcagattgcagggcccgggctgacgggaagtgggtgggagctgcctgcacacgcggtgccgcggggcgggagtagaggcggagggaggggacacgggctcattgcggtgtgcgccctgcactctgtccctcactcgccgccgacgacctgtctcgccgagcgcacgccttgccgccgccccgcaggtacgcggccttcccgcaccacctccccccggctcctgcgacccccgagtgggccttcctcctctgcggtccagctggagggtgcgggcggcgacaacctggagttccgcaccgcgccgcaccgcaggcccaggcctgcgggtccaggcctcgcgggtccatgcgggttccatcacgtgcgacgcggatcctggacctcggctgggcgcgggagggacaactcgtggggtttgaatttgggggattgtaaccacttaggcccgctggtgcaacctgcgcctggccgacttcagggaaccggggagggtggtgtacgtgagggaaccgcttttttcccccgcaggcagctgggataccgcgcctccagtcttgaccttgctgggggcgttcggaaagaaggacacgtgggctcgcgccgagtgggccgggccgccgcccccagcatcgcggccttgctggttgctctgatacagtagccttgggtggatccatggagacactttgctgagcggctttttgcaccgtcaggaatacttttaacttccctggtcacttggatttgtaacttgcctctctccggctgacttggtttctcaggggccacagttggagtgggtctgcccacaaggccgttttcgcggtgaaagattaactcgtttttggcggcagggataggtggccgtggggaaggagccgcatgtgctttgtgctggtgctataggtcaggcgccggccggggcggcctctttagcttgcgctagtggctgatgttccgaagctgcggcgccttccgtcattcaggcgtagtggctggcggaggtcagccaggctcagcatctcacgttgcttgctctgttgcacaggtgggcatgtttgttctgcagcgcaccacgggtggtagttctgatgatctttttgcttccatccccagaaatgcttcggttacccacagtctttcgccagatgagaccggtgtccagggtactggctcctcatctcactcgggcttatgccaaagatgtaaaatttggtgcagatgcccgagccttaatgcttcaaggtgtagaccttttagccgatgctgtggccgttacaatggggccaaaggtaccagtatttttattttattgtaattacggtattattaatagcattttactcacaaatagtcgcactgaactattcaa

SEQ ID NO: 25187 - DNA, 2300 bp, Homo sapien
catcttttgtatttatttattttgtagacaggaggtctcattatgttgcccagactgattttgaactcctgattttgaatcctgagctcaaacgatcctcctgctttggcctcccaaaatgcaaggattacaggtgtgagccaccacgcacagcctcttttgtcttattaaaaatttagaatgtaaggcaaacactgatcacactaggctaccaaattgctattgaggggattttttttttttttttttgagacagaatctcgccctgtcccccatactggaatgcaggggcgccttgcaacctcggctccttgcaacctccgcctccagggttcaaatgattctcctgcctcagcctccccagtagctgggattacaggcgcatgccaccacacccggctaatttttgtatctttagtagagacggggtttcaccatgttggtcaggctggtcttgaactcctgaccttgtgatccgcacacctcggcctcccaaagtgctgagattacaggcgagagccaccgcacccggcctattgaggacaatttttaatactctgaaactatcacataaaataagcatcatagcattggtcatataaaataagcaactttatattagtcatttccctttaagaaacagattagaaccaaagcagttaatgatcttgaaaacgacataaactctacttaataagcgacttttaatactccagaattacttcttttccctccactgcacactataaaaaatagttccactgcagctcccatttacctttcctttagaacccgatccaacagcgactactgttgcttgcaatacttttccttgagatttttctggaagcataatgcctcctttggttacagtttcagcagcactcctttcaaccaatactcggtcaaagagtggaagaaactttctaaacgcttgtcctgcctgtaggaagagaaatgttttgaaacaaaaactaaatgtaatcacattatcaacaggcaacgccaccgtgctatacatctcaacacgttttggctttgaaagttaacaccaaacctcagcttattcgttaaggaagcgcatttgaatgtactaaccaatattccaagtttaattcccgattccttacgtctgttaggggtcgttgtcgctcctccggtgagcaaccagaccagctttaaggtcaaccttagtttattccaaggtcaaatgttttccttcttcaggtttttccagaaattttcaggaaacgctgggtcaagctccctgcctggcaccatgatttttacccaagatattacacatccacaaaggccctgcagaagcaggtgagacgctgcgcgtgcgcccgggttctcgcccccctgccttacacaccggcagcacacgcgcgtgcaaagagccctgggggagaaaagggtcgggcgggccttgccgctccaaggtgccatcgggcgctggtcactgagtggccaccaatccctcccgcccagcccaacaaaagaggggcgtcagggatccccgtacgcctcagacaggcccgggcctgcaggcctcggggccacgcgggactcaccattactccctccgcctcagactcgtactctgctctagtgtagcgccgcaaagagactcgcagtccggccctggcgacacgtgaaaaaatcacccagcgcgcaggcgcgctcgccccagcggtcgccgctagccccctcgcccctcccagggagggagggcggtcgccccgacgcgcaccgcgattcgccccaagggccctgcgcaggacgctgacgcgaagactcggaggcggaagaaaaaaggagctgtttctaggcttttctaggcgcccagccgaggtgaaagaactaccccttcgtcccctcccggaaatgacgcgatttgacccttgagccgtagggagcgcggcattttctggaaagttctggaaccgagcgaggcccgggaactagactaagccggccggagagggctgagcgcgctagcacaccctgcgcgggtagggaggggcggggctcgcgcgcagggtgtgcagattgcagggcccgggctgacgggaagtgggtgggagctgcctgcacacgcggtgccgcggggcgggagtagaggcggagggaggggacacgggctcattgcggtgtgcgccctgcactctgtccctcactcgccgccgacgacctgtctcgccgagcgcacgccttgccgccgccccgcaggtacgcggccttcccgcaccacctccccccggctcctgcgacccccgagtgggccttcctcctct

SEQ ID NO: 25188 - DNA, 2300 bp, Homo sapien
ttaactgaggaacatctaaaacagaggtgtgcaatcttttggcttccctgggccacactggaagaactgtgttgggccacacataaaatacactaacattagcagtagctggtaagcttaaaaaaaattgcaaaagaaatatcaggttttaagaaagtttagggatttgcgttaggcggcattcagagctgtcccaggctgcagattggacaagactgaccaacctgttcctctggtaggtatacaaccaggtataccaactggttaagattagggcaatttcaatgtgttaggggttaaacgaacagtccaagtttcctctcaattcttaaatgccccctcattttaccttgaagcacatcttttgtatttatttattttgtagacaggaggtctcattatgttgcccagactgattttgaactcctgattttgaatcctgagctcaaacgatcctcctgctttggcctcccaaaatgcaaggattacaggtgtgagccaccacgcacagcctcttttgtcttattaaaaatttagaatgtaaggcaaacactgatcacactaggctaccaaattgctattgaggggattttttttttttttttttgagacagaatctcgccctgtcccccatactggaatgcaggggcgccttgcaacctcggctccttgcaacctccgcctccagggttcaaatgattctcctgcctcagcctccccagtagctgggattacaggcgcatgccaccacacccggctaatttttgtatctttagtagagacggggtttcaccatgttggtcaggctggtcttgaactcctgaccttgtgatccgcacacctcggcctcccaaagtgctgagattacaggcgagagccaccgcacccggcctattgaggacaatttttaatactctgaaactatcacataaaataagcatcatagcattggtcatataaaataagcaactttatattagtcatttccctttaagaaacagattagaaccaaagcagttaatgatcttgaaaacgacataaactctacttaataagcgacttttaatactccagaattacttcttttccctccactgcacactataaaaaatagttccactgcagctcccatttacctttcctttagaacccgatccaacagcgactactgttgcttgcaatacttttccttgagatttttctggaagcataatgcctcctttggttacagtttcagcagcactcctttcaaccaatactcggtcaaagagtggaagaaactttctaaacgcttgtcctgcctgtaggaagagaaatgttttgaaacaaaaactaaatgtaatcacattatcaacaggcaacgccaccgtgctatacatctcaacacgttttggctttgaaagttaacaccaaacctcagcttattcgttaaggaagcgcatttgaatgtactaaccaatattccaagtttaattcccgattccttacgtctgttaggggtcgttgtcgctcctccggtgagcaaccagaccagctttaaggtcaaccttagtttattccaaggtcaaatgttttccttcttcaggtttttccagaaattttcaggaaacgctgggtcaagctccctgcctggcaccatgatttttacccaagatattacacatccacaaaggccctgcagaagcaggtgagacgctgcgcgtgcgcccgggttctcgcccccctgccttacacaccggcagcacacgcgcgtgcaaagagccctgggggagaaaagggtcgggcgggccttgccgctccaaggtgccatcgggcgctggtcactgagtggccaccaatccctcccgcccagcccaacaaaagaggggcgtcagggatccccgtacgcctcagacaggcccgggcctgcaggcctcggggccacgcgggactcaccattactccctccgcctcagactcgtactctgctctagtgtagcgccgcaaagagactcgcagtccggccctggcgacacgtgaaaaaatcacccagcgcgcaggcgcgctcgccccagcggtcgccgctagccccctcgcccctcccagggagggagggcggtcgccccgacgcgcaccgcgattcgccccaagggccctgcgcaggacgctgacgcgaagactcggaggcggaagaaaaaaggagctgtttctaggcttttctaggcgcccagccgaggtgaaagaactaccccttcgtcccctcccggaaatgacgcgatttgacccttgagccgtagggagcgcggcattttctggaaagt

SEQ ID NO: 25189 - DNA, 2300 bp, Homo sapien
aaacatttatttgatagcttgttcaatgtcttaacagttaacaggcaagagaatctagattttccgaatcccagtccagagctattcctactggtgcatattgcctttaaacagatcactccactcctcctttacctgaaatattcaagtatttcatgtaactgttattgttgatcatgctttttgtttttcttttctctctcctcctaccccggacaaattaaccctagttataaaatttgtcttgtttggaggtacgtaatctacaggctgacagaggaatgaaaatgtgaaggttatgagctagaaacattctatccctaaagaacaaggtccttcctatgaacaaggccagggttgacatcagaatgcaactttattggacttttcaaaaacaacgaatgtgcattttgttcccgaatttaacacctactcattcacgttttttgttggtttcagatgggttgaaacagtttaacaaatctggaattaagagaaagtgaagatgattccattcaactataggtgactatttacagctcagggaaatatcacacaatctgggaaatgtaaacgtaatccttgcagtaagtgaggcgagttatctatagaccaagaggcctccctgggactctgctatctcatagacccaacccatctctctaagggaggcaacatttacgtgtcacttgtcctaggctctcgttgcatttaatacaagttgagcatccataatctgaaaagtccagaatctgaaatgctcccaaatctgaaactttgaacatccacatgatgccacaggtggaaaattccatacctgaccttctgtgaccggttgcagtcaaaactttgtttcacgcacaaaattatttgaagttttataggcgcctgccgccacgcctggctaatttttgtatttttagtagtgatgggatttcaccatgttggccaggctggtctggaactcctgacctcaagtgatctgcccccctcagcctcccaaagtgctgggattacaggtgtgagccaccgctcccggcctatttaaagtattgtataaaagtaacttcaggctatgtgtgtaaggtgtataggaaacaaatgcatttcacatttaaacttaggttccatccccaagaaatctcattatgtatatgcaaatattctaaaatccaaaataatcagaaatctgaaagtgttttggtcccaaactttaagatgaggggtacttaacctgtataagaatttgtgatttgcacgtctctgttgctggagtcaaggcaatttgtagtgaaggactgagccttatcatacttgtacattagtgcctaccatatagtggggcttaatgagtatctgttgaacgaataatcttttcatatgtagacgctggttctgggagggcaaaattaagtccctattcttgaagagttaccagtcaatacatcttccagagagaaccaacttcctgttgttaaacccttcaatgcctagttctaagtcactgacaattactcagctagagacccactcaacctctcctctcctctcaaattccatttctggaagctgttacatggcccttccctcagcattctcaatacaccttctatctagggacacttgatgttttcttcttttggaaatcatgctactgtatgcgttttttactttttgaactgtcttcccatctgctatcccaaggcctccctcaccccagataaaagattcaaggtttctaagcaggaaaaaaagtttgcgaaaatgctgtggtttcttaagagagaacacttaaaatttgcaacaaaggaaatgtggaatcctgtaagatgtaaaaccctcaccacctgtcaaggactactaatttcctcctcctgcttctgacttgaaaaacacgagctaaatctgtctgcctaacgcacaaaaccagatgtccactcttcatctcacataattgacatctgcgtcttttatctacgtaaacaaacttgtcattgaaaaagtccttggctttgaagtcgccggatggcgtaaataacactgacactcaaatcccccgtctgatttcagattgggtcgatttcacgcaggttctatagaatttgccaagactgctggcctgttttctaccctgattccttaggtggcttctgggacagaattacggttctctaagtatttgcttgcaggtgggtttactgaaacggtcgccactatacgaagttcgttcttcccgtgtaactaacgagagcccataccaacgtgcaacgcagccgtgcacactgccgcagcggtcgctg

SEQ ID NO: 25190 - DNA, 2300 bp, Homo sapien
tgttggtttcagatgggttgaaacagtttaacaaatctggaattaagagaaagtgaagatgattccattcaactataggtgactatttacagctcagggaaatatcacacaatctgggaaatgtaaacgtaatccttgcagtaagtgaggcgagttatctatagaccaagaggcctccctgggactctgctatctcatagacccaacccatctctctaagggaggcaacatttacgtgtcacttgtcctaggctctcgttgcatttaatacaagttgagcatccataatctgaaaagtccagaatctgaaatgctcccaaatctgaaactttgaacatccacatgatgccacaggtggaaaattccatacctgaccttctgtgaccggttgcagtcaaaactttgtttcacgcacaaaattatttgaagttttataggcgcctgccgccacgcctggctaatttttgtatttttagtagtgatgggatttcaccatgttggccaggctggtctggaactcctgacctcaagtgatctgcccccctcagcctcccaaagtgctgggattacaggtgtgagccaccgctcccggcctatttaaagtattgtataaaagtaacttcaggctatgtgtgtaaggtgtataggaaacaaatgcatttcacatttaaacttaggttccatccccaagaaatctcattatgtatatgcaaatattctaaaatccaaaataatcagaaatctgaaagtgttttggtcccaaactttaagatgaggggtacttaacctgtataagaatttgtgatttgcacgtctctgttgctggagtcaaggcaatttgtagtgaaggactgagccttatcatacttgtacattagtgcctaccatatagtggggcttaatgagtatctgttgaacgaataatcttttcatatgtagacgctggttctgggagggcaaaattaagtccctattcttgaagagttaccagtcaatacatcttccagagagaaccaacttcctgttgttaaacccttcaatgcctagttctaagtcactgacaattactcagctagagacccactcaacctctcctctcctctcaaattccatttctggaagctgttacatggcccttccctcagcattctcaatacaccttctatctagggacacttgatgttttcttcttttggaaatcatgctactgtatgcgttttttactttttgaactgtcttcccatctgctatcccaaggcctccctcaccccagataaaagattcaaggtttctaagcaggaaaaaaagtttgcgaaaatgctgtggtttcttaagagagaacacttaaaatttgcaacaaaggaaatgtggaatcctgtaagatgtaaaaccctcaccacctgtcaaggactactaatttcctcctcctgcttctgacttgaaaaacacgagctaaatctgtctgcctaacgcacaaaaccagatgtccactcttcatctcacataattgacatctgcgtcttttatctacgtaaacaaacttgtcattgaaaaagtccttggctttgaagtcgccggatggcgtaaataacactgacactcaaatcccccgtctgatttcagattgggtcgatttcacgcaggttctatagaatttgccaagactgctggcctgttttctaccctgattccttaggtggcttctgggacagaattacggttctctaagtatttgcttgcaggtgggtttactgaaacggtcgccactatacgaagttcgttcttcccgtgtaactaacgagagcccataccaacgtgcaacgcagccgtgcacactgccgcagcggtcgctgcgatcacgacctttcaaaccgccccgcagccctcgcaaagaggctcgtggcgcccgccttccggtgcctcagtccctgccagtagccacccgacgccgtccggctgttcctcgttcgccctctccctccgcctagcccgcttctacccggacggctcccggcgcaggctgcagctgttccgtcagctgccgctcctcctcccagacgcagagcgccgctctgccccgccccccgcgcaggctgccgtccctacatccgggtaccgactccagccgcctagacgctggcactatggtcatggcggaggggacggcagtgctgaggcggaacaggccgggcaccaaggcgcaggtaccatgtctgcacttttcttgtcgggcaactaggtgccgagcagtgctgcgcccggaagctggccgccactgcggggaggttgggccgaggcgg

SEQ ID NO: 25191 - DNA, 2300 bp, Homo sapien
cgtctatagacccacccccaggcgtgtattctctttcccagggatgttccttgctgagaaaaagaattcagcgatatttctcccatttgcttttgaaagaagagaaatatggctctgttccgcccggctcaccagtggtcagagtttaaggttatctctcttattccctgaacaattgctgttatcctgttctttttccaaggtgcccagatttcatattgttcaaacacacatgctctacagtttgtgcagttaacacaattatcacagggtcctgaggtgacatacctcctcctcagctgacaggattaagagattaaagacaggcctaggaaatcacaaggtattgattggggaagtgataagtgtccatgaaatcttcacaatttgtgtttagagactgcagtaaagacaggcataggaaattataaaagtattaatttggagaactaataaatgtccatgaaatcttcacaatccacattcttctgccgtggtttcagccggtccctcagtttggggtccctgacttcctgcaacacatttgtcctttatgttgcaaaaaattagattcttttagttttttttaaatgtacaattaaattggtttttactatagtcaccctattgtgctagcaaatactaggtcttattcattctttctattttttttgtacccatgggtgattacctttttttttttttttttttttttttgagatggagtcttgctctgtcacccaggctggagtgcagtggcgtgatcttgagtcaccacagcttccgcctcctgggttcaagcaattctcctgcctcagcctcctgagtagctgggattacaggcgcacgccaccatgcccggctattttttgtatttttagtagagacggggtttcatcatgttggccaggctggtctcgaactcctgacctcaagtgatccttccgcctcggcctcccaaagtggtagggttactggtgtaagccaccatgcccagtctgatgattactttttaatggtgcccatattttgatttagaaattcaaaactctatttggaatgagaataataatttataatttctttttaaaataatacttatgggtcgatcatggtggctcacgcctgtaatcccagcactttgggagtctgaagtaggcggatcacgagatcaagagattgagaccatcctggccaacatggtgaaaccctgtctctacaaaaaatacaaaaattagctgggtgtggtggtgcgtgcctgtagtcccagctactcgggaggctgaggcaggagaatcacttgaacccaggaggtggaggttgcagtgagctgagatcgcaccactgcactccagcctggcgacagagtggtctcaaaataataataataatattaataataataattatggagcagtaaattagctactaatgctagatattctcttttggtaaaaatctgatttactttttggtgtctggagtttttttttcattgtaactttttgagagatatttaaccatcataaaaaagtgatagacttgtctccccaattaagtaatacattaaaggtttatgggagctgtatttgaggaatctgtgattggaaaaaacgtaatttatagttcaattaaataaaatcttaatattcatttaaaaaacattaaacagccaggcgcagtgggtcaggactataatcctaagaatagggtggctaaggtgagaggctgaggtgggatgattgcttacacccaggagtttgaggctgtagtgagctatgattgtgccactgcacacaagcatgggctgcagagtgagaccctgtctgtaaaaaagaaaagttgaataaaatttatttccttatttcactgataattacattgcaaaagttttttcttcccctctagtgtgagctttgggtctttattaagaattgaagttaatcataatagtattttgtatgtgctttaaccgtgaatttatttttataggatttctataattggcctgatgaatcctttgatgaaatggacagtacactagctgttcaacaggtaataaaaatagtttcttttcaccctgtgtcttttggagtacgatgtgtaagtgcccattgggtggcctttgtctgttggtcactgtgcagcagtctgcttcccaataaagcgtgctctttcacaaaacaaaacaaaatagttccttttacaactccaataacctaagcattttacctctgacatagttaagtattcttatatcttttcgcatagagaagattccactgaattaatggaatgcc

SEQ ID NO: 25192 - DNA, 2300 bp, Homo sapien
acattgaaattatctgcagataagtttgtattccccattacactataagtttctttagggcagagggcatgtttaattatcttttgtaccagcacctagttcagtggctggaatatagcatgcatttaataaatataatgggtacttaaataatcttccaggcacttcagtagatgctagtgaccttcaaagattccatttctgccatacaggacctcacagcccaccataccaaagaggatacggaaaatgacaggcatgaaagtactgtgaacagtcagatgagtcacactgggtcagagttggctgtctttttagtcaaattgcttaccaccgacagtgctcatcctggagcatgaaagactgtggaatttttctctaagacttttctgagaaataaaacatttaaaggcaaggaggcagtaggaaaagaaaaaaggtaatagtgatctataaaataaaggatccatcccccttttgagagttttcatgctcaggcttcaatgtgattgaaaaaatttttcaggcttgtattctctagaatctcaactgtgataagggtttattttgtaaataatggaagcagtggcagaatcacttccttcctattcctactcccaacctgttttataacgtacacgcatcaacaaatgtattttgtgctattagccaggcctagtgttaacatatgagataagattatctcattcagccttcataacaagcctatgtagtaagtaccatttacaggggaggaagttgaaacttgaagaggtcaagtaacttgcccaagattacatctctagtaggcctaagaagcaggatttgaacccaggcagcctgattccagggctcacagttttgatgagcgcaccatacttcctgacctgtaaagggtaaaatacaataaacgttcattacaattggtccattataaattattcttgacctccggtaaatggcagtttataagactgaatggccctggtgcagtgactcacacctgtaatcccagtactttgggaagccgatccagaaggatcactttagctgaggatttcaaaaccagcctgggtgacatagtgagaccctatctccacaaaaaaatacaaaaatgagccagatgtggttgcatgtgattctgccactgcttccattatttacaaaataaacccttatcacagttgagattctagagaatacaagcctgaaaaattttttcaatcacattgaagcctgtggtctcagctacttgggaagctgaggtgggaagatggcttgagcccgggaggtcgaggctgaagtgaaccatgattttgccactgcactctagcctaggtgacaggcaagaccacatctcaaaaaaaaaaaaattaaatgaatcaagttgtcagttttgttttattttttaattaaggatactttgagacctatagaagtattagttgctatcataagccttctaatagtagagtgttttaaactatttaaggatgttggggaaactaattacacacataactgtctctcctttgcaattaagtaaagtcttttttataaaaatattttaatataaattttttatactttgctgttttaattagcatatgattttttccaacagaaagaaacttcatatggaaagaaatcctcaaaagtactaactaaagacttaaagggctgtttttttaaactttactttcctccttttagactccagaaatagtttcctcataaagctgacttcctttctggaaatgatttttgtttctaaatatgttgagaatccactcttttcatttttctctttctttctttctctctctctctttcactctctctctctctttttccctctctctctctgtctctctctccacccccctactgcctctctctctctctctcctttttctttcttggtagtagttgagaggaaggagggtaggcgcaggacagagaggagagggaaaacagaaaaagaattgtgtgccactatgtctgaatatatcttctacttgtagataattacatccaagttgcccttttgcctttttatttccgtttttggacacctctttttatcatccagccaactggaatagacaaagcaccgctggtgccctgagcgacagaactctggtagggggctggctgtaaattgacgtggcatggaaattctccgctaagttgtagcagcttgcatgtttctctaagatcaagcccagcctcctggagctgtagcttaatcatgggttcaatgactttacagaaaaatggatagaaaaattcttcaactc

SEQ ID NO: 25193 - DNA, 2300 bp, Homo sapien
tatattctgttgatttggggtggagagttctgtagatgtctattaggtctgcttggtgcagagctgagttcaattcctgggtatccttgttgactttctgtcacgttgatctgtctaatgttgacagtggggtgttaaagtctcccattattaatgtgtgggagtctaagtctctttgtaggtcactcaggacttgctttatgaatctgggtgctcctgtattgggtgcatatatatttaggatagttagctcttcttgttgaattgatccctttaccattaggtaatggccttctttgtctcttttgatctttgttggtttaaagtctgttttatccgagactaggattgcaacccctgcctttttttgttttccatttgcttggtagatcttcctccatccttttattttgagcctatgtgtgtctctgcacgtgagatgggtttcctgaatacagcacactgatgggtcttgactctttatccaatttgccagtctgtgtcttttaattggagcatttagtccatttacatttaaagttaatattgttatgtgtgaatttgatcctgtcattatgatgttagctggttattttgctcgttagttgatgcagtttcttcctagtctcgatggtctttacattttggcatgattttgcagcggctggtaccgggggttcctttccatgtttagtgcttccttcaggagctctttttgggcaggcctggtcatgacaaaatctgtcaacatttgcttgtctgtaaagtattttatttctccttcacttatgaagcttagtttggctggatatgaaattctgggttgaaaattcttttctttaagaatgttgaatattggcccccactctcttctggcttgtagggtttctgccgagagatccgctgttagtctgatgggcttccctttgagggtaacccgacctttctctctggctgcccttaacattttttccttcatttcaactttggtgaatctgacaattatgtgtcttggagttgctcttctcgaggagtatctttgtggcgttctctgtatttcctgaatctgaacgttggcctgccttgctagattggggaagttctcctggataatatcctgcagagtgttttccaacttggttccattctccccatcactttcaggtacaccaatcagacgtagatttggtcttttcacatagtcccacatttcttggaggctttgctcatttctttttattcttttttctctaaacttcccttctcacttcatttcattcatttcatcttccattgctgataccctttcttccagttgatcgcatcggctcctgaggcttctgcattcttcacgtagttcttgagccttggttttcagctccatcagctcctttaagcacttctctgtattggttattctagttatacattcttctaaatttttttcaaagttttcaacttctttgcctttggtttgaatgtcctcccgtagctcagagtaatttgatcgtctgaagccttcttctctcagctcgtcaaagtcattccccatccagctttgttccgttgctggtgaggaactgcgttcctttggaggaggagagacactctgctttttagagtttccagtttttctgttctgttttttccccatctttgtggttttatctacttttggtctttgatgatggtgatgtacagatgggtttttggtgtggatgtcctttctgtttgttagtttttcttttaacagacaggaccctcagctgcagatctgttggaataccctgccctgtgaggtgtcagtgtgcccctggtggggggtgcctcccagttaggctgctcaggggtcaggggtcagggacccacttgaggagggagtctgccggttctcagatctccagctgcgtgctgggagaaccactgctctcttcaaagctgtcagacagggacatttaagtctgcagaggttactgctgtctttttgtctgtgccctgcccccagaggtggagcctacagaggcaggcaggcctccttgagctgtggtgggctccaccctgttcgagcttcctggctgctttgtttacctaagcaagcctgggcaatggcgggcgcccctcccccagcctcgctgccgccttgcagtttgatctcagactgctgtgctagcaatcagcgagactccgtgggcgtaggaccctccgagccaggtgtgggatatagtctcgtggtgcgccgttttttaagccggtctgaaaagcgcaatattcgggtgggagtgaccagattttccaggtgc

SEQ ID NO: 25194 - DNA, 2300 bp, Homo sapien
ttggccgcatgtctatcttcttttgagaagtgtctgtttatgtcctttgcctttttaatgaggttttttgcttattgatttttaaaattccttatagattctggatattagacctttcttggattcatagtttgaaaatattttctcccattctgtagattgtctgcttactctgttgatagtttattttgtggtgcggaaactctttaattaggtcccatttgtcaatttttgtttttgttgcaattgcttttggcatcctcatgatgaaatctttgtcaggtcctatgtccagaatggtatttcccaggttaccttctaaggtttttagttttaggttttacatttaagtctttaatccattttgagttgagttttgtatatggtataggaagggggtcctgtttcatctgtatatggctagctagttatccaagcaccatttattgaatagggagtcttttgcccattgcttgtttttatcaactttgttgaagaccagatggttgtaggtcattcttaaactgctggattaaataagagcacatcaactgagtatccaaagttattttttatatctcttatacagaattcgattggtccacctttcatcatatcactagagaaatcagatccaagttaccatatgtgttcagtcaaaggttattatacagcagtcaaaatgaatgaattacatgcaacatgtattaagaacatatgaatgcagttacatgcaacaacatggattaatatagcaacaaaatgttgaataaaaaggcaagttgaagactacatgtagtattatatcctttttagaatatttaaatgcaagcaaaattaaacaatgttacttagacatactttgtatgtgatcacacaaatgtgcaagaacaaaattcaggacaatgactacctcagggaggacagtacgagaagaaaaggagcacacagatctaaatcactggtaattttctagttcagtgtttctcaaactttaatgtgcatcagaatcaccttaaaatctaaattactgggccctaccctcagagttttctggttcagtatgtgggggatggggcctaagaatatacatatcgaacgaagttccaggtgctgccagttctgctgctctggggaccacactctgaaaccacttgtagttcttagattgggttgtaggttcatagctgctccattttattattaaatgtatatgctacttaaattaaattaaaaaaaaaagatcaaagatgagagtgtgttatgaactagggattaacattaattcaattctgggctcctgaggtttcctcccctaaaaaaaattctaaggttccattactaaaagcaaacttgagaaacactattttaaaagaacttcaagaccattaaaaaaattaactttttgagaaataaatttgaaaattattctttatatgcacagtgacagcatattgcactctactttcctggatctcaataaactttggcaagaacttggcagatcacaaatctacttttgttgattcaacaaaaactgtttaaagacttctcttccattctcagttcttatccttctctcaaaatgctgtaggtaatgatttttcatcttttttctctctccctcccttacagattgatttaggctctgagataaaatttaggtgacattttagatatcgacagggcatgtgcagagcaatactctgtcttgcagtatgccagccacggacggggtttagacaaacggctgaatataaaactcttgcctacaagcagctcagcctagagggggaaacagattcataaatataaaattacaatccaaagcaggaaacacagtatgttatacgaaggcaaagaggttcgtcttctttcatagcctctcctaaacccggcaactctgagctgtttttctggcaagccgccgtccattggcggcctctggcgccgcggctttcggcgtgcggacggcgcaggcgcgggcggggcggggccgggcggggagggcggtgagggccggcgctcggggccgcgtttcattggctttccggccggaagctgcggcgcgacccggctgcgcatgcgcctctcacacgtgctgtcagaacgccgcctcctccgcttgcggccggtctgcaccatgctgcgaacgtccgtcctccgcctgctaggacgcacgggggctagtaggctgtctctcctggaggacttcggcccacgctactacagttcgggctccctcagtgccggcgatgatgcttgtgatgtgcgcgcctacttcactacacccattttct

SEQ ID NO: 25195 - DNA, 2300 bp, Homo sapien
gtggtagcgggcgcctgtaatcccagctactcgggaggctgagacaaggagaatcgcttgaatccggaaggcggaggttgcagtgagccgagatcgcgccactgcactccagcccgggcgacagtgcgagactccgtctcaaaaataaaaataattagtaaattaattcattaatttaagaaaaaaagcgcaatcttcttccaaaggcgatcccaaggctgttggaggctgaaaccgctaagtcgccccctaccgcgcgggtggcttcgtcccggacccctccagaggctgtgccactgctggaggtgctcagcggggccgggacccgcttggggcgccgtccggggcgagcaccggagcccgactgggctgaatggcaggtcctgaccaagccacccgcgcggccccgcccgcctggcgggatgagtgacggcggcaacaggtgcagagcggcgtccgcggcttctcgggagcccccgagttttgcgagtcaggccccgagagtcagagtttgactctagaaccttcttcgctttacaccagtcttcggaagtcgcccgtcaaccggcttcttctacctcagtaaagccttaaggtcacctcaacctctcgaaacccaccagtcccagaggccgactcttctcaagtggaggagaggggaaggcgtgcatggagctttgcctgaccgctcgctctctcctccccagccgtctgagagaaggcgagaggggtcccagaaccgagccctcgctccgcacgccccacgcccgccccgctgtgccgtgcgctctgcccctgagacgccccggctcggagtcccagggccacagccgaaactcgccctcccgcgcccctctccggcttgcagcgcccgcccgcaccgccacctgccacccgaggcgacgcagtccgcttctccccacccgccaggtggcaggttcagggccggggtccgagcctgcttccctgcagctgccacagccaccctcgccgccagggggcgagagtcccaggcaggacaagcagcgctgctgccttggcgtgaaggtggtttcaaactttaggcttcttttccctaccccgcgtctctgaagagcagagaggaagatggaaaccgagtccgggccggtgagtacggcgatcagggccccagggcgcgggatagcggggagaaggagcagcgtggagcctgtccctgagggcttggaggggcgaggtgaaggccccaaacgctcgctatctggttgggaagaaacgtggccaggtgccccatcgaccgctgccaggagccacccgcccgcagacctcgtctggctgtgtcatgggggtcagaaaggcgccgccacggggcctggactgggtgtagacgggccaggggacctcaggcgtggatgtttcgggaggcggcgggctgccaggcacccagcgaagtccgagcaggtaaaccgctttcccgccgaaattgggctaggcagcgtctttgacgctccctgcggccgaactcgacccagccgcccaaggcgaggagttgccagggcggtcgacgcctccactccccgactggtcagcgaggaccggaaggtctgagagacctggcagggcccgcctgtggcccaggcgggacccggacactctagccctggctgtgcacccaagccagtcagggtggacttggggaagtgaaggaggactgcccgcacaggcccgaggcgcagcggcaacgtgccatcccgccccgccccgtcccgccgccagcagccaatcagggagcgccgcgcgagggtggggaccagctgcgcacgaggccagcggcggggtcgctgccgttgaggcttcccgccactgctgctggcggatttgtggggcaaaatttctcgctggctagccttcttttccctcccgcactttggtggggagggggtggatcctcgtttcggtgcccaagttcacgatgacccgagagaactcgaggaagttgtcgccgcggccatttcccccagtgccgcaacttgctggccttggagggggaggagcgccgaggcagtgactgcgacggttagcccgcccgttcctgctgtcttcgtttgcaaaatagatgctagatctcgaggttgattctcaaggggaggggccagtgagggcacattgctttggaggagtagtttaataaactctctagtgctggaagttttagcaaacggaggagccttcaaacccggcaacagtccccatctaggtgtttccgtaacacatgcggaattattgctagtggaatttcaggctttctttgttgtttaact

SEQ ID NO: 25196 - DNA, 2300 bp, Homo sapien
tactagaaatacgtattatttacaaagcagtcttctttcagccaggcatggtggcgtgggcctgcctgtggtcccagctactcagaaggctgaggtgggaggatcgcttgagcccaggaggtcgagaattcagtgagcgtgatcgcaccactgcactccagcctgggcgacagagtgagccttcgtgtctaaataattagtcaactggacgggcacggtggctcaagcctgtaatcccaacaatttgagcggccaagacaggcagctcacttgaagtcagaagttcaagcctggccaacatggtgaaaccccgtctctactaaaaatacaaaaattagccgtggtagcgggcgcctgtaatcccagctactcgggaggctgagacaaggagaatcgcttgaatccggaaggcggaggttgcagtgagccgagatcgcgccactgcactccagcccgggcgacagtgcgagactccgtctcaaaaataaaaataattagtaaattaattcattaatttaagaaaaaaagcgcaatcttcttccaaaggcgatcccaaggctgttggaggctgaaaccgctaagtcgccccctaccgcgcgggtggcttcgtcccggacccctccagaggctgtgccactgctggaggtgctcagcggggccgggacccgcttggggcgccgtccggggcgagcaccggagcccgactgggctgaatggcaggtcctgaccaagccacccgcgcggccccgcccgcctggcgggatgagtgacggcggcaacaggtgcagagcggcgtccgcggcttctcgggagcccccgagttttgcgagtcaggccccgagagtcagagtttgactctagaaccttcttcgctttacaccagtcttcggaagtcgcccgtcaaccggcttcttctacctcagtaaagccttaaggtcacctcaacctctcgaaacccaccagtcccagaggccgactcttctcaagtggaggagaggggaaggcgtgcatggagctttgcctgaccgctcgctctctcctccccagccgtctgagagaaggcgagaggggtcccagaaccgagccctcgctccgcacgccccacgcccgccccgctgtgccgtgcgctctgcccctgagacgccccggctcggagtcccagggccacagccgaaactcgccctcccgcgcccctctccggcttgcagcgcccgcccgcaccgccacctgccacccgaggcgacgcagtccgcttctccccacccgccaggtggcaggttcagggccggggtccgagcctgcttccctgcagctgccacagccaccctcgccgccagggggcgagagtcccaggcaggacaagcagcgctgctgccttggcgtgaaggtggtttcaaactttaggcttcttttccctaccccgcgtctctgaagagcagagaggaagatggaaaccgagtccgggccggtgagtacggcgatcagggccccagggcgcgggatagcggggagaaggagcagcgtggagcctgtccctgagggcttggaggggcgaggtgaaggccccaaacgctcgctatctggttgggaagaaacgtggccaggtgccccatcgaccgctgccaggagccacccgcccgcagacctcgtctggctgtgtcatgggggtcagaaaggcgccgccacggggcctggactgggtgtagacgggccaggggacctcaggcgtggatgtttcgggaggcggcgggctgccaggcacccagcgaagtccgagcaggtaaaccgctttcccgccgaaattgggctaggcagcgtctttgacgctccctgcggccgaactcgacccagccgcccaaggcgaggagttgccagggcggtcgacgcctccactccccgactggtcagcgaggaccggaaggtctgagagacctggcagggcccgcctgtggcccaggcgggacccggacactctagccctggctgtgcacccaagccagtcagggtggacttggggaagtgaaggaggactgcccgcacaggcccgaggcgcagcggcaacgtgccatcccgccccgccccgtcccgccgccagcagccaatcagggagcgccgcgcgagggtggggaccagctgcgcacgaggccagcggcggggtcgctgccgttgaggcttcccgccactgctgctggcggatttgtggggcaaaatttctcgctggctagccttcttttccctcccgcactttggtggggagggggtggatcctcgtttcggtgcccaagttcacgatgacccga

SEQ ID NO: 25197 - DNA, 2300 bp, Homo sapien
cgtaaactttcttaaaacattatgagattttgtgatttatttttttagctcataagctatcgttagtgtttatgtattttatgtgtggcccaagacaattattcttccaatgtagcccagggaagccaaaagattggacacccctgttcttcatcttcatatctcccacattatattccattatgtactgcacagaataggaactctgttaagtgtctactaaattggggtgcattgcataattttatgtggtttatccaagttttaaagctgaactttccttttggtgtaagaattaatagtaagaggcagaacagagaactgccacactgaaaataaagtatatccctctagtacccaacaccagccttgaaatacagttagcgttccctaaattacgtaaatttttgtcagattaaacacctactgcgctgaatacattttttaagagaatgtagttcttgaaaataagtgtttttagtcaaaatgttttgggcaagagaggatagtaacatctacccaaatccagcaacagtcctaggaaaaaaaaatgcccaaagaagattagttctactggtattgaacagtaagattattatgctttagaatatgagttttcatctaaataggtttgtattctcgatttccacagagactgaaacctggtaaaatgagcttaaattgcatgcagaaatgtataatgactttagggattcttcgggtaagataaacaaaaattgtttcccattttattttgggtaaaataatatgaagagctaatctttgaataaatcaaaaattaatatattcactctgtttttaattctatatcttgaaggcaaagtaacccaaagtcaaacttttatagtagtgtgtacaatagttattactggtgtaaattttaacagttgttactgctgattctttaaaaatatgtggcaaaatggttatgatcaagaactgtgggttgggggggagacgagggttaaacctcctacagctttagatcttgaccaaattacttatccttcaaatctctgcttcatcacgtactatgacgataattggagcatctatctgaaaggttgctgtgagcatgaaaagattaaatgatactgatcataaagcattgtgcctgaaacaaagtgagtacttgataaatggcagctataataatgataatcattactataagtttatccagttgtaatcattttagctacctactagaaatacgtattatttacaaagcagtcttctttcagccaggcatggtggcgtgggcctgcctgtggtcccagctactcagaaggctgaggtgggaggatcgcttgagcccaggaggtcgagaattcagtgagcgtgatcgcaccactgcactccagcctgggcgacagagtgagccttcgtgtctaaataattagtcaactggacgggcacggtggctcaagcctgtaatcccaacaatttgagcggccaagacaggcagctcacttgaagtcagaagttcaagcctggccaacatggtgaaaccccgtctctactaaaaatacaaaaattagccgtggtagcgggcgcctgtaatcccagctactcgggaggctgagacaaggagaatcgcttgaatccggaaggcggaggttgcagtgagccgagatcgcgccactgcactccagcccgggcgacagtgcgagactccgtctcaaaaataaaaataattagtaaattaattcattaatttaagaaaaaaagcgcaatcttcttccaaaggcgatcccaaggctgttggaggctgaaaccgctaagtcgccccctaccgcgcgggtggcttcgtcccggacccctccagaggctgtgccactgctggaggtgctcagcggggccgggacccgcttggggcgccgtccggggcgagcaccggagcccgactgggctgaatggcaggtcctgaccaagccacccgcgcggccccgcccgcctggcgggatgagtgacggcggcaacaggtgcagagcggcgtccgcggcttctcgggagcccccgagttttgcgagtcaggccccgagagtcagagtttgactctagaaccttcttcgctttacaccagtcttcggaagtcgcccgtcaaccggcttcttctacctcagtaaagccttaaggtcacctcaacctctcgaaacccaccagtcccagaggccgactcttctcaagtggaggagaggggaaggcgtgcatggagctttgcctgaccgctcgctctctcctccccagccgtctgagagaaggcgagaggggtccca

SEQ ID NO: 25198 - DNA, 2300 bp, Homo sapien
ctctgtttttttttaaatcactgaccttgaatgtttgttaataaagtgatgctaattttaaaatttgtaaaaataaattattatcataatggtacacaaatctgtaggatgaggaacttataaatgacattaatatcctataacaagataatgagtgagataaaggcagttttacatttttcagaggacaaccgaagaatgggacttttattagagtaacaaagaaaaatgaagcactgacaactgtaaatgacagaagtcaaatgtaataatagttgaatatcaaagaaaaaaatgatagcctaaaataagatatatttctgaggatagcaattaaaaatatttcctatatagcatagacaggaattccctgaactaaaggagatggaagacatgtatggttgttttaagtctgggtacactttattttcttcctctagtctgtgcgttgtaaaggcatacctgttgaaaaggaaacttttgttgggttacccctcctgtcttttaaagatgagggggaaaaagaagcctttgctgttatggatgcagttctcagaatctcactagagggtggtgttggttctaaaaccagaggtcactgctactctctacagtacattcattactaggctgcatttatgtttaaagaaaaggcaaagtcaagccttctcagtattccctagtagttgataaatgtcaaatctgaaacctcccaagtgcccctgccagttctggctggttgtagcccagaggagacagataaagtagtgaagagattatcggaggagttgggtggctgattctaattttggctcctgcactaactagtagacaagactccctgggcctttgtctcaaccgtaaaacaaaaatgatgtcctagttgatccctaaatccccatatatctctaaaattatgagattcaaaccaaattgttggtctaaaatgctgaataatttctcatgctgttagccagactaaggaacaagtaaaatctcaaattattaaattattaataagataaaatgtaatgttataagtgaggtttaatatagattctaatatcaaaggagtttaaaattaaaatgccaagtcttttgtcttaccagggagccttaggaccatggtttgcatctgagcattctgtggataatttcagtgacttaactcatcatccaaagatctctcccttcttggttgctagcttactggaaatgagcaaaatatgtttttatataggattatatagagaaaggaggctgaaccattgtcaaataggaatgttttaggatagagactaaactccccacctgcatttatctgacttggattatatctgtgctttttaagagtcagtcttcggagggatttagttggttcagtttcctttcaccctcatctctttcactgactccctttccttgttatatttactcacactgcagaatgaccttagaatcctttcctggaacctgaagcaaattatggaaccccaagatcccagtaaaccctagtttatctctgcatggacttgacttctaagaattggcctgagagcctgcaattaacctgtgaccacgcaaagcttcaccccgtcaccccaaacgcttagacattcatactcaatacccactttcctccaaattgctttgtttggcagaagaaggtttctttctcccctctccttcacccaacctggatttttgttgcatctcaggctcatttcgcaaatctaaacttcctaaaatatacacggagcgcctccgggtttgcacacgcgcgcgcgcgggtacaccctggctcgagtacattagccccgctgggccggctcccagttgcagaacacattccattcttcgcgctcgggcacacccctccgcagtgaggattggtcgggccgagccccctcggcgaggcgaggctcctaagaggcccagacgcctgccaatccccaagggctgtcaaaacaagtctccctccctgtcacaacagagctgagtggaggccgccgccgccgccgcacttcctgggaccgctgcgccgcagtccgcgggcaggtggcgggtgcgcccggccgcagtcgcccggctctggcccctatcgggccgccggcgtccgggctccagaggccgcctggctgggcgcccggtgccttttgtctggcgcagggccggcgtttgcatcacatttcggatacctccctctctttttcgcctctccttctgcctcccgctcacatcgcctccccactcccgccaccgtcccccgccggactgctagcctcctagaccgaagcccg

SEQ ID NO: 25199 - DNA, 2300 bp, Homo sapien
tatcagttctaatagttttttgatggagtcttcaggtttttctaaatgtaagatcataccatctgcaaacaaggaaatttgacttcttcctttccaatttcaatgccctttatttctctcttgtctgattgctctagctaggagttccaattaatggtggtaaaatgggcatccttgtcatgttccagatcttagaggaaaggctttcagtttttttgctgttcaatatgatactaactgtgggtttgtcttatatggcttttattattttgaggtatgttctttttataccctgttttttgagagtttttatcatgaagggatattggattttatcaaatgctttttcagcatcaattgaaataatcatatgttttttatcttttattctattgatatatcacattgattaatttgtgtgtgttgaaccatccttgcattcctaagataaatcccacttggtcatgatgaatgattttttaatatgctattgaatctggtttgatagcattttattgatggttttattggcctgtagttttcttttattgatgtatctttgtctgatttttgcatcagggtaatactggacttgtagaatgagcttggaagtattccctcatcctctattttttggcatagtttgagtaggagtagtattagtttttctttaaatatttggtaaaattcagcagtgatggcatcaggtcctgggcttttatttgctgggagactttttactacagctttgatcttttgtttacttgttactaatctcttcagggtttggatttcttcatggttcaatcttcgtaggttgtatttgtctaggaatttattcatcttttctaggttttccaatttattggcatatagttgctcatagcagcctctcatggtcttttgaatttctgtggtattggttgtcatatctcctttaacatctctgattttatttatgtaggtcttctgtctttttttcttaatctggctaaagttttgttgattgtttttaatcttttcaaaaaatcagcttttagtttcattgatcttttgtattgttttcttcatttatttctgctttcatcttcactattttttcctgctgattttgtgtttgggttgctcttgcttttctaatctttaagatacactattagattgcttatttgaagttttacttcttttttgatgtaggcacttataactatacatttcccttttagcactgtttttgctatatcccataggttttagtatgttgtgtttccaatatcacttgtttcaaaaaaattttcagtttccttcttaatttctttattgacctattggccattcaggaacaggagcatgttgtttaatttccatgtgtttgtatagtttccaaagtttctcttgttaatgatttctagttttattccactgtggttagagtctcacccaaggcccacagcatgtactacctggctaccactcttgactattcagggcccaagggctctttagtcagcagatgatgaatcctgccaggactgggttcttcccttcaaggaagggtttttcttctggctcagggtgtgtctagaaatgtcatctgggcatccaggagatagggcctcagaactctgcctcatgccctatcctactatggctgagctggtattcaagttgcaagacaaagttctctttactcttccctctccactcctcaagcagaaggaaggagtctcttttggagctgtgagctgtgttgcctgtggttgtggaagagatggtgcacatgagctggtctcactaggtcacatgcccccaagttcactgtctctgagcccagcacagcaccaggactttcccaagaattgcagtccttgtggcctagactgcctttcaagtttatttaggacctcagagtactttagccagggtgataagccttgccagaattcaggttctgacttctgggatgggtgattcccttttggctagggctggcctgaattcaccctccattgagttttgcctgtattgctttctgctgtgacagggcaagactgagtttcagtgtaaagtctaacaatcactgtgctctcccttccccaggcacatagattctctctttgaacaatgcagctgctgcaggggatggggaagggatggcactggcaattcaagactgcctttcctacttcttcagtgcctctttcaccaatatgaagttaaaaccaggtactgtggtcacttacctgatttttggttcttatgatggtgcttttttttctgtgaatagttgttcaatttgg

SEQ ID NO: 25200 - DNA, 2300 bp, Homo sapien
gtgggttttgagaaagggactgaaatgaactgatatttaacctctatggatttgatgtcggtgtattggagtgaggagaaatggacacaggaaatgatgacagcggcttggattactgtcttaaaactgaggttttatcctgagaaaattcccttttctaagacaggaaggactgttaagaagtggcctgttttgtgagattaggatggagatcagtttgagaagcccgttggacatccaaacagcaatgtccagtgaaaaagaagttaaatacacatgccaggagttgagggaagtagtcctggctggaaagaaaaaattgggatttttcagaatatagacagtatgtaaagcctgagagatgagattaacctagaaagcgagtgtagagagagacacctgagcttccctgggttcaagaagatgagatacaggctgggtgtggtggctcacacctgtaatcccaataccttgggaggccaagctgggaggattgcttgagtccaggagttccagaccagcctaggcaacacagcaagatcccatcttcatttaaaaaaatatatattttttaagctttttaaaagaagatgagacacagctagcaaaggagtggaataagagctgctggtgagggaggaagacaaccagagccatgtgaaagaaatcatttaaagaggagtgagtgatcccctatggggaaaaataaaatgctgcttctatgtcaatcaagatgagggctgagtcactgtataggaggcagcaataaaaaaaataaagtaaaagatgagggctgaggactgaccattaggtttagcatcatggaggtccttgattttaggaacagagcatcagtggagcaggaaaggaaagaaggaggggtggaaagcctaggacatcagatacagacagccctttgagaggttctgctctaaaatggactgaaaaatggccaggtgcggtggggcatgcctgtagtcccagctactcgggagactgaggtgggaggatcccttgagcccaggagttcaagaccaacccagacaacatagtgagagccagtctcaaaaaaaataaaattaaataaaaaataaaatgaattgagaaatggagaggctgcaggagaagtggggtgaagagagataggagaaattacagcagagaaagggaacgtttgatgataaggaaaaggacgaagcaactgctgaagtggcatccagtgtcaggctccagaggagtgaggggctctctgatcaagaggaggggctggtctcaaagagggtgagtagagtacaaccatggtaacagcaggacgcagaagcactggcacggaggcaagtaagaggctgaatgtggaaagtcaacccccaacgtgttggaccagttaatgctgctggtctctctgagaggtaactatggaaatctataataagccaaagcagctgcacccacagctgatgtgaacctggaagatacagccatgtgagaggaccacgtcattattatggaaggggttcttagaattgccacccaagtagattctgttggagatgggaggagaaagggaggaaagggagtagagaaggccacacacaatcttaaattcaatatttcactcccgttaaagataagctgtttataagctccagtgtagggcatgtaattctatgtaaaaactctgtggttcctcttcccacatgtaaatcatgatcactctacattctgctctctgggagccctcaaggcaaagagacaacaagactcgaggtatagtaataaaagtctgggtattataaaatccaccctgagctccaagaaaagaatagaaagaaggaagctctgaaaagtactaatttaccaaagttcaatgcagttttgtaaatttttattaacatcctcggaaatccaaatgcccatcttgaaactgagggtttttttcctcaattatggctatatatgctttaaagataaactatgaattctctttaaactaagtgccttgataaaataatgagtattaaatacatttcagaccacagaaaggacttatcacaagtctttgtggtagctgaggagtgccccctacagactgatatgcacaatgcaagcagatgaagaggaaagaactgagcagcagtatttcaggattctcaataaggcatcaatgaaaaaaggtaagaaacctttgctgaacaaaatgtgacactaaaggctaggaaatatatggacactatgaattcttgtttttacatatttgtaaacagcaagaaatgaaaaacctttgtttggacttttcttct

SEQ ID NO: 25201 - DNA, 2300 bp, Homo sapien
tttcttgcggtggaccagtctggcttgggtttagatccatcccccccacccccatcccgaaataatccagagacttcccctacccccaccccaaattattattttgaaggcgctagatctggggaccgaaagggggagggggagaaatcggaaaccgaggacaacccaaaaggactcactttgcctgatgactcaacgcaactaataatcatctccctctcagtgtgtctctctctgcggcttgtcagtgagtccggctctggctgctggcagaggcggccgagaggggagaggctggaggtgacagcttgggcggccgccgcgtttcctcccgcgcgcggtcccgggtccctgcgtcttctcggctcttggtgttaccggtcccaccgctctggccgcgcctcctcgcgagctagccgccctgcgaaccagcagccccggctcgccgccgccgccgccgcctccgggttctcagccctttctctccagaacgggtctccttcccgaaggtgtgaaaaggctctttcagcctccttctcttcccccctcctccgccgtcccctcccccgctcgctcgggtgtccctttggaggagtcctttccctctcctcctcctccccctcctccctccccccatcatcatcataacaaccatctccgcaccagaagaagacaccctgacccaggaccttaaacattaggacctggggaagagggaaggggaaggagtaaagaggaagactaggagaacactgcaaagccaagcaccagaaactttccaccctggattctctacttttgctccatggacagagccccagtcagccaagtttcagacagaccgtgagcagtaagtacgcagggcgagggctcccgcgccgcgctcgggagttcggggaagcccagggccaacgaagtcccctccccgccgctctcggcctctcggaccgcgaagtcggggaatgcaggcggaagcctcgccctcagccctcctgctccgtgtcttcatctcgcatccttcctttcacctccccctgccacccccaccttgtctccttgacccgtggcgccgacactgctcgcgcggccagagcgcccacgaggattcccagcgcgcacgcagtacggtgccggggtcttgcttcttgcgggtgtcagtgacaacgcgagcgccgtttcatcaggtgtttcccctccttccccgcccccccccacccccccaatccaggggtgtcgagacctgcggcttccgtggggagcgcactgccaacctagtgacccagaggaaaactttctggagcgatgttaaaattggggcggatgaaggctgctcttgcactaagaattcaaatgctttttgcttttgtgttttatattgaagagctttaaaaaagcactggggatcagatgaagataagaacgctccaaaataataacgattgtagcgcccgcctttgtgatggaggttattctgataaatacctccaagtgttttcggatgcttattaatgtggaattagggttgattttatgcaggtgtgtgcttatctcaggacttgctccgtataggtaaaaagcgggtattcaaggggttctttcgcccggcctttggctcctgcctggccattcacagcgcatttaccgggtggttaattcggttatggacttgcgcacacccccaactcccttcccatgtgggtggaacgtctttttctgaagttcacttattccgcaaccctgaccccgggacgggctaggctgtagcacccaggaacggtttatgccaaccccgtcccaatgaatggaccacttctaggcgcccctgggtgccaaccccggccgcgaccccgagggctgacttctggggagctgcgactgggcagagtcgccgaaccgaggcgctgggcttcctgggggccgcccagtgtaaggttgggaccggcttcccggctcgggcccctcgggcagcgtgggaggaagtttgtgtggctgtggtgcagcgctctgccactggcctgaacgtctatcacgtgtatgagcggttttccctcttttttctccctcccccttcctccccccaccccctccctaggtccctgtgcgttttattgcgacctgccggtgggaactttgtctccgagtcggagcagcatggagcggcggagcgagagcccgtgtctgcgggacagccccgaccggcggagcggcagcccggacgtcaaggggcctcccccagtgaaggtggcccggctggagcagaacggcagccccatgggagcccgcgggaggcccaacggcgc

SEQ ID NO: 25202 - DNA, 2300 bp, Homo sapien
gggcggcccccaggaagcccagcgcctcggttcggcgactctgcccagtcgcagctccccagaagtcagccctcggggtcgcggccggggttggcacccaggggcgcctagaagtggtccattcattgggacggggttggcataaaccgttcctgggtgctacagcctagcccgtcccggggtcagggttgcggaataagtgaacttcagaaaaagacgttccacccacatgggaagggagttgggggtgtgcgcaagtccataaccgaattaaccacccggtaaatgcgctgtgaatggccaggcaggagccaaaggccgggcgaaagaaccccttgaatacccgctttttacctatacggagcaagtcctgagataagcacacacctgcataaaatcaaccctaattccacattaataagcatccgaaaacacttggaggtatttatcagaataacctccatcacaaaggcgggcgctacaatcgttattattttggagcgttcttatcttcatctgatccccagtgcttttttaaagctcttcaatataaaacacaaaagcaaaaagcatttgaattcttagtgcaagagcagccttcatccgccccaattttaacatcgctccagaaagttttcctctgggtcactaggttggcagtgcgctccccacggaagccgcaggtctcgacacccctggattgggggggtgggggggggcggggaaggaggggaaacacctgatgaaacggcgctcgcgttgtcactgacacccgcaagaagcaagaccccggcaccgtactgcgtgcgcgctgggaatcctcgtgggcgctctggccgcgcgagcagtgtcggcgccacgggtcaaggagacaaggtgggggtggcagggggaggtgaaaggaaggatgcgagatgaagacacggagcaggagggctgagggcgaggcttccgcctgcattccccgacttcgcggtccgagaggccgagagcggcggggaggggacttcgttggccctgggcttccccgaactcccgagcgcggcgcgggagccctcgccctgcgtacttactgctcacggtctgtctgaaacttggctgactggggctctgtccatggagcaaaagtagagaatccagggtggaaagtttctggtgcttggctttgcagtgttctcctagtcttcctctttactccttccccttccctcttccccaggtcctaatgtttaaggtcctgggtcagggtgtcttcttctggtgcggagatggttgttatgatgatgatggggggagggaggagggggaggaggaggagagggaaaggactcctccaaagggacacccgagcgagcgggggaggggacggcggaggaggggggaagagaaggaggctgaaagagccttttcacaccttcgggaaggagacccgttctggagagaaagggctgagaacccggaggcggcggcggcggcggcgagccggggctgctggttcgcagggcggctagctcgcgaggaggcgcggccagagcggtgggaccggtaacaccaagagccgagaagacgcagggacccgggaccgcgcgcgggaggaaacgcggcggccgcccaagctgtcacctccagcctctcccctctcggccgcctctgccagcagccagagccggactcactgacaagccgcagagagagacacactgagagggagatgattattagttgcgttgagtcatcaggcaaagtgagtccttttgggttgtcctcggtttccgatttctccccctccccctttcggtccccagatctagcgccttcaaaataataatttggggtgggggtaggggaagtctctggattatttcgggatgggggtgggggggatggatctaaacccaagccagactggtccaccgcaagaaaagaggggagtggggggcggggaggagggctggggaggttgcggggggaggggggccccgcctggcaggaaattaaacatcaatcaatcaatcgctgtgagcacggcgacccaacggcggcggggctgcgaaggaggcagagggacaggcgaggggcgggtgggaggcagggaggagggaagaggaaggggagagtcggcggtcggagcggggtgacgaggacctcatgcacgaggcggcgaaggaccgatggcagagaaccgagtgcggcgcgaggcggtggccgcggccagcgggtgggtgcgtctgggcgcaggcgggcaccggggcccagggtctggtcctcctccttgtggcgggtccagggcgcggccgcct

SEQ ID NO: 25203 - DNA, 2300 bp, Homo sapien
tgtgcattttctcccactcttttgactgggggtggtatgcggggggaggatggggcttggtgaagaaaaccagggaaaggcaaacgctgcctaaaactcccagggtggctcccctaagaattgctatcctgcttgtttcttttctcggctgggatccgaccgactcccaggtcgcctcggacttctttggaacttggtgggcggcgcctaggtgcggggttcgtggtgatctgggcgccgacacttaggccgggggcaggtttccttcctgggaccctttctcttccagaggctctcaagcctctaagcccgtgcgcatgccgcctaccaggtagatgcggcgagggcgagtggaaggcagccttgtcccgggcacgatcggcggactcagcttttcgcagtctctgctcccagcagggatttacagaactgctcccgagagcgtttcccgaaaccgaacttagtttggccctctggcgccgccgtacagtcaacgcttcttaagggggatcggtggctcttgctgcgggagatgtgggagagccctcggggtcctggggattaggagggagagtcaacgtgtgcgggagggacatgaggtgcaaccagttgaggggggattctctggcctcagggccggcggggatgcgtccacattttctcgcctaaggtcctagcggctaatgtccgccgacgccccgggtatctcgcgggggctgcggcccctgcccacgtgcttttccttaaggaggcagcgcgcccaagcggaatcgcagggacaaaagcgcggccagaggccagcctgctcggctagtgcccgcgccaccttaaatgagcaccgcggccggagtcgggctgccggcggccgcggccgcgggagtcggcaaaagtttgtggctctgttacgccttcgcgggacctgctggggacgctcctgtgcggcctccccccgggcggggaggccgggtcctcagggcacagctctgttggcgccagcagccctgggctcgagcagcttggggtccccaggagccccagtcctgtagcccgaggacaggcagccccaccgccctcgccgccaccgcgtcacgggctccaggcggcccggtttgcaccgctcgcgatgtcgccggagcggcgagcgctccagcgatgccatccagggatgcaccccgctctgcatccaccacgcaacccccattcctgtgccacccacagcccggcgggcagtggccgtgctcctggcattcgggacaccccgactattgttccggactcgcggccgtgccagctttgaaggagaagcggccttccctgcgcgcgcggcggcacgaagcgcggcgggccgggacgttcggctcggcgcggagggggagctcgcaggcaccgggaaaagttgctcggaggggcggaggcggtgggtggtgggcggaggcggtgggtgggggaggcgatcgccctcctatctccaaagtcgaaagtactccgcgcagttaacagagctgggagccgaggcagccgcggtcgcctcttgcgcgtcggtctgcgtctccgccggcagacgcggcacccagcgactgccttgtcgccgccgcctccgcgccgggacgagtgcgcctaggggctgggcgaggcggccgcgccctggacccgccacaaggaggaggaccagaccctgggccccggtgcccgcctgcgcccagacgcacccacccgctggccgcggccaccgcctcgcgccgcactcggttctctgccatcggtccttcgccgcctcgtgcatgaggtcctcgtcaccccgctccgaccgccgactctccccttcctcttccctcctccctgcctcccacccgcccctcgcctgtccctctgcctccttcgcagccccgccgccgttgggtcgccgtgctcacagcgattgattgattgatgtttaatttcctgccaggcggggcccccctccccccgcaacctccccagccctcctccccgccccccactcccctcttttcttgcggtggaccagtctggcttgggtttagatccatcccccccacccccatcccgaaataatccagagacttcccctacccccaccccaaattattattttgaaggcgctagatctggggaccgaaagggggagggggagaaatcggaaaccgaggacaacccaaaaggactcactttgcctgatgactcaacgcaactaataatcatctccctctcagtgtgtctctctctgcggcttgtcagtgagtccggctctggctgctggcagaggcggccgagaggggaga

SEQ ID NO: 25204 - DNA, 2300 bp, Homo sapien
ggaaggcgtgcggataacgaagtaagtgtcccccgccctgcgctccggtcagtccccagacgcccggagcactctgggaaagggctgaagcccaccctgggcgaaccgtcctccaaggcgcgtcccccactggggtattctggcccctggctcttgtcctcttggcgcatctgatttccagtctaagcccctcgcggttatgccgtccgagaaagtgttggtcgccaactctccacggacagtccgcggcggaaattggcttcagagctggcgtgggcttcatttgaaagaaatgattccctcccgccctcctcccgcccccaggagggcaagctccaggggaagaggcaggcccgcttgggttcctagaagccgtcgaaagcttttgacgcgggcgattcccatagttttccctgcgtgttccagggttgagggaaaacgcggcgcaactttccagggctctttaaaaggcagggtctctctgcctgggtgaccgaacttgaaagccatggaccttggggatggatgccgggccctcagagcccgggatggcccaggcgagagccgaagtcccgcgcccggcaccctgcaccctccacccaggcgcccaggcctacgctgtccggagcgggcctctaggaaggaaggttgaccagggtcgaaagcacgcacaacaaaaacttggtgtcgacaaagagaaatcaagaaacgtcattagagtgcaggccataaaagaaggcctgacagagagaaaaggagagaagatggaaataagaaaaaccatacacctttaacactagcatataaagatctattgatttttaaaataacaaatccgtgtttgtgaaaaacaggcggccttttactaaattacataaggaaaacttgggaggtgggtgaagaaaaggggaaaagtctgagcagattcccgacaaaaacgtcagttagaaggaaactgagggataaaaatgtcccccagatgtgaactccatgttttgagcatggaagcaaactatctcctaatgcacaaaatgggttttagataaaagtatttttaaaaatcaaacgtaattaaaacaactcttttctcgtgattttgttttaaaaagtttggaaataaaccttttgagggatacaaaacgaaaccaaacaaatattcttgaatcatcagcaaatttattcatttactgttttaaacaatacaaaattctagcgaaaggtaaaactattaaaatatatcttattgtcgaaattaaacctgctggaaataatcgcttcagttgaaataaggtcaatacaaaaattgtgcagtaaaaagcgtatgtaatttgaaacaaaaaaggcctttattagagacaaaactcgagaggacaaaaacccacaccggacatagatcacaaaacttcctagaactctcctttaaatcggaagaaatttgtaaaatgtgatatgaaatacaactctacaaacatccaaaatacatttctggtcataattaatcgtatttgacattttcctctaagtttaatgcaactttaaataatttaggctttttcctaacatgatagatttttttcagtatcagaaatggacaagaggaaactccagtaaagagaaaagcaatgaatttaaaagggtgcagaatctgaaaacaaactaaccacaatgtacatttaattgtacttaattgtatatttcatttaaatagtccttctcaggggtttaataatttagaatcaatagttcccttcaaaacataataaaatatttacactttataaaatattaaccgattaacaatacagccgtgttgtttataagagtgtaactgaagtcctgcaaatcatgctgttgacacaagcctgtgaggttagcgaagtgatccttagcaaaatgtaaatgaagatcttcagacagtggtgtttataaaatagctcattaatgacttaggattgaatcgctccaaccattcgcatcatcagatataataatagtgacgaatcagacaggaaagatcctggctaaaccatttgcatttttttccagaagtactgaactcctaatatcaccaattcttctaagttcctggacattgatccggaggaggattcgcagttcaacatcaaggtaaggaaggatacagcattgttatcgttgttgagatattagtaagaaatacgcctttccccatgttgtaaacgggctaagtttgacagtggtagttggcttttgcaacacccccttcccatttcgacatattacagattgaagaaaaagtttgttgctcaaaacttacagtt

SEQ ID NO: 25205 - DNA, 2300 bp, Homo sapien
agagggctctgggcgtcccgcccttcacgcctgtattagaaaggcctgagtctggccgggagacctgacttgaggtctcttgggaggagcagggggtgccagttctgcaggggacttgcccagttccagtgaggctgatgtagaaaacaatagctctgtcctcagcctgggcggccagccggggccgcacgtgtaagatgtgattctatctgagtttccaaatctaagtgcattgattgaggcccaaagagttcacggcgcataactgtcttaattaaacctgctataaacagacaaatcacttcttgttcttgtaaatagagcttggggagatggcacagggtctggcaaaagccaggcttggggaacattcttaaaaaaggaaaagagtactgagacacagacagaaaaagaataaaactggagtatccacatcttcagaaaatagctcaactgaaaccaaaatatgccatagcagggaagtaatgtgagacaccctaagttcccagagcagctcagtggaggctggtagcccaggatgggaccaatggtggaaaagcagggagccggagagaccacaggttgtttgggggaggacaggtgcccattgctgaggctctgagctactctacttggccctgcactttccttgccaatccttccatctttccctgccactgatctcaacttcctgatactgagagacagtgctgggaggacaagtactctctcaacttggtcagcttgggggacaagggctggtcaccaagagctcagagatagcaacaactggggatgatgggtgatcataggagtccagcgggagcagatgggaagaaaagttgtctgtgatcctctgggaaagcagaaaatggggagtatgtacacccacagctcagattctgctgtccctaagtgccggcaagggctgggggatgatcttgagtagggtcaggtgctccagtgccccagctgttgggtgtccagaagaggttaggtgtgtggtagctctgggaagaatgcgcgagacgtccttcacttggaatgtgcaaagggccgggtctgtctccaagtaactccgggtctccggaagttacctggcaggggcagccctcagcagactttgggtcttacagcataaaacgagacgaactaaggggagcccaccacttttctagctaaaagtggaaaggaaaagttgtctataatatgtaaatacaggagatatgagtgcacaggtttgggtgggttcctggtaacttctggagccgacttttccctggtcttggtttgcaaactttaattcccatttcttttcctttactatttagcatatgactctaacaataatctgattcagaaatactcttcatttcgttaggctaacattgataaggaatttaagttcaggtaaattttagcacaacacttttctaaaaagtaactttaaaagtgtttttaacttccacacaacaaaaacgaaaaaagtatatatcactatggttggagagaaacattcttagattgcctttatatttcagagactttgtataggtgccagcaactccgcagacactaacaaatgggttatttgcagttattgttcatgaaaggtcttttatatttttaaattacggcatggttcccaggtggaaaaattccttacaattaagaactggttttcaagaagattggaaaaccagaacaaaaattacaacgttttatcatatagaagtctttactgaaaacaacggatattgagtggaagtcagaatgtaatgaaagttaattaaaatgcaaactattagggaaacactgcagatgtctttctgtcatatccaacgggacagtctttagatattccaccctcccttatattatacttgtattgtgagacttgaatggttgtcaacagttttctgttgacagaaataacaacagttcacctttgaaaactcttcactcaaagctacaatgatgattgctctcgagacaaggactgctgaaacaaataactttcacacatctacactcacacttgcacaccccaaacgcacacgcaattgccggtttttgaaaacgttgcctctgaatgagaaagagagagagagagagagactgagaaagtcgaactcgagcttaggtaaccaacaaacccaattactaggctttattgatactaaaaggaaaagttcccctcgtaaaatttctctgagcttattagttatttaaatcagccccagggttggacgcgtgacgccgaaggcaccttctgtcggctcctggaggtgagcagccag

SEQ ID NO: 25206 - DNA, 2300 bp, Homo sapien
atattatagacaacttttcctttccacttttagctagaaaagtggtgggctccccttagttcgtctcgttttatgctgtaagacccaaagtctgctgagggctgcccctgccaggtaacttccggagacccggagttacttggagacagacccggccctttgcacattccaagtgaaggacgtctcgcgcattcttcccagagctaccacacacctaacctcttctggacacccaacagctggggcactggagcacctgaccctactcaagatcatcccccagcccttgccggcacttagggacagcagaatctgagctgtgggtgtacatactccccattttctgctttcccagaggatcacagacaacttttcttcccatctgctcccgctggactcctatgatcacccatcatccccagttgttgctatctctgagctcttggtgaccagcccttgtcccccaagctgaccaagttgagagagtacttgtcctcccagcactgtctctcagtatcaggaagttgagatcagtggcagggaaagatggaaggattggcaaggaaagtgcagggccaagtagagtagctcagagcctcagcaatgggcacctgtcctcccccaaacaacctgtggtctctccggctccctgcttttccaccattggtcccatcctgggctaccagcctccactgagctgctctgggaacttagggtgtctcacattacttccctgctatggcatattttggtttcagttgagctattttctgaagatgtggatactccagttttattctttttctgtctgtgtctcagtactcttttccttttttaagaatgttccccaagcctggcttttgccagaccctgtgccatctccccaagctctatttacaagaacaagaagtgatttgtctgtttatagcaggtttaattaagacagttatgcgccgtgaactctttgggcctcaatcaatgcacttagatttggaaactcagatagaatcacatcttacacgtgcggccccggctggccgcccaggctgaggacagagctattgttttctacatcagcctcactggaactgggcaagtcccctgcagaactggcaccccctgctcctcccaagagacctcaagtcaggtctcccggccagactcaggcctttctaatacaggcgtgaagggcgggacgcccagagccctcttgttggccggtggctaaggagccaggtggataacttctgcggattcggctttcaggctgctggagctctccccagcccgaggccttagcccagcgcaatcccttgtccagaccggccagtttccgcgtggcgaaaaagggggaggcaagtgtgtcttttccaaggagcttttatccaacagcctcccctccccccaactctcagccttaggtgccgggcttcagccgaagcgtttttcaaatttgtcatcattggaaacctcggacaagtggagtgtaaaattttgagggtttccaggtaggctctgacttcaggcattcaatgaaaggggaagagggctgagggcgggggagagagacaagcacagagggctccctgtagtcggcaggaattccctccctctgcagcccagctgcacccactagcacacactagtcttgccttctcccggctttggaagaatccccaccacattctttagctctcagaaaggagagggcagtcaggtcaaggtctttcagcatccctaccgcaatatacccctcccagccccctcaccaccaccacgttggcctaggacacaggaccccggggccagggcctcagtgactgcagcttatgccacctaatgcagaatggggtgtccctgcctccactgctcctctcggtctcagcatccaggtcctgaaacccctgcgattctggcctgggaagccagacttgccaccaacatcatggtatcacccataattgatccactcagttttcagtagatgtggaatccaacaagagtaacaccaccctccacgccccactcttttttctttctttctttctttctttttctttctctctctctctctcttttttttttttaagaatccaaggcacttgaaacattctgagtgtgcctgcagtagggtctcagaggagttgctctgaaagctgttgagagcagccacctttgctgtcactgagagcttggcagggtcagctctggtgggccgtttgcacccaggctctgatggcaccaggatggcttcctgcaacccggtaggaggactggggtgggtgggtccagtatttcgt

SEQ ID NO: 25207 - DNA, 2300 bp, Homo sapien
cccggggccagggcctcagtgactgcagcttatgccacctaatgcagaatggggtgtccctgcctccactgctcctctcggtctcagcatccaggtcctgaaacccctgcgattctggcctgggaagccagacttgccaccaacatcatggtatcacccataattgatccactcagttttcagtagatgtggaatccaacaagagtaacaccaccctccacgccccactcttttttctttctttctttctttctttttctttctctctctctctctcttttttttttttaagaatccaaggcacttgaaacattctgagtgtgcctgcagtagggtctcagaggagttgctctgaaagctgttgagagcagccacctttgctgtcactgagagcttggcagggtcagctctggtgggccgtttgcacccaggctctgatggcaccaggatggcttcctgcaacccggtaggaggactggggtgggtgggtccagtatttcgtttcttcctcttcctttttttttttttaatgtccctctttatttctattgaagactaacctcagtatcaaagggtgcacttgtttgtcctaaatggcttgtagctctttcctactctgccacaggacattagctctgggagcaccgcctggcagggccttcgctttgggcctaagcatccaactgaggcccagcaattccacctgtggggaatcttgcagtgaggtatttgtgcatcaggagtggggagtgagggagagagagctgggctggtgcagtatccactctcgcacctcctccctgagcggagctccagtatagactaagtgaatgaatccatgaatcagctccatagccgaggggtagaagaagcagccgtcttcgttaaatgggctgttggcagttgcggctgactgctctacccctcgcaggcccgcctctgggcaggcctgaggtggccctggagccccgccagcagcccccgcccctcaggccaagctctggccctggcaatctctgcactttgtcatcacgcccgagtatttgacattcgcaattatctgcaaataccctgatcagtttgtatatgaaacactttttttcctgccttaaggttggaatctggtaagtttcagacaagtggttgcagggggagatgacccaggggaccgtgcgggacagggccggtgaacccgattccgcgaggcgggcgtctcgaagggactggtctgcgtgcctcaccgggttccccagcctggctccgaggaaaggccgcgcggaggcgagaaagggcccacatctcgagtctccagtctctccttgaaaagagcaccccctaatcccggaggaagggagggtgaaggaggaggggagagcccactacaggcaaggcaggaaggttaatcattttgttaaccggaaagggtgctgccccgcctggccgtcgtcaccgagcgtgtcagtcacccgctctcgatttcgccgcagaattacctgctcaaagagccaccccaagaagccctcagctccgaggtcttcccgcccgtcgtctgcgggaagtaaacggcgtcctccctccaaagaagtggatgccccttcgactctcctccgccccccggcggttcctaaatctaggaaagccagccccggcatcgctcactactcctgcacctcagctctgggatacccgctcagtacagacagaccatcaaccaaaaaagaaaagaagaaaagaaaagtggtggtgggggtgggggtgggcagggagcgtaaagtagcgagatcacttatttgactcttctgttttcttaggaacctgatcctggcccccggcagagcataagggcccgaggccagggacctagaggccggaccaagttcgcgcgaggtgttcacagcctaggcgccccgggcttggcttcgtactctgcaacaagccaagctcccttgccacgagtatatcagcaacttcagaaataaacaccagcgaaaccccttcccacattagcttgttgctgtgctactgacactgggcttagtcgatgttcacacctattacatttttccggaaagtgggaggagcagggggtagagaaagctgtgtgtattgagggaaggggagatgtgtgcaacaccttccagaaaaatggggaggtagtttagaaagtttttctctgtaacagcacagcttctgagaaggcagagagaagaaagcagacaggaaacgaatcccttcctcctctcccctttacccccttccttcactccctagaccaagctggtcacccggctgggaatcaa

SEQ ID NO: 25208 - DNA, 2300 bp, Homo sapien
ggttcaagcgattctcctgcctcagcctcctgagtagctgggactacaggtgagcgccaccatgcccggctaattttttgtatttttagtagagacggggtttcaccatattggccaggctggtctcgaactcttgacctcgtgatctgcccaccccagcctcccaaagtgctgggattacaggcatgagccaccgcgcccggccaactcgctgtccttctaccaagagagacaatgtgatgatagcgtttatgtgcagggactcaatgatatataaaatatgtttcaaatcaaggcttactcacttcatacccttactagtctgtgtggctaggtatttaatctatctcagtttcctcaactgtaaaatcattatacacagtatctgcctcataagattgtcaggaggatcaaatgcaaaactgaataccagttgattggcatatagtaaataataaatgttagctgtcattattaccatggtcataaaagtctttagtggaatcatggtaacaggccaaatgtgttttaggaggctcacttgccacaagataagccatttgatggatgttagaaaaattcctagagatgttggttgcccctggaaacagcttctgcttcttctgaataacccatgtggttctagactacaagccctggtgggacaaattgagatccttagccatagatggccatgttcccttgattagctacacaaatgaatccaaaactagactcaagctataatttttactttattacctttcttttgcaattagttctccttctgaggactcctcaactatggtgacaatgacagctgctttcaagaaatatttttcaaaaatggaataattttgagaggcagggcgtggttggagaaggagaggatttgtagtctcttgagaactatgcttttgtttctctatttatggtcttaaaatttgtttctcaatgtgtggttttctgaatcacttagagcaaaagtgtttgttacaaatgcagatgctagaaccccaccccagacttccaggatcagaatctctggggatggcgatgggcagtctctgtcctaaccagatttctagatgatcctcatgcacatccaactgtgagaacctctgacacagaaaacagttgaatatatcaacaccatctctgatgttatttcaatttcaagcacttctgactttgttttgagaaggaaacagatcattaatacttatacttctgtattccttccttaataagctaagggcctttcatttttatgcttctataaaatgggagttatgaaagttaccaaactctttttgatggaagaaagaataaatgtttactaaatgtttggggctctctgctgagaggtagcatgaatgtgccaagcactatcatgggaaaatatgtaggtggagttgatataggtatgccacaaatccccatttgccataatttaagaaaataggtaccaaagtggtgccagtgaatcttatagctaagctactgttttggctctataaagggagggtatgctaaacccacagggggctataaaatatcagctgagcattgatggagcttggagtcaaatagaaacctgttctcctgtgaaaacatgcacatctgtggaactgcattgctataatcagggcacaaccaaattcacagatgtgcccaattttctgtttcctctatattttaccagtttcacggcgcagtgacaaatgaggaaagtactaagctgattttgcgtagaatctcatggaagttgctcacaaatctcactggtgggaatgaacctcacaaatgttaatagttaagtgctacatctgtctaatccatctctgggatacactaagctctctgttactttgcatacagcaaattgaagaaatcccattattctaagtcaagtttcaaaaaaaaatttcctttaaaaaatcctcctctccccaatgattttctttcttctattttcacattttcaagttcatgtgattgataattataaaatggaacaaaaaaaatctgactgaggaaatccgaaatggtgaaataaactcctgagtcttgtctctgtgtgtttcttaccatttcctagctcctaaaacccaggaggctcttaaaactcctctaccaacatctcccctccatgaaaaaaggaaggtaagagtttcataatttggaaaagagaaaaaatactgtatagtataccatactacaccataacggacaattgtgggtttgggtttttgttttgtttatttttttgagacaaggtctcactctgtcaactagac

SEQ ID NO: 25209 - DNA, 2300 bp, Homo sapien
ttatatctttctggacaggaaccataatgagcaaaagaactaatgcccacaaggtgaatttagcagaagaatcaaggagtcagaataatacattaattcaaaaagtaggaagactccctccaaagaatgctaagttaaataaaaatgagagacttaagatgcacacagaaatgtgacataaagctcttttatgtagtgaaatgggcaggagtacatgcggtacacctaaagtaaccgatggtaactttccattcttgaagagaacaaaataatactttcaatcgtatcgctaaacttctcatgggacaggttggtatgtgtctccttgtattttccaaaaatacatgcttaccctcctcaggcaggggccggatgctgccccccacaaagaacactggggccctgctttctctccatttgggtttgaagtgagtagagtggagaaagggatgctttcagaaatgttatcttacttaatgcccccatagcctgtagctccgtaaggaacagtctctcgggagaaagagaggattaggagctgtggggggaaaagctttccttctggcagtttctacagctagaaccatgaagcccccaggtgtcacactgttttctctggagaaatattataagattagatgtaatgttattacgctgtctcatttggcaagtagtatcattatccgattgtttggaaaggtgaaatacaggggattctggttctttgccctaccatggaaggaacatttggacaccacattactttttttggaaaacggaagctaaagctagaggccaaaaaagctctcaaaagagaagatgaagaaagttaggaatattggtctgattaaaaagctctcaaaattatctagtgaatgctgacattagataggtattggtctttaggtaataacatgggtatgtatctactttatgcacttctatgcagatttagtagaaaaaaatacctaaatatatatttaattccataggatcccagtgcattttgaggatttaaacagataagccaacctcaaagggactgattcttgcaactaaaacacagacacctctggggtgaaatgtggcaacagtttgacaggcatagcagtagcttaggccagaaaggatttatccaattaaaattatgggatgaattttggctggcagaatgtaattaccagccttggaatggatccaggatcctgaggttaacacccctcctcttgccaacaaccctcctacctgccaacactccgagatggagaaggctggatctgacataatcgcacataatactgttgtgacatctaagtacaatgatgatgatgtgagaagcatcatgaacctgattttttttaacactcattatgttacttatttttatgccacattaggctagaaaccaaatgtccacataaatgttaatttcctcaaatctgtgtttaaaaattataattagaaaataaaaaatagatttaaaaattaatttattccgtcaaagtagttatttagtgattatttcactacaggaacaaaattggatcaaaatggtgacatttaatccttgctacacgaaaaaaaaaaaagcaggtcctgattttttggaagcgaaatgtgttttcaaggttgagtggcctagaaaaaaaggaaatgcggaagcctgattcatattcgttgtaactttgactaaatgggtatgcgcaaggactgcttttgtcccggggtgggtccagttcacagtcacggggggcactaatcctccaggaggggatttaccagaagggtgtgtgtgagtgcgtgtgtcccttccaaggaaacgagagaagagccccctgctggtgcatgatcaataggcaaagacctgatcattagatgccaatgcccctttaaagtcattaattgactagagaattgtggagggtctggcgatacggaagagcaaacgaaaaggcaacactgataaaaatctgaagcgttcaaggacgccaggcacgtggtgccgggtcagggagggagaggcagagccagcccggtcggtgtgcggctggggtggggcgcgctccgggcgtccgggaggcggagccggcggcagacgctgcgcgcgggccacgcgcggcggcggaggctgcgcgcgggccacgcgcggcggcgacttgggctgggcggtcgccctgccccaccgcccttcggcgctcgcaggtccgctcccctcccaaaccgcagagcggcaggcgcggccgctggttcgagagctcggccggggcagcgcagccgccggctgcccctcgctcccaggc

SEQ ID NO: 25210 - DNA, 2300 bp, Homo sapien
agtctgtttctttactctactctttaaattcttacttgtatttctcaaagaccttaattatcttagcgatactgagacaactttgtggcatttaatatttgctacaattttccttataaaacacattctccactctcttcaataagaatagatttcattaaggcagggcatggtggctcctgcctgtaatcccagcactttgggaggccgaggcgggtagatcacctgaagtaaggagttcgcaaccagcatggtcaacatggagaaaccctgtctctattaaaaaaatacaaaaattagccgggcgtggtggcacatgcctgtgatctcagctactagggaggctgaggcaagtgaatcgcttgaatctggggggcagagattgcagtgagccgagattgtgccactgcactccagcctgggtgacaaagcaagatcttgtcttaaaaaaataaacttaaaaataaaaatagatttcattataaggtcaagctaaaaacaagaccacaaatcaaaagctgcatttgcaattcatgtacatgtttggacttttagataacatttcagcaatcctctatctaacaatggaaagtaacatgtttgcaattggcaaaacagagtgacgtcaggttgcctaaatgtcattatatactaattattgtataactaacctctacttgtttttaaccagttattttagaaagcggcagatttccttagtaattaattgaataatttttgattgataacaatattttgatgtcagatggaatgcaacaatttagaccagagtaggttagcatactaagtcaccaagtctatacatatatataaatcatattttatcatttgctcatttatgttcctactccaagccatttgttattatttgcatatgtagaccaaagaaaacagtatgtgtgcttaaatacacatatataaactccgaacaattatatataaagtgcttagatttctggcctatagtaaaccctcaacaaatgttggctgtagttttttgtaattttcattaattattctctttacagtgctttgtctcacaagtacttggatctcatcctcgctcgcacacatttccctgttttgtttgtttttggtttattttttgagacagggtctgcttctgttgcccaggctggagtgcagtggtgggatcacaactcattgcagcatacaactcctgggctcaagcgatccaatctcccatctcagccctcccagtagcttggactataggcatgcaccaccacgcccggctaattaaaaaaaaaaatttagtagagacaaggcctccctatgttgcccaggctggtttcaaactgctggactcaagtgatcctccgcctcggcctcccacagtgctgggagtacaggcctgagcatacatttcgccaaatcttattcctactcaactggccacagatagttgctggacacacatgactttcctacactgtttagtttttgaaaacctccaaatagcaaaacaccaagtaaagcgtactgcctcgccccgtttttttcctgtcctagatcatgtaccctgttcccaaacagagatgaattagcttcatatctaaccacaaattctccatgagcacagagatcttcgtatatctataataattgtactcaggaaactcaaggtatgaggagagagattcccttccttcggggcttgtaggagacttcccacggaatcttctttgggaatgtctcccttttaagccctgaaagaccagataaatctcaggtgaacctagagaaacagggagcttcgtatactcaaaagtctatacattacgtattattgaacggcgacctgcggccgcccctgctgctgcgcatgctccataactgccgcttgctatagctgggagtactgtattatctctttgctcttcgccggctcttccccagacttctgttcgaacttcccggccgcggcagaacccaccaatcacaaacgcccttcctcaagccacgcccaccgtcttctccgggatcccaagaccgatttcgcccacacccctcccttcctttccttacgcacgctgcgcgcggacgtcggcctctgacgtcgtcgcctcagcgccggctcccggccgggccgcggccgccgaccgttgagccgccggctgagccgcctgctgaagtccctccctcaggaacccctccgccaccctccacctccgaaccgctctcgcggcggcgacccatgtgggggttcaggctcctgcggtcgccgccgttgctgctcctgctgccgcagctcggaa

SEQ ID NO: 25211 - DNA, 2300 bp, Homo sapien
tttaaataatttttttaaatgatcagtttacgtttactacaatgaaattatatttttctaattcatacatgagctgaatcttaagcatttggcttgagaatttatagacagggataggcttagcttgataaaatgcagtgttctcaagtttaaaaaaatatattattaaaagcataaggtatttatctgttactgtacatttatatttactaagtattaagacactattaaaataagagtctaaataatttggaacataaagactaaatcattgtagctttagagatggtatgtatatgttgcctttagaatttattttacttattgttttatggatccagtcactatcatgagcaacatattaaagacatttcttcatatggccaccagagagcattagtagaaagggtaagagaactgaactttttttttttttttcttttttgaaaaggtcttgctctgtcacccaagctggagtgtagtgtcacaatcatagctcactgcagcctcagcctcccaagtagctgggactacaggcacgtaccaccatgcccagctaattttttgtagatggtgtctcactctgttgcccaggctggtcttgagctcttggacttaagcagtcttcctgccctggcctcccagagtactaggattacagttgtgacccaccacgcccagcgataattgaactttttagaaaactacttaactgggtcagattttaagacttgtttcctaactttacttcctaatatttttgaagtgaaggtgttttatttttttccgtagttctcagtacataattcttttttttacttttaattattatgaatacatgatagctatacaaatcctagtatttttacatttgaaaaagtaaaatattgctgatgttatttttctctggggtgtttaaggatgagaaatactacttacggtcacttggagaagaccctagaaaggtaagaattctaaatgtaaaacaattccctaaaatctaaatggatgtatgtatgttaactggcaacactgtaattttatacttactgcctgacatattccctgttctatccttttccattcttctctcagtgatttgtgcccctgaataagaagtaagatgattaaaaagtgattactttgtattcaggtaggcctgtagaatcttagtgtttatagtcatctaatccctatacaataagaaatctcttctactgtatattttataggtggcaactcagttaacaaaatattaatttgaaataattattagaatcctgaatagttcattgtataagttttgacatgtattcagagtcaaattagtatggctgtgatattaaagagtagtccctaaaatgatcaaataagattattttttccatttatgtcaccatttagttgtttaccctctcttttagtcccctccctcagtagaattcacaggttttatgtaggtgatagctagtaatgttagttcaaggtgttgactcctgaatattagagtggatgacatttgtgtaatttgcttaaagtagaaagaacctttctattaatgaagcatattgagcttaacagtagtgatactataaaatctgcagtcttgttacacagcctggtatttcttcatttgaaagatcatgtatcggccaggcaaggtggccccatgcctgtaatcccagcactttgggaggctgaggtgggtggatcacctgaggtcaggagttcaagaccagcctggccaacatggggaatcccgtctccactaaaaatacaaaaattagctgggcgtggtgggaggtgcctataatctcagctacttgggggagagagagagagaaagatagagagagagagatcatgtattggcacatggtcacatcatagtattttaaagcagtgaacaaagttttgccccagtcttccttaatatcatagggtctaatctaattttttctttttatgtttctgtaaatgcaggatgttgcagatatcagaaagcagtttcctttgttgaaaggagatattaagtttccagaattcttcaaagaggaacagttcttttccagtgtttttcgaattagttcaccaggattacaactatggactcattatgatgtatgctacataaatgagaaatttaaagctacaatagatctttagcattatagatttaacagtcacagtttcaacttcctataggttaccctaaacatctgtgtaatttgctgaaacatgacttttgaaaataggtgctgtgcatagcagtgatacaggaatgaattattttgctaatg

SEQ ID NO: 25212 - DNA, 2300 bp, Homo sapien
ggaggctgaggcaggagaatcgcttgaaccctgaaggcagaggttaacgtgagccgagactgtgccactgtactccagcctgggcgataagagcaaaactccatttcaaaaaaaaagaaaaagaaaatgatgtgccaatgtaggtttatcaattgtaacaaatataccactctaatgaggggatgttgatcatggaggaggctatccatgtgtcagggcagaaaggacatgagaaatctctgtacctttggtcaattgtgctgtgaacctataaagcctcgaaaaaacagtctattttttaaaaagtcattttgtgccttattgatttttgaaatgtcatgcttattatacactaaatttccataggaataggtatttctgcactttctattctattcccttggtctatctattcatgtacctgtacaatatacagtgttaattatggagttattagaaaatgtttaacaaaaaactcatagcactatgccccctcatactttttagtgtttccagatagaaaggtctttttttccaattttgttattaatttctagttttactgcccatggccagagaaagttgtttgtaattttcgactttttaaaatgtaatgatgctttgtgctgtatgtcttgtctgaagagattaaattacaaaataccttttgctatgactcttacaaagcacttccacataccctaatcttcacaacactgccctttaggcaacttacgtctagcacattctgagatagggggtgtctaaggacagggagagcaagaacaacccatctagtacaagtctccaaactaataaaggcttgaatcctctcccgtaggttgctatcaaaagaaaaacttcattcctcccgcatccccccaaccccgccttttttttttttaagctagggtctcaccctctcgcccatgctggagcagtggcaggatcatggatcactgcagcctcgacctcccgggctcaagcagatcctccgacctcagcctccagagtagctgggaatacaggcgtgcgccaccacgcccggctaatttttgtattttttgtacagacggggattcaccatattggccaggctggtcttgaactcctgacctcaagtgatccaccgacctgggcctcccaaaatgttaggattactggcatgaaccacggcgcccagcccatccgacttttgtaacactcagaattgtagttttgtttgtttgtttgagaccgagtttagctcttgttgcccaggctggagtgcagtggcgcgatctcggctcactgcaacctccgcctcccgggttcaagcgattctcctgcctcagcctcccgagtagctgggattacaggtatgggccaccaccatgcccggctaattttgtatttttagtagagatgggatttctactggctggtcttgaactcctgacctccggtgatccgtccgcctcggcctcgcaaagtgctgggattacaggcgtgagccaccgcgcccggccccagaactgtaattctatgaccacccttataaatgtaaatatcaggtaagaaaattgctgggtatttttcctaccataaactgacttactgtaatcctgtggatttttccttttaataccttgtttttcttaggtctggactcccttgaaaagcactgcaagtaaaagcactttttgtttccctaatatttctctatgagttttcttttaaagacctaaggttctaactacaggtataaaagactccaatgtcggaactagaacctaagtaagttagaattcaagacgagtaggagttttccgggggaatcccattgctttcctttttggctcagtggagtgaaaagttgtgccttcaaatccattaattcggagcagactgacagatgcggagtaaagagtttaggcaaaatacctctcgcactcagctctccgccatcatcttgctccccagaaacatgggactttctccggaaatttcaatagaggagccagtcggcgtcccccgtgcacctttcccttggtctaagggccaaccagtgatctgctgccgtcctgcgcctctttcccacaccctgggtctctaaaaaccagttcccagctgtccgaaaggtaaagacgtgtctctcgctggtttctcgaggttctgccccgcgcgagggcctcacctgtgggtagaggtgctgcatgaactgctcccgagaaacgccctccagccggggtaccgggaggtgctgcccggccatggttgctcacgcctgccctcttccaggtcttcggaacttcggctct

SEQ ID NO: 25213 - DNA, 2300 bp, Homo sapien
atcagtgggcattgtacagaacagtaggatcaatacaacttaccactgcatggacaaaagactttgagaactgacaagagcagaggtttatcaattataatgctgagttaagcatcttaatcaagtttgttctttgactttttttatataaatatatatagtagtcaagagttgactcagagaagcaggcagcaggagttaatactgacacttattaaacaaagttgaaaacatttgatttacaactgattggtcttataaatacaaatggccatgattatggaaagaatctgaaataaatttggagtaaaatatcaataccagtatacaaccaatactgtaaaatgattacaccaatagcatggttttaaggcatatggaggtatgaagcgggaaataaactttctgacttctattgtggtttttttgtttgtttttgttttttgagacggagtctcgctctgtcacccaggctggagtgcagtggcgcaatcttggttcactgcaacctccacctcccgggttcatgcaattctcctgcctcagcctccagagtaggtgggactacaggggctcgccacgcctaatttttgtatttttagaagagacactgtttcaccatattggccaggctggtctcgaactcctgaccttgtgatccacctgcctcggcctcccaaagtactgggattacaggcgtgagccgccatgcctggccgacttctattgttatcagcagttctgcaatgtttgggaacgatacaatctgtaaaggagtccaaaaaaaaaaaaaaaaagcatgtacccacaaaatctacaaataatctcaggacccaagtgaccatatgtcacaagggtaaggcaaggtataatcagccattcagaaacaggtacgtaactaacaaagtcagggataagaatctctaaaggctaaatattttctgtgtgcagggtgctgtgcacttagccaccaggcagtctcagcaaatcctttgaaagggtaaaattgctcatctccagtttaatctttacggagtatggggtggtgtattggtcggctctgtctaatagctggcaggaagttctgctcttctacccaaggtgacattacagcactttggaaatgttatctcaattattcttcaatcttacccatttattaatgtattcagcaaacattcatggagtgcctactatgtgccaggcattgtcttgcccactttgtaaatttgaaaattatgttcagacaagatgagccatatagctttttctttctgagacagggcctggctctgtatcccaggctggagtgcaatggcacgatcacagctcactacaacgtccaactcctgggttcaagcgatcctccccttcagcctcccaagtagctgagactacaggcgtgtaccaccattcccggcccagaagcttactttaagtcaagcaatggctggaaggctctatgtctgggccactaatcacgtttgatcacttgtatcccagtgaagaaaactcactgctaagcacttctgcgagcaatagttgaactcattagagacggataggtcaatcagggaaataaacaaacctgcttcgctccctcggagaactctgtgatgctgaactctttgtcgaaataggcccagataaggaaggccttaattcgagtcctaacccagttgatggggttggagaatcccaggacgatcatcttggttttctggtgctgctggggcttctcctccgtgctgtagctgcgctgagggcaggcagggaaagaagcgaaggctgcggggagtcccgggctgctgagcactggccaccgggagccctgggcaggtagcgccgaggctgccaaggccctagcgcttcgtggaaataacgccgctcccaagccgaggcgacagcggcagaagtagcaaagtgtggccgacggcagcctcacctcggccacagcaggagtccggagtcggacggccccgcagggcagcgaccgagagtgcaggaactggggtagcaaacgagcggccagcgccatttttatgacccttcacaccggtgcctgccggtgctgtatggaaaggaagtcggtgggaaaccgcctcagcggtgtcggagaaagagactggagagcaaagtggacctgttgctgcagcctctggtgagtcggccccgtccccgctctccagcacgcagcccaggccgaggcccttcggcaacccgccccgcgctcggacccagccactctggagtctgccggcctcgcggaccttttctctgtcgctcgtgtttccgggcgg

SEQ ID NO: 25214 - DNA, 2300 bp, Homo sapien
gaaaacatcaacatatatcttattcatattttgtttcttcagacttttctatctccctataataataggaatataatgcatattttaaaaatcatttatgcctaattcagaaaaataatgctttgttagttatatgatgtgcaagaagcttttacatgtttcaataagcatattaaatcctctctaacagaaacagaagttttcattatttccagaagaaattaatttgaacagcaaaaggttcaagtttgatttgaaattcactgtctctaaaacttttaaaactctgatttttttgggggggtgctgggccccttagctaactcttgaaatatacaattgttttcttcgaagttattctatacttgtcttttcacgcgctaggcctccactcacagtagagaattagttttagcctagtctgtggtacagtggctactcctacctgcctagtctctattttttcattgattcactgctttaacatctttgctctcaacacatacagcatttattcttatagctcctacctacagtacttactaaaagaagcagccttcgattagaaaggcggtatatggtcttcttaaaaccctttcttccctctggtcatattctgttcttgaaggcatttttttctgtcggacttcactaagcaagttagatttggagtcatgggaagattatgaagtggtggaagaaaagaatgaagactgagttcaatgttatttccaaagcccttcctaggaaaagtgttgtttattattcattttggaattctaattatggaggaaacctcccaaaaacataaataaattatttagccagaggacctaagaagtgcatcaaatttcaagtcaaatggctacaagttacttattacacctaaatttaataagcaataggatgtttgttctttatgtgtggtatggcttctagaagcaagctttcctctctgtagcacaggcagggtccaacggtctaggttcaaattcttcctttaccacttactagctaaaaacttaggcaacttatttcacctctctgtgcctcagtttctttctttcttttcttttaaaggctctggctctgttgcccacactagagcgcaggggtgtgatcctggctcactgcaaccttagcctacctggttcaggtaatcctcccacctcagcctcctgagtagctgggactacaggcgtgcaccaccatgcccggccaattattattattagtttttttgttttggagggatggagtttcactatgttgcccaggctggtcttgatctccagggctcaagagatttgcccacctcggtctccgaaagtgttgggattacaggtgtgagccactgggcccagccctcagtttatctgtaaaacaggacaaaagtagtacctacctgatggggttcttccaaggattaaatgagctagtacttataaagcacttgctaatgtctgttaaataaattatattatccacacaccaatccaaggcgactataaggtagcaagaaccactccaagtcacataagaaaatgaattcctttcgttttagctcctctctttatttcagcagtgcgttgtcaacagggccacattatgttagcagatttgaactttatccgaaaggtgtttgtattttatttcaaattatgaattcctgaacatcggattatgtacgattctgcagtgccctcggaggcccattagagtctggagctcgagaagcataacaaactctggtctgatatttgtaaggagcttgacagccaaggagccactcagaaacagttattggtattgccaaaaaaaaaaaaaaaaaaggaagctaagaagtcacccttctaaataaataaataaataaataaataaataaaaacctgaattggagagctgcctgcatttcactctactgcctctggaagaagagtgttatctaaagtgcttccatcatgaataatgattgagaaactgcttttactctcccgactactgtactcccaggcagaaacccacggctgaagcccacgatgcccatgtgtaacttggttattacacacacgtttggagcccagtgtgcagacccgcagcgcagaggaggcggcggaacaccccgggttggtcgggtttccaagggctgacccgagctccagcactttttccgcgcctgatttttcaggtcattttcgaatgggctatctttgcttacattttgagcttggatcctctccagaaagcattactaccttctaaaaggaaaaacatctcgtatttgcagacagtgctgaggg

SEQ ID NO: 25215 - DNA, 2300 bp, Homo sapien
agtctctattttttcattgattcactgctttaacatctttgctctcaacacatacagcatttattcttatagctcctacctacagtacttactaaaagaagcagccttcgattagaaaggcggtatatggtcttcttaaaaccctttcttccctctggtcatattctgttcttgaaggcatttttttctgtcggacttcactaagcaagttagatttggagtcatgggaagattatgaagtggtggaagaaaagaatgaagactgagttcaatgttatttccaaagcccttcctaggaaaagtgttgtttattattcattttggaattctaattatggaggaaacctcccaaaaacataaataaattatttagccagaggacctaagaagtgcatcaaatttcaagtcaaatggctacaagttacttattacacctaaatttaataagcaataggatgtttgttctttatgtgtggtatggcttctagaagcaagctttcctctctgtagcacaggcagggtccaacggtctaggttcaaattcttcctttaccacttactagctaaaaacttaggcaacttatttcacctctctgtgcctcagtttctttctttcttttcttttaaaggctctggctctgttgcccacactagagcgcaggggtgtgatcctggctcactgcaaccttagcctacctggttcaggtaatcctcccacctcagcctcctgagtagctgggactacaggcgtgcaccaccatgcccggccaattattattattagtttttttgttttggagggatggagtttcactatgttgcccaggctggtcttgatctccagggctcaagagatttgcccacctcggtctccgaaagtgttgggattacaggtgtgagccactgggcccagccctcagtttatctgtaaaacaggacaaaagtagtacctacctgatggggttcttccaaggattaaatgagctagtacttataaagcacttgctaatgtctgttaaataaattatattatccacacaccaatccaaggcgactataaggtagcaagaaccactccaagtcacataagaaaatgaattcctttcgttttagctcctctctttatttcagcagtgcgttgtcaacagggccacattatgttagcagatttgaactttatccgaaaggtgtttgtattttatttcaaattatgaattcctgaacatcggattatgtacgattctgcagtgccctcggaggcccattagagtctggagctcgagaagcataacaaactctggtctgatatttgtaaggagcttgacagccaaggagccactcagaaacagttattggtattgccaaaaaaaaaaaaaaaaaaggaagctaagaagtcacccttctaaataaataaataaataaataaataaataaaaacctgaattggagagctgcctgcatttcactctactgcctctggaagaagagtgttatctaaagtgcttccatcatgaataatgattgagaaactgcttttactctcccgactactgtactcccaggcagaaacccacggctgaagcccacgatgcccatgtgtaacttggttattacacacacgtttggagcccagtgtgcagacccgcagcgcagaggaggcggcggaacaccccgggttggtcgggtttccaagggctgacccgagctccagcactttttccgcgcctgatttttcaggtcattttcgaatgggctatctttgcttacattttgagcttggatcctctccagaaagcattactaccttctaaaaggaaaaacatctcgtatttgcagacagtgctgagggagcaaagttcattttctcgggtaggagaagatgattctcttgcaacacgtgcggattgtgacaaaatctttcattaacaaggggagtttcggtgaagtggaggtttggggaaaggcgaggaagtcggtctggagcaagcaagcaaagtgcggaagctgtactgggattcttctagaaagtggggtgggaaaggagctagggagggcgtgtggagggacgagatctgtgtcagaacgtgcgtgtgagcggatacaaaacccgagagaggcgtgagcagcgctgtgtttgcgagcgggagcgaggggcgccggctggggtgtgtgctcctggtgagtgacaccgaggggaaggcgggcgggtcggcgggcgggggcagcctgcgaggggcgggagtgtccctgcgtggggcggccgagccggagttgtgtcagtgaaggaatccagtccgggg

SEQ ID NO: 25216 - DNA, 2300 bp, Homo sapien
tttctgtcggacttcactaagcaagttagatttggagtcatgggaagattatgaagtggtggaagaaaagaatgaagactgagttcaatgttatttccaaagcccttcctaggaaaagtgttgtttattattcattttggaattctaattatggaggaaacctcccaaaaacataaataaattatttagccagaggacctaagaagtgcatcaaatttcaagtcaaatggctacaagttacttattacacctaaatttaataagcaataggatgtttgttctttatgtgtggtatggcttctagaagcaagctttcctctctgtagcacaggcagggtccaacggtctaggttcaaattcttcctttaccacttactagctaaaaacttaggcaacttatttcacctctctgtgcctcagtttctttctttcttttcttttaaaggctctggctctgttgcccacactagagcgcaggggtgtgatcctggctcactgcaaccttagcctacctggttcaggtaatcctcccacctcagcctcctgagtagctgggactacaggcgtgcaccaccatgcccggccaattattattattagtttttttgttttggagggatggagtttcactatgttgcccaggctggtcttgatctccagggctcaagagatttgcccacctcggtctccgaaagtgttgggattacaggtgtgagccactgggcccagccctcagtttatctgtaaaacaggacaaaagtagtacctacctgatggggttcttccaaggattaaatgagctagtacttataaagcacttgctaatgtctgttaaataaattatattatccacacaccaatccaaggcgactataaggtagcaagaaccactccaagtcacataagaaaatgaattcctttcgttttagctcctctctttatttcagcagtgcgttgtcaacagggccacattatgttagcagatttgaactttatccgaaaggtgtttgtattttatttcaaattatgaattcctgaacatcggattatgtacgattctgcagtgccctcggaggcccattagagtctggagctcgagaagcataacaaactctggtctgatatttgtaaggagcttgacagccaaggagccactcagaaacagttattggtattgccaaaaaaaaaaaaaaaaaaggaagctaagaagtcacccttctaaataaataaataaataaataaataaataaaaacctgaattggagagctgcctgcatttcactctactgcctctggaagaagagtgttatctaaagtgcttccatcatgaataatgattgagaaactgcttttactctcccgactactgtactcccaggcagaaacccacggctgaagcccacgatgcccatgtgtaacttggttattacacacacgtttggagcccagtgtgcagacccgcagcgcagaggaggcggcggaacaccccgggttggtcgggtttccaagggctgacccgagctccagcactttttccgcgcctgatttttcaggtcattttcgaatgggctatctttgcttacattttgagcttggatcctctccagaaagcattactaccttctaaaaggaaaaacatctcgtatttgcagacagtgctgagggagcaaagttcattttctcgggtaggagaagatgattctcttgcaacacgtgcggattgtgacaaaatctttcattaacaaggggagtttcggtgaagtggaggtttggggaaaggcgaggaagtcggtctggagcaagcaagcaaagtgcggaagctgtactgggattcttctagaaagtggggtgggaaaggagctagggagggcgtgtggagggacgagatctgtgtcagaacgtgcgtgtgagcggatacaaaacccgagagaggcgtgagcagcgctgtgtttgcgagcgggagcgaggggcgccggctggggtgtgtgctcctggtgagtgacaccgaggggaaggcgggcgggtcggcgggcgggggcagcctgcgaggggcgggagtgtccctgcgtggggcggccgagccggagttgtgtcagtgaaggaatccagtccgggggccgagctggctgcgccctccgctgcaagcgccggcagcgcggggcgagctccggacggcgcgcggcccaggcagcggctcccgctcggcccgccctccgagccgcaggggccgccaccgccgcggcgcctcccctggcgaccgcgcccccgggccccggctccggcccgggacggaggagccg

SEQ ID NO: 25217 - DNA, 2300 bp, Homo sapien
cttgaaggctttccactggctgtgctgaaactttctcagaactgtatcatatctacaacttttcctacttttcctttcctgttctccacaagggttgaaactgtctaatgtctttcctaattcccctcagatgcttccctgttattacctcacaggtgttcccttcaataaatctctcacatgtctaatctgataatattgtttgcttctcaggggatccatattaacacattgtatttgatccaccaacaaattttatgtcatgtctatctcctgagtacccctcttgcatccatccacttctctttattgccaacactactcaaggaggaactaagacatttctcccctggattattgcaatagtcatctacttccatctcacacctttccaatccattctcatctcagtagctgcagtgattatttttttttaatagtaaatcaattgtgtcacttccctgcttaaaacctttcaatagcttctcattatgcttacagtcaaattaaatttctaccatggccacacaatactttagagtctgggctcttgcctctctcttcaacctcatcccatctcatcttcccctttgtcctgatgcccaccaaggctcagacatactagtggcctttctcttcctacaaattgctgagtcctttcctgcctgaggggcttccgacttgctctcccttcttcctaaaatacccttcctccatctctgcagaaggtggactcattctgactcctagccctcaacttaaatgtccactcatttcctcgcacctagttatcactctctgtcaccactttgcttagtgtctgtttctcccacttgaacaagggcaggcaaactatggcccatggaccaccatttgtttttgtctggcccatgatctaagaatggcttgtacatatttaagtgtttgaaaaagctgcatttttaaaagaatattttttgacacatgaaaattatgtgaaattggaatttcagtgtccataaagttggaactagcaatgctcatttgttcaggttttgcctatgccttcttttagactacaactgctgagttgagtagttgtgcatggcccacaaagcctaaaatatttacagaacaagttttctgcatgttgtactggaaagtaaggttgaacgcccattatttgtctcttccagtcctttactctcagtgcttgctccatagctagtgcttaataattacaggttgaacaaaccttccctctctcctaagactgttaatatctaaggggataggttgacttacctctctttggcttattctcttctaagagccagtcagggaaatttggaaccaaatatttttgattttggggaagcaccttgaaaacaggactgttatatttctcttgaaatatctagcacagtaccttgcacaaggtaagatggtgctagaaactggaagaactgttttagggttatcgttaacaggaaattaagtagtgcatgcaaagcacttagcacagtgtcaggtgtacaaaagtgttgaataaatgtttgctctcgcctcaattttccttgctataatgggaaataaatatcaccctttatatcactgtcacacagactaaacaagaatgctgtgtgtgaaaaagctttgtaagctgcagacactatccagatagacttatccaagtgcaatatattaacacacgttggcactgagcagccctgtttggagggatgggcactgacctgggggtgagaacacttaacatcctaattcttgccacttattaagtgaccttggacaatcgcaacttctgcggctgtttcttctcttcacctgtaaaaccagcctctgaacacacaagaccgtcccttggggttcagccctggccttctctaccgtgtgtttcccttacctccgggatggaagacccacccgactccgaggcggcccactggggcgagacgaatctgggggcggggcgtggcgtggcgtggcgtgcccgggacgtggcctccctccctccctgagccgctgcctcagagccgggccgcacgggggcgccgctggggccgctctgctcccgagttgccgagcagctgagaaggcgttcacttccgcgtccgccccgcggcgtccggcggccgcgccgagggtctggcgggccgcaggtcagtctgggaagctgccgacccgccccacccccccggtgcggaagagccgggcgcgggatgggccgcgggcccggaaggcggcggggcgccctgaggaagggcacgggccgcgctggtaacgcgcgcgccccgggctgc

SEQ ID NO: 25218 - DNA, 2300 bp, Homo sapien
ggcaactaacaagtataagaataaaggaaaacagatggagaggaacaaaatcagtgcccagtgcaggagagtatcacaacaggtctgtgagctcatttaatgtaactagtttcttttacagataaaatacttgaaacaaggaacacacagctaatggctcagccacaactataataactgcatctccagacttctcatccagggctcctgcctctatccattataccaagaggcaaaaggcaaataactaaaaagcaagctgagatcacgttaaatttaacccgactaattatacttttaggtttatggttgtatatgatactaatttacattttcaagaggttttacaatttacaaagcagttaaatcctttcaactgctctgagataaggtagcactttttttttttttttttttttttttttttttgagacggagtcttgctctgtcgcccaggctggagtgcggtggcgcgatctcggctcactgcaagctccgcctcccgggttcacgccattctcctgcctcagcctccggagtagctgggactacaggcgcccgccaccacgcccggctaattttttgtatttttagcagagacggggtttcactgtgttagccaggatggtctcgctctcctgacctcgtgatccgcccgcctcggccttccaaagtgctggcattacaggcgtgagccaccgcgcccggctagcacttttttttttaaagaggtcttggtattcatgtcttgataaatgttttagcatctcttctacctctgattttcctgtctcccttttctatttgttttggttttgaagctgtaactacaaaatgtgtccattgggaagagagcaatattaatgtatttgaacaaaagggcccattgattgaaaccatcataaaaatatatgggatgctgtttaactccattttacaaataaggaaacagaagcccagagagattaagtagtttggccaagattaaataaccattaaatggcacagtcactacaaggttcatttaaaaaaacatataacatacattgagcatttaatgtgtcaggctgggtaaacaagatatagtgctagttaactcctaggtaagcataaatttctataaccagtatattactttgtaaaccactgtcttctggaattttagcagctggacaatcagtaaatacttttctacttacacaagattcatgtaaccagatctgtttggagactgatcgtgatttatattagactaaaagatcttaactcaaaagcatgttttgcatcatttgtctagattctttaaagtaaaaatggaaagctgtaattctcaaatgtcttcgaatgaacaaaaaattgacaagaatatgaagctgactgcattactgtatcatcaattattggaaccttgatttaacaagctattttcattttcagtccaatggcatacaaagaggaaattttattctttgtagtttctccaaattctttgtaaaaattatgaaagtaatttgcgaaaaataagcgaattgacatggaatataaggtgaataatacatttttaaaatgtagttgtgtataatggaaaacgtcattcttgtatattcagctaaaacagaccattagtgcaagacctaaatattaatgagatccggggtttgcaacgaaatgtcattgctgcttttcccccagaaagttaaaagaaaaacggggagagcttttaagtgaaaactaaatgtgctggcgtcacacttggaaatgcaaggatgcagaagaaatggtaagatgtgggtgggtagtatcccagtaaacaacataaaccttctaacagacttgaggtggctgtcaagcctttcagacatgtgattgataatgaatgtcagaggagagtttccttttccatcaacgcttcaggagacagcggaccgccaccaacacagggcggaagagcacccctgtcacgcagactgtgccgcccccggctcgcctgggcacgccccttcctgccctagcagcggcgtcccgccctttccgcctttcacttcctagtaaccgccctcccttgctccatcttcgcaggacccgattggctgatggggcaaccgccaacggctgtggcgtttaaacccaagccgcagccgctgctgctcgccgagctcccggagctgggtgggggtgccccacgctgaaagagaggtaagttagtggcctgcggcagttgacgtgaccgccctctccctgtcgggatcggtgtcgttcttgagtcggttctctaggcgctgtccgcctcggtctccggc

SEQ ID NO: 25219 - DNA, 2300 bp, Homo sapien
ataggtatagagactctttgaagatcatcaccagttaattaatggtaaagcaaaaacttgagtctgggtaatggttgagcaagaaaaaagatggcatttacattttatttacatagtattcctaaatgataatctgtggtgtagtctggtgcttacagatttgccatagattttcagactgggatatggaactataacaattttgaatttagagcttagaattgtttttcctttctgaaaatgtgtgtgtgtgtgtgtgtgtgtgtgtgtgtgggcatatgtatatgtatataatatatacacacacacatatatacacacatatatatggtatacatataatgtatacagtatacatatatacatgtgtgtatatatttacacacatacaaacatatattaatatatgtatatataatttatataaattttagctgcctgttgatagtctttgatagcaatccttttcagagctatcactattatttgggttcatttgctggcctcctttcactctagaaatgtatgctaatggttctactgttggctgtactccactctactgttggggctgaggcagaattctcagtatatattttctgtagatacaaatgtaaaatgtgatttaggagtattcatcatttctaacttattttcttataagcatagattcttagtaatattaggatctgatcagaacacattgtcagaaattatatctgtgaaacagcttgatttcgaatctaatttgtttaaggtaacttatttatttcattacttgtttctgagttttgttttccttttcttaatagaaagccattcccactcagaccaaagttctaagacttctctaatgagtgagatgagaaacgcccagtctattggccgcagatgggagaaaccatctcctagtaatgtgactgaaaggaagaagcgtgggtcatcttgggaatcaaataatctttctgcagacactccctgtgcaacagttttagataaacaacacatttcaagtccagaattaaattgcaataatgagataaatggtcatactaatgaaacaaatactgaaatgcaaagaaataaacaggatcttcctggcttatcttctgagtctgccagagaacctaatgcagagtgcatgaatcaaattgaggataatgatgactttcaattgcagaaaactgtgtatgatgctgacatggatttaactgctagtgaagtcagcaaaattgtcacagtctcaacaggcattaaaaagaaaagtaataaaaaaacaaatgaacatggaatgaaaactttcagaaaagtgaaagattccagctctgaaaaaaagagagaaagatcaaagagacagtttaaaaatagttcagatgtcgatattggggaaaagattgaaaacaggacagaaagatctgatgtcctggatggcaaaaggggtgcagaagatcccggttttattttcaataatgaacagctggctcagatgaatgaacagctggctcaggtgaatgaactaaagaaaatgacccttcaaactggctttgaacaaggtgacagagaaaatgtactgtgtaataaaaaggagaaaagaataacaaatgagcaagaggaaacatactctttatcccaaagttcaggtaaatttcaccaggagagtaaatttgataagggtcagaattccctaacttgtaataaaagtaaagcttctagacagacatttgtgattcacaaattagaaaaagataacttactcccaaaccaaaaggataaagtaaccatttatgaaaacctagacgtcacaaatgaatttcacacagccaatctttccaccaaagataatggaaatttatgtgattatgggacccacaatatattggatttgaaaaagtatgtcactgatattcaaccctcagagcaaaatgaatcaaacattaataagcttagaaagaaagtaaaccggaagacagaaataatttctggaatgaaccacatgtatgaggataatgataaagatgtggtgcatggcctaaaaaaaggtaatttttttttcaaaacccaagaggataaagaacctatctctgaaaacatagaagtttccaaagagcttcaaatcccagctctttctactagagataatgaaaatcaatgtgactataggacccagaatgtgttgggtttgcaaaagcagatcaccaatatgtaccccgttcagcaaaatgaatcaaaagttaataagaagcttaggcagaaagtaaatcggaagacagaaataatttctgaagtgaatcatttagata

SEQ ID NO: 25220 - DNA, 2300 bp, Homo sapien
cttctttttacctagtagcctttaaccaaacaataaccttttaaccaaataaaatgtgttaataaatacctttgcattggttatcttgtatactaggctgtcttgttttgctgtctgtttttaacccattcaatatatgtggacatccaaaagggtttaaaagccacctcctgccctggcccgttttctctcccttcattcttctgttttcagaaatacatgttgaatgtcagcttctgtattatttctattatatgtaatctgatgacttagaggaggagattaacctttcaggctcttttgaatttggtttttataatttggttttaaagatcacttactcttccagtaataagtagtaataaatcctgttcatatctgagatcaatacacagtttattgaattcaaatgactactcaaactctattccacctagatggaaaacttttttagacaatatctgaccactaacgcggtgggcccagaaatctgcatcttaatcagatgcttcaggtgagtccgtccgaggattgtcctagtaccacactttgagagactgcagtgggggtacagagtgctggaggggtttagtcaatagctctagtgaaggatggatagttttattcaaagaatcccagttgatgaatgaagaagaaatgctagaattagaaaaattgcaaacccctattaaaactaccgctcaggcaatgctcaacaatggatgtaaaacaattaggtgaaatgttgatggagaaattcattacaaaggaatagccctctgaacccactgatcaatgttagcatcattacgaatgaaacaaccagacaccatatgcttcctgctgtgctgcaatattaattatatggtaccacctatgaagtgttcttgccctctcccccccaaaaaattgaacctgaatttaatcaaagctttagatctaatatttagtgcataggaaataagtagagtagaaaaacaataccagggagaagcaattagccacattcaaaaaatggttcatttcaatagaacaactgacctggtttctttttcaatgtgttaatagtgttaaaaagtctgttttagatcaaaagagactgatgagaccacatgcaaatacattgcacagctcttgtttgattcaaagaagtcaagtgtaaaagacattttttagacacgtgaaatggtgttgcggctgactaaaaggatgtgtatgtgtgtttttgaagtatttagggctaaaatatgtccaggattggcttttaaatactacaaaaaatggagtatgccaaaacgttgaccattgttaaagctcagtgaagggcaggtagatgccaattgcactcttcacttttatgtgcaaagtttggaaaatttcacaataaaatttttgtgtttacataaatgaaataacatgggaaaatgttctaaggtatggcaagtgaaaaaagcctggaaaataactagtttgtcccacttaagtttttaaaggtgttaaaagtacatgtttcaaaaagtaaggatagactaaaaaagtgaacggtggtaagttctaagttgtgggcttacaggtgttctttatttttatgctttgctgtattttccaagtttttttttttaagttttccaagatgttttacatctctgttcttatttaccagataaactttgtggttagttactggataaactgtaaatagtgataaaatttttaagtttatatcaagatagcacttcattttaaaaccagtaattattaggttggtgcaaaattaattgcagttgttgccattggaagtgatggtaaaaaccgcaattacttttgcaccaaccttatatttctaaaagatcaagttgtaaacctatttgttttccctaagatccgctcttgcagagttggaataaatatgattgtttacacttaagagtccaggactacagcaggcctggttggaggggagttactaatgttcccagacttaaatccagctggaacaccacctaaaatatgcagtaacataagaccatcaaaagcaatgtcccaggacttacaatgtttgctaagacgcaagagggtgtgacacagacgctaagcgccactggcgaggagatgaaggggtcgtcttcatcttcgccggatgatttccgcccacatagagggcgccagtgacgcccacacacgtgctggtgtcccgggaagagttcctggcaaagagctcaggaacgttggatcttaatcaaggctttctccgtcggggtggatgggttggactttaggctccagcaagccccgcccca

SEQ ID NO: 25221 - DNA, 2300 bp, Homo sapien
tcaaaatgatctgtacattagaactgtggtattttaaatatcagttttccttgtggactttctttgttatcagtaattcttcatcaaccaatagcaccatagctgctagagaaaaagaaatgaaattgctaaaccagcagcaaaacctctggaattactaagttattttctaaaaattagtatcaatagatcttggtaaatttttttcagccttacaagcatttctgaaaattacctgatgataaaacatctttggatatccaactgagattttcttgggtataatgacagttcctctttccttccaataattccacgggttaaattgttctacagtttttttcctgctgtagtatgaagagtttttcatacatttctccagcatcttatcagttcctttggatcaaattcttgcttgtgaattgtcttatcaagcattttgcacatgtttatctctaacctggtggacgaaaatgccaaacttcacaagatccacagtgagtccatagtagacactagctgtggaatattgtagaatcatcaggaaagaacactttgagaataaattaagcatttaagagacaatgcaattttcagaattgaaagactgttcttttatttatttaaagcctttttttttgatgaccagttacttttaggatgggacagggcagaccagtgggcaggggtactttcattctccatcgtgtacctttctaaaatgtttgattttttttaagtatacaccatgttcatttttccccctatgaaatctttgaggccagatataatttgggattctaaatgtttctgattttagaagatcatacgacctctatactatttattaaagtcctcagcagagtctggggcaacatgccacattcaagcatagtaatatttctgcagtgaagtgtatgattacttaaaccaagtaagattttttaaagactatgaatctctcattggatgagatcaggagaagtttctccaccaaataggtgctcagggtttttgaaattcagaattgcaggtgacagactggggccttatattagcactattcaacttttcttataataaccaagggtgtgagagcaataagattatggacaaatgagattttgttttttatattttgctgtattttattcgataattctttgcaagatttttactccccagaagcaattgagaataatatgttcagaggaacaaggagaaagaattcacgaggacagagtgttcctccccaaatgacaactaagggcaaagcgggtccgctccaacgaaaacaagctccaaattctactagttgttaacaatttaggccaatttgctactgctttgcagagttggaactgcagagagaggcactgtccttattgaattcaaccttacactaggagagactcagaaaggaggacaatgccagcgggccttcaaagtctaaccagttaatgccactgaaaatggcgagaggccgctgcaacagctgatgaccacatttcaacagtaagggactcgtttaggcttttctttgtttcacagatttcatggcacagcaccttagctattctcaggtggcacacacctttggatgaaaccattggtcctgtaccagtgaaactgtagctttattttgtggcttttgctacttcatttgtgactgccttactgtcaaaaattcacatacagatggcagaaagaacagatttctaattttatttccaggctgctgctctagttcatatctacacagatgggtctgtattagttggtcatggcagagctgaattgggacaaggtattaacaccaaaatgacacaggtgaaagaggttgtttcagttttgccatcagccagaattggactttataaaatactcccagactgcacacacctcccagacattgcatcacacctttgggctttgtgatgcaatgactagaattacccacagcgtccctaggagctcattctgaattatctggaaataagccagctggaacttgggaagagggcttcacctcccttctctagtgggaggggcttcaccaaaactcagcttcccagggaaccagtgactcctcacccttgactggagcagctgtaacttttcatgggctccacagttcagtgaggggtggcagcattcccagacaactcctgtgtattaattatacatatatttgagtgccaattgcaccccaaatccagacttcctggtgccagacaacttgttcattccccaatcaagtccactttctcatgcttactctatgaaaagggcacccatga

SEQ ID NO: 25222 - DNA, 2300 bp, Homo sapien
atgaaagggttcaaatcagtcttaaaaagtgaagtagtcacccaaacccccaggagatgagttaggcagccttttaaaattaatccttcacacccggggtttgcagaatgaaacactaacgtagagtgacttgacattactagctgggctggttctaattgcagttagtctgtttttatcaggttgggctttgatttatctcttgttgactaatctttgagaatatttcaccctcctacatagctgtattttatcaatattaagaatgtacttggcatgacacctcccccaccttgccagcatactcatgcaacaccccgctgcctcagtaatctcagctaatttagttgataagggaaccatgagctgctccttgttatccttatgctaaacaaatctaaactatccctccccgctggaatgtctcagcctggagttctcaccctgtttctgttttagcgtctcctaaaatgtactctgtaacaggggatctaatttcatcccagacccatcagtgatggtctgttgcttccttatcacaggtttcagtggagcctgttttttaacttctggaaggtcctggcctgccttatcgttgcaggagtactaggaaaatcaagcttttttttttttttttttttttttcagtcatacaattccttctccctaaggagaagacccagagccttattagtggaggagaaaccagaaacaaaaaaacataattattattaaggtcagaagcatcacatagaccagcatcaccacctcttatttgacacagagggaaaagggcagttcaaccccagtggggattgaagtatccctgtctgctctattgcctgaatcctcataagagttcaaacacagtttgaagccaaataactccatttccattgcacacatcaccatgtcacctcatgctaggcacgacacaccttctgccaggctatactgagaacattctacttaatgtggttctattcatattttattccatctctggtcacaaaatctaggtttcttccaatgcaagtgaaaagaacttcaactttgattctcagaaagggcatttcagtggaactctatgcttttcagagttcatgggtctatgaggtaaacatgcaatgactttctggagcactcactatactaaagattttgagaaaacaaatgtatactgagccaaacatgtaggtcatatgattgagcatgcaaaccttaaacaaatgtttaagtcaaaattacagctgtgcaaaaatgtatttcctgggtgtgctggtggggaacacatctggctccagtacatcccacccctgccagtgtccttcactcatctgggacttaggaaaagttcgagaatcgtggaaactttcctgcaagccactagagggtactcatgctttaattttaagagccctaaaggaaggcgcattgtttgttttagctctgctttgcagagaccaaactgagcagttaactcacatagctaattggacaggctgtggggtggacctgaggggtagaatggcagtaacaaaaagagtgttggccaggcgcagtggctcacgcctgtaatcccagcactttgggaggctgaggcgggtggatcacgaggtcaagagatcgagaccatcctggccaacatggtgaaaccctgtctctactaaaaatacaaaaattagctgggcgtggtggcgcacacctgtagtcccagctactcgggaggctgacgcaggagaattgcttgaatctgggaggtggaggttgcagtgagctgagattgcaccactgcactccagcctggcgacagagcgagagtctgtctcaaaaaataataataataataaaaaataaacagaaagtttaatgaggaacaatatatttacatagtttcaaagtatctccccacagaatatttattaactacagaaggagaaaaaccacctcactgtggagagtcctggtagacaccatcttaaccaagtgggacatgttgaagtcatgtgtcacctggcaggatgccatgaggggaacacagagtcacttttgtaatattctgacaaagactcataacatcgatctaaccacgacaaaacaatagacaaactcaaaatgggagacattggacaagataactggccaaactcttccgaagtgtcaaagtcatgatgtcaaagagagaggggagacctgattcctgctccaggacacctcagagacaggacaactaaatgaaaagtgagattctgtattgaatatttttgctataaaatacttgattgggacaactggcgaat

SEQ ID NO: 25223 - DNA, 2300 bp, Homo sapien
ttgaaagttaggattcatctattagggtaaatgttgactccctgtattcaaacactgagatcttgactatttagttggacggcttcttacatatcaaatagaatgtagaatggctgaggtggcagaaatcccacgtgtatgcagacagtcctggagcttggccagggttcatggatggggtgatcattagtgaaaacgccactaagaaacccatggagccctgtggtgggagatccaagcaggcaaccaggagcaggagtttctcagctagttttaatgtttacattttagacaacaatattaggttgctaatgttttattttgacaagtaagaacaagtatttcatcaactgccatcatcctacaatttttataagatatttaacacacatacatacacaccaattagtacgaatataatctcaggagaaaaacaagaataattctttaaataaccctgtgacaaatgtattagatttctatagcgcattagatttctatagcgcacatctgtagcttttgactatccagccccttagctcatttggagtactgtacctctcacatgccatatattcctgaaagactcctcaatttgggtacctttcagctccatccccatccttactcccacgcctgctgcagatataggcacaagacccgcctctggtcagtcagggttccggaatcccactgactctgggaaaggacacatgattcaagcaaggccactcagagcctttcctgggactgacgtgtagatgctgggagaaaggagccatctttcccctgtggctgtttaggtactatactatagggcaggggctgccacaggcagttctgtgccatggatggaaccggccatcatagaaagaaaagcaaatgtgagaggctgagaggagaccctgacgagaccacaaagcccctagatacacatgtacttcacactagctccatctatcctgcccagttatatgaaccaacaaattccctttggattttcaccacccagaaacaacaaagtcatccctttttttcattttgcttctttctggagaaacttcatattgaatgacattagtcagaagattagcatttgagaacgggatatcatgagaaggtgttttttgcaaacacaaaaagacaagagaagccaaaataatgttttttcctttccctttcttctttttcatctctttccttgtcatttcttgattaaatatcttcatctccacatgtgtttgctagagaaactggaaggaaaagagcagaaaagaagccaggtgcagtggcatgcacctgtagtcccagctactcaggaggctgaagcaggaggatcacttgagtccaggagttcaagatcagcctggacaacacagtgagaccccatctctaaaataataataataatcttttaaaaattatttttaagaaccagaaaaaatgaacagcaaatactggaggaatataagcaagggaaaacaaatagaaaacagagggggaggataagagcaagaaaaaggtcctcagggtcattccaagttcatctgatactgatatcgaaagatttcagaccaaattctgagccagtctcatctcagtctcccctctttctctctctctctctcttcctctctctctctctctccctccatccctctttttcttcctgccactgaaccaaataagtgcctgaaaatctcaatttggcctacttcctacacatctaaaacttagaaaaaaggaaattcttaacattctaaacggactcaatttgaaaagaaccactgtggaatattaccaagaaaacgctgtaaaaatgagcatgaggccttacaaaaaaagtagttttgatgcttataaagtacattattttagtcttaaaagggtaccatggatgtaataacaaataatttttattaagaaaaataatgattcaaatcttcatagaagtccttgctggacttgaaaatatttatgtttctcataggtggccagccatgagctaaaaatacccatgtcctatatgcacatctgtgaaacgagcacagcaacagtgcccaatacaattgctacagcagcgtctatcggtgcagatgtcaacggcagagctgtgcaggtgagtcttcctgtctctccttggtgtgcctctcccacatccctggtttttatgactagatacaggtacaatagttgacttcagagaagtcatctgtgtcactacacatagtctgaggtaattaaaatgttgggagagtgtatttggagtaggctaaattgagatgacagacccaaaatgt

SEQ ID NO: 25224 - DNA, 2300 bp, Homo sapien
ctttacattttaaagaaaataatctgcttactttaatatcatttttagtcaaaaatcatttgctacataccccacaatgatggtaataacaggttaagaaccacaaatgtgatgggaagtaaaggtgaaaaacattggtcagagctatccctgagtataaacagaggcatttaaacagtgaagagaaatgattcagcttgcagttgagaagattgctctggaaatgttgagaaaggggatagtacagttaggaagttattgcaaaagtcccatttagttaggggtaatagatgcctaaatcaagatggtactggggaaagatgatacaattttaaaacgtggcaaaaatagaagataagctttgtgaggccataggcgtaacatgtcactatctctactggtctctagctgaataaatatttgttgaatgaataaataagatcttggtggtaaggcggtgcattataatggtgaagccagactgcttgggttcaactggacctcttccacttactagcgctatgatcttagacaagttacctgacctcgatgcctcggcttttccatctgtaaaatgggactaataatagtgtctagattacagggtagttttcaggatgaaatggggttactacataaagtgcatagaagagggcctgatacatatagggacatattagttatcatttttatttgtgaaacgttgtcctttaacagaacttcagatgtgaaaaatacagttctgggggaagagcaattgacagcactgacagtgttaaattagccatgaagtgaagatgccagatagtgtggactggggccttgggagaaaggaaggggctagacacttagagatcagactccagccacttccctctgctccccacagccctcccaatcacactagcttcttgcagttcctccaacagatgcagtttgtttcctgcctccttcccactgctgttgcctcaacttggaagggcatagagcctggatttaacaaatatttgcttaatgattcagtagatgatcttggaactcttttaagtggagtaaatgttaaatccttgagaatgtatgagactgccatagaagaaagtatccagaaagaaaaggtatcagtacagaaaagaagagtcagaaaataccgtgcaaaggcacattcagaacgtaaccaggatagctggagccaggattcaaggagagaggtaggtaacattcaatgctcagaggaggcaaacagggtgaagaataaaacactgggtttggcaataatttcaggaacgaacgctgagaaagtcatttttccatgaagttgcgggggggtggggtagaggtcagatagttaattagggaaaagaagtcaacaaactattttatcaaaaggtttagggaagagaagccactctcctcctaccagagagtgaggaagcaactggagagaagtaaactactgtacagtgaataaaaacatggggctacatcctagaggcgctgtgcatctttatctgcacagagttttgtcacgtccacagtgcttttcacacgcactatctaatctgatcgtaccccagctccctgatgatatagcctctaactgaggggttctcaaggtgcggaccagcagcagcatcacagataacttgttggaaatgcacattcatgggttccacaccaggcctacagaatgagaaactacgggtggggcccagcagtctgttataacaagtcctccaagggattctgatgctctccaagtccccatagccaccacactcgggagacaaccgctgcagcgcgcagggaccgcggttggaggacagaatttccccttctcaatcttcggcctgtgtcctcttcgctcttaagggaggtagtgaacaatgagacagcccctcagagaaaagtcgccaggcaggggactcagctggagcgaactccgcccatcccggccagggcggaggcgaggtgcggattccttccccaaaccacgcccccatgcccgcccccagcctccgcccccgcacgacccgagggccccccgccctcgggcttcgacttccggtgctggaggagggggccggcggcgagggactccaggaggacgcgtccaacttcgagaccggcgggggccggctccgctcttccaacccctccatgtgtgaagagggcggacgacgcagcgggggaagaaaaataagctagtctaggacaagtgtccaggcgacgtggaacccagtaagggaataaagaagactggaaacgtctctcccctcccctatcccagtccctcaccctaa

SEQ ID NO: 25225 - DNA, 2300 bp, Homo sapien
atgctaataataagaatgctaaagctacttgctattatttgtatcaaggtaacatcagtaacccacatattcaagagatacactttcccattttactgccaaactgttctagtttacaactccagctccttaagaaaatttaccagctaaatctaaatgaatctgcaaagattagaatcaaatcacactttggtctccccaccactactacaaggggacagacagcctatgattagtgattttaaaattctacaatatatatctcaaaatgtctgctacttaaggaagaaaaagaaaaacacaacttataaccagtagctgacctagttcttcatttcctcaaaaccacctgtaaaacaaggttaatatgcttttgaccaaaaacagtaaaaatatatctgagactacgtcttatttagctttatatcactagcacagcactttgctacagaattcaatactcacctaagtacacactaatgcaaaaaaaaaatagtaatataattctaatactttttctactaagtctgtatttcaaaagacattacaatgtgaatcctgttccacaattaacttccatgggtgaagtctgagttttctctcacaaatcttcacaaaatctgggtgactacattaggagttctccttttataaattaacatttttgctcatttaagtttgcttaaatgagactgcctgctagtgaaaacagagcccttatttttatttttaaaaatattttaccttcacaccgaaaagaagattcactaaccggcttagagatatattgatactaaaaattaaggcttgagcagtaaagcagtagaaatattaaaggtgtatgtgaaatggcagtcaacgagaaattcaagtttctttctggtatcttcttttgaggctttagtaatatgcaagtacctgtcagagaaggcaagatacacaagatgttctggaggtttgaagagagacattaaaacgtaaatatttacctctttttctagttttaaaacgctggcctgatagcgttggcttttgctgcttttgattattcataaaagacaccctaggaaaggagaaataaagccttaatatcagtgccataatactaatttttaaagcaaaacatcaaaccttagtctagtcacatatgaatcaaatggaacacccactctcaggatataaagctggcaattatacccgatacaggcacaaagaattacctgcacttgaatcaaatgtacgtcaaaatgtgcatttctctctacaagaaacccttcaaattagtgctgtgaactacttttaagcgacattgtagtgctacagtgatcacccgtcataaacctaattgttcagttttctccacattcctctttacattcacttacatcttccacgaccactaagcatcgcagaacgcaaagagagattatcaccatagtcagcaggcatccaaaatgtgtatgccaattctaaaacactgtcaaaaggtgaaccccttcttctgacaagcctggttacgggcagcaccatcctaccctaggtcatgcctgtgaccgcaacagcggccgccttgcaccactcaggcctgcaaaactaacagccagcccagcctccttcgcccatatcccacagtcctagcctcctccccggtaacgtgtctcccaatccacacccttcccatgcctcccgcccgagccacagatcacccgcttcccgcccaggaccccatcggccacagcggggcgccgtagggtcccgcggctctttctccactgaccctgtcgcctgcggtggcggccgccgcaacgagcggaccacagtcactgaggcgctttgcgccggggccccaggcgccccgtacatccgcccgccctccagcgaaagcagcggcggaggcggcggccgcagcggtggtgggtggcagcccctccgccccgcccgccggaagcccccacgcgtacatcacacaacagaggccgcggcggctttgttagccaggccgggcacggcccagagggagcccgcctcggccactgccttcgcagccagcgccgcggcgcacacccggaccccacctccccacccgggccgccgctacccctcggcctccctgccgaagcggcggcctttcaggccctagatccggcccggcctcaagaggcgacctccgttcgggcccatccaagccgggccgcatccagcccgccgcctccctctccctctgcccggcgtccacgacccgcagcgtccgcccggggtgagcggggcgccgcgtctcaccgaatttaaggcgaagagga

SEQ ID NO: 25226 - DNA, 2300 bp, Homo sapien
taatttctgtataatgtctttttcaagttgttaggttagagattttcgattttgctcgaagcatttctgaaaagaaggtggctcctaccattcccaaaaagattgtgttaacattgcgtttaggataaattatgttgtatgtgcttgggagtggtactggaaagatggtgttttgttgtttttatattctgatgccaccgttgccttcgtgtgtgattaaagtccttggtagtttcatttgtccgtttacggaaatgctctgtaatgatgattctgtcagcaactcagatataactctgattacgtttgcagtaatcagtaatgcggtgttggtgaggaacatttatgattgcatttgagttggagactagtttctggtacacgtttaaacggggagaatgacgtgtgtttcacgtgtctgtgaagagaccactaaaggcaggctttgtgtgagcaacatggctgtttatttcacctgggtgcaggcgggctgagtcagaaaaaggagtcggcaaagggtggtgggattatcattagttcttataggttttgggataggcggtggagttaagagcaatgttttgggagcagggggcggatctcacaaagtacattctcaagggcggggagaattacaaagaaccttcttaagggtgggggagattataaagaaccttcctaagggtgggggagattacaaagtatattgatcagttaggttggggcagaaataaatcacaatggtggaatgtcatcagttaaggctatttttactttttttgtggatcttcagttgcttcaggccatctggatgtatacgtgcaggtcactggggatatgatggcttagcttgggctcagaggcctgacagcgtggacttctatagtgctatatttgtactactgggagggcaggggtaaaatgtaccaaaattagtaaattgtgattcctccctctacttttttcacttttttttttttttgcattcttccaataaatctgggcatgatatggctaatgcagagtgcctgtgaatgaagttcaaactgcagaatatgggacaacacagtaattggatttatcagtgatttcagattgggtgataatgattcttgaattttggtcttaaaacgaggtcacgaggggacctttgtaattacgaattttaaacagctcagtgtggggtacaatttaactaggaaaaacttgccttttatgtagatgagacactcaaagagaacttactgtcctgattgggatgacaaggattgggattatggaaaatggaggagcagcagcagtcataaaagaaggaagagatcacatagcagtgcccaggagaacaagcgctgcaaatacaatcactctaaaatgtgtgataggtaaggaggatacttaaaatgtctgaatataacaatacattactagacaaaactagtatcacttaaaataagtacctgattactaccattcgtttgtttccaatgagagattttgatggtttgtaatgtttgtaaaattaagctgcttgtgggggagtctaggtgctgtcttgaagagaatgtgaggatatttggtcttagcataaaacattgaaaataatttttatttctctagccattatttggaaagcaggtctataaatgagaaagattatcatagtcgacgctacattgatgagtacagaaatgactacactcaaggatgtgaacctggacatcgccaaagagaccatgaaagccggtatcagaaccatagtagcaagtcttctggtagaagtggaagaagtagttataaaagcaaacacaggattcaccacagtacttcacatcgtcgttcacatggggtatgaacgtttttaaaacattttggaaattttatatcccatgtggaacagggaaacttgaatttttgtgtttgattatttgagaaagttttaagatgaaatcatctcagttttaacctgcaggattttttctgtgtttgtgcattggataggaaattccggaaataaagtacacatttagttctataatttaattattggttggctcctaattgacattccagtgaaatgatgggagttaattgatttaatttagattagttgaaaattattacaaaatattctaaaagggttttttgtggtacttcaagaaacctgattagttttgatctattgaaatcacaaaagtagaacagggcattttatttttgtataatttaggattaggtatgcttctttgttctaacaagtcatgttttctaacccttctttcactaagcaaaccagaacagat

SEQ ID NO: 25227 - DNA, 2300 bp, Homo sapien
caatgtcgcgatcttgactcactgcaacctccatctcccgggttcaagcaattctgcctcagcctcccaagtagctgggattacaggtgagcaccaccacgccttgctagtttttgtatttttagtagagacagtttcagcatgttggccagggtggtctcaaactcctgacctcatgatccacccaccttggcctcccaaagtgttgggattacaggcgtaagccaccgcacccggcatactaatgactttacattttgtttcacttttaaaattttaatcatttaagtttctagacttagtattaaggcctttctttggccagaccttgttttgccactttttttttttttttttttgagacggagtattgctctgttgcccaggctggagtgcaatggtggatctcggctcactgcaacctctacctcctaggttcaagcaattctcctgcctcagcctcccgagtagctgggattacaggtgcctgtcaccacgcccggctaattttttgtatttttaatagagacggggtttcaccatcttggccaggctggtcttgaactcctgatctcgtgatccacccgccttggccttccatagtgctgggattacaggcgtgagccactgcgtctgacctcctccaagttttattctaaactctgccacttttaattagtggtgcaaatatgttttttttgattttaggagtgttagtccaaactgcaccattttgtaaatcctgcccccccaccgccctgccccgtttccccagccctgcctggtctcccccaccctctattttgcagaccttggtcaaagtgaaacattccacaggggttcgggctgtgagaaacatcctgcctaaccacctgaccacaaaacggacaaaggcgcaactaaagaaacacccctatcatattctgccgggagaaagtgcaaagaacaccacattcccggggggtcgtggtggctcacgcctgtaatcccatcactttgggaggccgaggcgggtggatcatctgaggtcaggagtttctactaaaaatacaaaaagtagcgaggggtggtggcgcacgcctgcagtcccagctactggggaagctgagacaggagaatcgcttgaattcaggaggcggaggttgcagtgagtggagatcgcgccactgcactccagcctgggcgacagagcaagactccgtctcaaaaacaaaacaaaacaaaaaaaactaccaccacattctgcgggaacaagggccagaaccgcctcattatgggaacatcttaacatcctgcagggcagcaagtcagcaagccatatggcccaggcccctcccgcccttacctaaaagtaccccactggtgggcactggcattaggctggttccccacttctgtaggtcttaggctggacataaagcccgcagttgctgtagagctgccactctgtatctttaacgctggccttcccttcaaaacttatcaaggagcttatttttagaatgtgtgctcagttacggccataaaagtatcatagacagggaggtatgctggctgcccacgttgggcctgatgcaggcaccatgaggatcaaggtgcagaacattgatttctgttggctcacactgatcccattagtaatttgaagccatctgacgctagtggtatattttatttatttatttattttttagagacgggtcccgctatgctgcccaggctggtctcgaaatcctgggctcagcgatctgctcgcctcggcctcccaaagtgctagggttacaggcgtgacccaccgcgccgtgaagtattagttttaaagcaattgttttagtggtcgctaacagggtacatgctactgtgtatactgattccctcacttttccttgttcacaagttgttccttgttctagagttcaaaaactatcagtgagtggggacaacacgccgacggcttcctttcatccgccacagcgggctctggttccctccctggcgcctgcgcccacgatggtcgcgcgcgcgacacgcccgccctttccgcctgctcgccccgtgcatgacccgccccgcggcggagacgcgctcgctgcgtcatcagtgttttcgagacgagtctcgacgcagcagctgtcagctccattttgttgttggtgcgcgacgcagtcagctgcgtgattcccgtgattgcgttacaagctttgtctccttcgacttggagtctttgtccaggacggtaagacgcaggagggagcggactaggtgacagggccgttcctgtgagcctcgcgggcgcctgg

SEQ ID NO: 25228 - DNA, 2300 bp, Homo sapien
ctcagctaccggggaggctaaggcaggagaatcgcttgaacccaggggcagaggctgcagtgagccgagattacaccactgcactccagcctgggagacaagagtgaaactcaaaaaaaaaaaaaaaaaaaaaggtaaattctgtgcattttaagtgacaacattaaagaattttaaagcaattttgtgtattttttaaaagaattattccatattaagtgcttctatattatacaatttctccatcttgccactgcaatttccatgaacttttattgcccttgactgaatttctaaaaattacttataatgaaagacattagataaaaattgctcaaaacttaccatttttcctcttagtggtttcaggaaggactacgtgatttctcagtcttacagcgagctcaaaaataagtctctagtcccaaaagaaaaaaagaattaggctcattttcctgtcttaactcacacacgctcatctttactgaacattttaaataaaaacctcgccgggcgtggtggctcacgcctataatcctaacactttgggaggccgaggcgggtggatcacttgaggtcaggagttcgagaccagcctggccaacatggcgaaaccccgtctctactaaaaacacaaaaattagccgggtgtggtggcaggcgcctgtagtcctagctactcagcaggctgcggcaggagaatcacttgaacccaggaggcggaggctgcagtgagctgagatcgcgccactgcactccagcctgggtgacagcgcgagactccgtcaaaaaaaaaaaaaaaaaaaatcctctaatggcatcccctaggtaataaaaacccggctatagaagatatcctacccgattcaagcctcccaatctcctacttgcccggcttgctcttcttcaagagcctccttgcaagtcccccaataacccagataccttcccttagggtccaggcattgggtgtcccttttgcctggaattcttatactcagacatctctacggctaatttcctcacctccaaatttctgcttaaatgtcaagtttaactgacctgacaatcctacacagaactgctttagcccttcagccctaggacattcctatttccttctcccacagcacttatcactaatatactatgaaattcgctttttttttttttcaccacagcacttatactaatatactatgaacttttttttttccaccacagcacttatcactaatatactatgaacttctctttttttttcattttgagacggagtctcgctatgtcgccaggctggagtgcagtgcggcaggatctcggctcactgcaacctccgcctccgcctcccgggttcaagtgattgtcgtgtctcagcctcccgagtaggtgggactacaggcgcgcgctaccatgcacgactaatttttgtatttttagtagagacggggtttcgccgtgttggccaggctggtctcgaactcctgacttcaggtgatccgcccgcctcggcctcccgaagtgctgggaggccgccgtgcagggtccttcttttactctgacgttgcaacaacagcctcgccgcccactgttcactcgcagtatcccaagaactaaaccagtagcaacacagaactcagcaagcattcgaataagtgaatgaaagaattaatgacgttactccatacttgggcttcaccacttcgtctagcacagccgttgttaaaacaggaaaaatgcaatcgcagatgccagcagaggtctgttggttcaaaattatagtttctttgggccagcggaagttgggcgcgggacccaagagagagaacgccccttaccgcctcacctccttcctcccctcatcttcctatctcaaaccaaaacgacaatgcaatttatccccaaccggaaatttgacagtgaaagggagctctactaataattgcactgggacaagaagtgtaaggcgaaactacctgggcaacctcaagcaatgctttacactcggctgccaaacggaaaggaccacttccgcccagctctcccgctacggggagccaagtgccacagcatccggagcgccgacgcgggaccggaagtgacgcagagaagtttccgggactggtgagtagtgggcgatttaaaaacccgcgagtgtagttgtgaccttcgcggtaggtgccggttggggccggctgtgattgttatcttggtgctgcagaggacagcagaagaggagattgggtcagaaaactgccctgccgcaccagagcacagcgcactagtgggacaggggtcct

SEQ ID NO: 25229 - DNA, 2300 bp, Homo sapien
cactaatataagccagcactaaatgcttactgcatagaatgacactgcccgcctcccctgattgcaacagaatttggagttggggtggtatatactggcattacaatgtgctttaccaaaaaacagaataatgtggcggggcgcctgtaatcccagcactttgggaggccgaggcgggaggatcacaaagtcaagagataaagactatcctggccaacgtggtgaaaccgtctctactaaaaatacaaaaattagctgggcatggtggtgtgcacctgtagtcccagctactcgggaggctgacgcaggagaatcacttgaacctgggaggcggaggttgcagtgagccaagatcatgccacagcactccagcctggcgagagagcaacactccgtctcaaaaagaaaaaaaaaaaaaaaaagaatgtttaaaatgtcaagtgctttatcagaatcaaaaatcaaggaatacataggcaggtcactctataaatgggcagggtcaaggcagaagaagggagaagccactgccccttaagcaacatttgctacacaaaggccaggctcaagaggtgggaggggataaggtatagggtacttttcccagacagcctgtaagccttctaagtatctacatccaacaaggaactgaaaaggttggcaacagagggaaggtgggagggcaatggaaaggtagaaaaaaactgctggctccaaaatatgcacaattagtaaatgtttaatcaaataaccacaaaagataatgctgtcaaccccattcttaaacttaccacttataaacactttttgaagaaaaacatttcatagtatgcacaataagaaagcatagccaactgtaaatttgatgaaatatccataagtcaattattccaaaagcaatttttcaacatttctatttaatgagatgaagatgcttgtttaacacattatttgaagtgatacagggtctccaaaaaccactcgaggtcttggaagtttgtttttgtttttttctttttgacacagggtttcactaggcgcctaggctggagtgcagtggcgtgatctcagctcactgcagcctcgacttcctgagctcaagcagatcctcccacctcagcctcctgagcagctgggactacaggcgctaaacaccacacctggctaatttttgtatttttagtagagatggggattcgccatgttgcccaggctggtctcaaactcctgcgctcaagtgatccacctgcctcggcctccaagagtaccgggattacaggggtgagccactgcgtccggccttgaaagatcttctaatggtcctcatagtactccattctccagcattttctacatctggcaagctcgaaagtgaaaccctagtgggccatcatgcaggttttgagttatttactgttacagatgaggaaactgcgaagctacatggccacagtcaacaacgacaacagaaggcaacatagtatggcggttaagagcaccgactctgaagccagcctgaatcctagagccagagctgtgcaacagcaggtaaatgacttatcctgtgcagtttcctccttaatggaaatagtgcccaggccacaatatcgcgagatttacacgtaaagctggaaacaactcccgtcctagagtaagcactgtttactattaagcagcatcagtagggcccctttgcaacctgcaaaccgctccctcgacgttacctcatctatgcctcatttcagtgccacttcaggccttttccaggacagtgaaaaaccacgagacacagccagttaagtctgagtcaggacccctgtcccactagtgcgctgtgctctggtgcggcagggcagttttctgacccaatctcctcttctgctgtcctctgcagcaccaagataacaatcacagccggccccaaccggcacctaccgcgaaggtcacaactacactcgcgggtttttaaatcgcccactactcaccagtcccggaaacttctctgcgtcacttccggtcccgcgtcggcgctccggatgctgtggcacttggctccccgtagcgggagagctgggcggaagtggtcctttccgtttggcagccgagtgtaaagcattgcttgaggttgcccaggtagtttcgccttacacttcttgtcccagtgcaattattagtagagctccctttcactgtcaaatttccggttggggataaattgcattgtcgttttggtttgagataggaagatgaggggaggaaggaggtgaggcggtaaggggcgttctctctcttgggtcccg

SEQ ID NO: 25230 - DNA, 2300 bp, Homo sapien
taagtcatttacctgctgttgcacagctctggctctaggattcaggctggcttcagagtcggtgctcttaaccgccatactatgttgccttctgttgtcgttgttgactgtggccatgtagcttcgcagtttcctcatctgtaacagtaaataactcaaaacctgcatgatggcccactagggtttcactttcgagcttgccagatgtagaaaatgctggagaatggagtactatgaggaccattagaagatctttcaaggccggacgcagtggctcacccctgtaatcccggtactcttggaggccgaggcaggtggatcacttgagcgcaggagtttgagaccagcctgggcaacatggcgaatccccatctctactaaaaatacaaaaattagccaggtgtggtgtttagcgcctgtagtcccagctgctcaggaggctgaggtgggaggatctgcttgagctcaggaagtcgaggctgcagtgagctgagatcacgccactgcactccagcctaggcgcctagtgaaaccctgtgtcaaaaagaaaaaaacaaaaacaaacttccaagacctcgagtggtttttggagaccctgtatcacttcaaataatgtgttaaacaagcatcttcatctcattaaatagaaatgttgaaaaattgcttttggaataattgacttatggatatttcatcaaatttacagttggctatgctttcttattgtgcatactatgaaatgtttttcttcaaaaagtgtttataagtggtaagtttaagaatggggttgacagcattatcttttgtggttatttgattaaacatttactaattgtgcatattttggagccagcagtttttttctacctttccattgccctcccaccttccctctgttgccaaccttttcagttccttgttggatgtagatacttagaaggcttacaggctgtctgggaaaagtaccctataccttatcccctcccacctcttgagcctggcctttgtgtagcaaatgttgcttaaggggcagtggcttctcccttcttctgccttgaccctgcccatttatagagtgacctgcctatgtattccttgatttttgattctgataaagcacttgacattttaaacattctttttttttttttttttctttttgagacggagtgttgctctctcgccaggctggagtgctgtggcatgatcttggctcactgcaacctccgcctcccaggttcaagtgattctcctgcgtcagcctcccgagtagctgggactacaggtgcacaccaccatgcccagctaatttttgtatttttagtagagacggtttcaccacgttggccaggatagtctttatctcttgactttgtgatcctcccgcctcggcctcccaaagtgctgggattacaggcgccccgccacattattctgttttttggtaaagcacattgtaatgccagtatataccaccccaactccaaattctgttgcaatcaggggaggcgggcagtgtcattctatgcagtaagcatttagtgctggcttatattagtgatactgagatttattgaagttagttcctattacatagtagctttagcataatgggcacacacagaattatgagaatactgaggggtggggagccttgggaaggatgctgaaaagggaggtcaagaaaagttttatttaagaagttggagggggcttgggaaaaggaaaggtaatatttagagaaatggattagggaggaggttggttgaagcaagggtagggagaataagaacaagggtgtgcaaggcaggagatgggatggacgtttgtgtattatgtaccaggctttgctaggttacataattcattagctcctctggatggcctgtgaagtgggttatagtatctctgtttcgtaggtgagaaaacaagattggagaggttaaatggcttacctaagttacagtgtgctggtaagtggcagagccactatttgaacccagatctctatgacgacagctcttttgcccatatgttttgatgcctcaaagatccaggcctaaagtatacctgtgtaccattttctttgttttgacatcagaaacttgaactttacctgatttctgtatgttgtcatcttgcgtacgcccagtccccacgacagtccggtttgtagattccctgatctgcaattcttcccgttccttcatggatttgaaggctctcctttcttccttgaatgactttgcatccctctcgtttgctgagagttgggacaatgttggattactggtggaacc

SEQ ID NO: 25231 - DNA, 2300 bp, Homo sapien
tgagctctggagttggagaccagccagagcaatatggtgaaacccccactctacaaaaaatacaaaaattagccgggtatggtggtgtgcgcctgcagtcacagctactcaggaagctgaggtgggaggtttggttgagagcagatagtcgaggctgcagtgaacagtaatgttgccactgcactccagcctgggcggcagagggagactgcatctcaaaaaaaaaaaattatatatataaaaaacacacataagttgaacatatctattcaacattcctagatcttcatctttttttcaaatttcttttcttttttaagaaatggggtctcgatgtgttgcccaggctggagtgcagtggctattcacaagtgagatcactgctcactgcatcctggaactctgggatgcaaacaatcttccttttctcagcctcacaagtagctgggattacaggtgtgtgtgctgggctagtcatcttcacatttttaaacactcttcaaacacatcattgttaactgttgagctatgttctctttatcttctgtctctagtcactccccaaattcttatttataatgcacaaaaaattgcctttctcttccattttcttaactccacctagccaaaatggaataatgaggtatcaaggctatgatcatttctttctcaactggatttcctaaacagctcccaaatcttgtgactctatatcttccctcccaatcctacctcctttatccaaagatctttcaatacaaatctgaccagtgccctaagggccaactaagcccttcataataacagacccaatgcttggcattttacacagctgttacacggatttggaccttctacctggaaaattttacccctcttggcctgttttaaatctattcaacacaggggtttcagtttaaacatctcttcctcctagaaaattgttcctgactccttctgggcttttaattagctactcctaccatgtgctccaatgcacttcccatatcatggtatttttctcaatattgtccgttcaatatcttcacgtgctaggtaactacagtgaatgcagagatcgtagttgtctcgctcgataatgaatacttatcttctgttcgcagagtactctgtagttttgttttgagtaagtgaatccaaatgaaacaataccctgttcttaatactgtatggatcccatccaggttcattccttttcttcctcattttctctgtcttgtcttttttatattttggatagttgaagtcaatcattttctctgtctattcattctatttccccagcctcttcatcccactagccgtccgatcccatctccatattcagtgcttctcctaacgtctcttcttctccctaccccaaaccctggagatgtacaagatcctacctttcacgccaaatgaagaaaatctttaaaaaagaaatgcgaatcaatttccattacctttttcttcaaaaggtagctgggaaaccaatgaacacttttttttttttttttttttttttttgagacggagtttcgctcttgttgcccaggctggaatgcaatggctcgatctcggctcactgcaacgtccgcctcccgggttcaagcgtttctcctgcctcagcctcccgagtagctagtattacaggcatgcgccaccacgcccggctaattttgtatttttaggagagacggggtttctccatgtcggtcagactggtctcgagctcccgacctcaggtgattcgcccgcctcggcctcccaaggtgctgggattagaggcgtgagacactgcgcccgaccccaaagaacactttttaaagattgctacaagacaaacagctaccactcagccagctactgtgcaaacttcctcagatccaaacaacacttccttttcccttccccggaaacggaaagaagaaaggaaaggtaaggcccacaactcagggcccaagaatccgttttcctcaggtttcctgatgggcggggccgaatggccggcgccgactggacggcagagccgtcgctcttggccgactcctcttcctattggcttcctcgggcaccgccccctgaacagggcgggagattcggtgtgccgcacgcaggcttcccatcccccagctggcctccggtgctccttacctccccggtggtcgggcgcgaattactggaaattggcttttcccgttggggccgaaggtaccttccctgcggcggcgactcagcggggtgtcgttcggccggcgtgacgcagccggatcggcgccagacggaaacctagcggt

SEQ ID NO: 25232 - DNA, 2300 bp, Homo sapien
taagaaaagctaaaatactcatttttttaaaatgtatagcccaataagaactaaatgatttatttcaaaagttaaataattttttttggaaatcatggaatgtatttgcatattgatgttccaaacaggttttatgtattgttttttatagcagggagtagttgaaaagtaatgagtatattgattagctgtcttggaaagagaggattggctttctaacaatcactgatacaggtttgggtttgggggggtttgtttgtttgtttttaagttttatcatccatactgaattgagagatatgctccatgtttaaaaatatttgtaataagttcatctacttgacactgaatcttttttattcttactctaaaattattctggctttacattcagtttaagtggttaagtgaaacagtttttagggtgcaaaaattattttcccactgtttttctcatgataatttgagtctcctgagctataatttctgaaggatttttactactttggcattatgtaatctgatctctgtcacaatgatattaaataagaactatctcactttcatatgtttgcttcataaaaggatatggaatgtacacatcagctctttttttttttttaaactagcatcaacctataacttggtataaacttcccaagtatttagagaatagtgctggtgaaaatttaaataggataggcatatagaaattatgacttgtattgagtgatgtcctttcaacctaggactagtgacaaccttcattttttcagagctgaagaaaaaaccgtgaatttaagatcatatttattggtgcatgtaagccattatcctgtcttaatgaaccgattaatgctgttgattgttgaaatgtgaaatgtagtcactgttgaccttgtaaatatctgccagagatgaaaaaatattttaagttattgtaaataaagatgtataaaattcagtatcagtctgcaatgcagaaacatatcttagatgttaaaatactgtgtttgagagatgtgtaatttacccttagatgtatctagttacattaagagtgtaaatttttttgtacagtataaaaatacagctctatttggcttttaactggatttccctgagttgattttatcttacgtaaattttatatcttaaaagggtcttttcatattttttcaaagtgtaccatttttattttatatctgaacctttatatcataccctattacattaaggcagtataaaaattatatttaacaccacaaaataagaaacaagacaaaggcaggtgtgaaattaatacataaaacgtgccatatatttctgtagttaattgcaggggtacagatttagcactgaacgttaaagcagccaaatgtaaagacagaagtaagattaattacataattttcatattccttaagattcaacaagtttctcaggtgaagcacaactatttctaatgttaaaatattttctttcctgggtccttgtaaagaggaaccaatattattataatacagtttacaatacaacttatgaaggtgcctgtttcttcacacccttacctgcagttagttctctcatcattaaactttttggcctttcccacattgtctttcctaaagatactttagccttcgcttggaacatgggtttaatcaagggttaagccctaggccctttttcctttccctttctttacatgcattttctggaaaaatctcttttgtgccttttttctttatgactgttattccttgctgagtcaaagttttatcctccattttattttagattcaagcaaagtacattatctttttgatatttattattccttaatccaaagattggcagatccagaaccaagactgtgtttttctctttgattctggatctgcattagtaaggaaggatgagattcacaagctgacagttccaattttttccctttattagaaatgtaatagttgttcatttacaaaatacagaaaaagggccgggtgtggtggctcacgtctataatcccagcactttgggaggccgaggtgggtggatcacctgaggtcaggagtttgaaatcagcctggccaacatggtaaaaccccatctctactaaaagtacaaaaattagccgggcatagtgacaggcacctgtaatcacagctactaggaaggctgaggcaggaaaatcgcttgaacctgggaggtggaggttgcagtgagccgagatcgtgccattgcactccagcttgggggacaagagcaaaactccatctcaaaacaaacaaacaaaa

SEQ ID NO: 25233 - DNA, 2300 bp, Homo sapien
agaaacctaaagtcctgatacattacatactccaaggaaatatatcagggacagacaattggctgaaacactgatacttcaatgtgacacatttttatagaacatttctaccagggggtactgaccttgatttctcctacaaggaccacactgcctttgtgtttaatgtaatgcaatttgtgtaccttctaatcatatatctgcagttcctcatttttataaaactttgatatcatgccagtaagctagatgttgaatgtatgtaagtagcatttggtaactgctaagaggttacaaaaacattattggtaaaaaaaatttccttagttctgatctggttggataagattttatcataacttttctgggtctcaggctctgatgtttgaaaaagaagggaatatattgggttttaaaaaagtgtattgtgacttaaactgttataagttatccttccacagaatacatcagagctatcagtgctttgtacatttagatgtttttacttgattattgtttaagaaaaatatactgaatttatagaaagcaagtattctcctaattagcaaaagttaaaattttatctctaccattaaaattacaatagattttgataaataaccagaaaaaacgcctttttttttttcacacctagcaatcctcccgtttttattgtaaggactttcttttttccctaagagactttctgttagactctttatatatgagatgcttgtttaaatatggtggtctgtaacatttttccagctcatgtgaaaatggaaaactagaacctgaactagtatctacaacattgccaaagtccagggtaaagctaaaagttgataagtagacaatttattgttttgtgtgtgtctgtgtgtgtgtgtgtgtgtgtgtgtgtgtgtgtatggtgtgtatatgtatatatcacaaagttgtattttaaatattttaaataccctttcttttaatttaagggatgtcaaataaatgaaaggagtttaaaaatagccaaaataaatgagctataaaggcccataacatactaaaacaggcagtttcaggtatgtaaggaaaggaacattatacttacctagaaagtgagatctaaaaaaaaattaaaaataaataaaaaataaaaaagaaagtgagatcttggctatggctggaggtcagtcactttatggcataaattatttgggaggtaaaaagactgttttcaattcaaattgtgcatttattggcatctaaatctagcatgattttggttagagcacaaaagaaataccacataataccaaatcacagcaaatgttagaattaatacaacaaaattttcctttggctagaaatcttatgttatacctgaaaaattggttttaaaaaatgttcatcttggccgggcacggtggctcacgcctgtaatcccaacactctgggaggctgaggtgggtgaatcatgaggtcaggagttcgagaccagcctggccaacatggtgaaaccctgtctctactaaaaatacaaaaaattagctgggcgtggtggcaggcgcctgtaatcccagctactcgggaggctgaggcaggagaatctcttgaacctgggaggtggaggttgcagtgagccaagaatgcactactgtactccagcctaggcaacagtgcaagactccatctctgaaaaaaaaaaaaaaaaaaaaaaaaaaagttcatcttagaggattttatttatctgtatgtatatacatatatgtttgtatgtatacatacccacattaacattttatgaccctgtaacatttgttttctattcttttaggtgatgtgaattgacctcagtgaagaaacatttcatttagtctaagccttgcattcagggtcttacaacagatttcttgtgcaagaattattattagttaaaatggaaggtgttagtttaacaaactgagagtcaaattttctaagtttttaaatatgcattttaacatgcattatttttggcatttaatttaaaatagttttgtttcatgtatacaacagctgttacagatatatgccagcaatattcatacttttttaacaagcttttgttatatattttctaatctccataaaagtctaatcatctatgaaaaagatatttagggagaaaatacttgttttctgtaataaaacaattaggttggtgccatgtatgccaagttggataaaagaatacaaagaaacagctgaaggttttgggagctcgctctgacattaattactagaaagcaaactaaaatgcaaagtgaatagtt

SEQ ID NO: 25234 - DNA, 2300 bp, Homo sapien
agcctggccaaaatagtgaaaccctgtcgctactaaaaatacaaaaaaaaattagccaagtgtagtggtgggcacctgtaatcccagctacttgggaggctgaggcaagagaatggcttgaacctgggaggcggaggttgcagtgagccgagatcatgccattatacttcagcctgggtgacaagaccgagactctgtctcaaaaaaaaaaaagtggggagagggaataaaaaatgagaagctctgaccatgttaatatatggctgatttgagctagtattggtgcaaaagttattgtggttttgccatttaaaaaattttttttaaagttttgcaccaacttagtaactgactataaacttcaccataggatcccactaggccattcatttggaaaatttcccaagtccatatctttaagtctttcttcttagagtggtcaaattccctagaaacaactcttctggtatcttaactagagatctttttgctagtattttggtggcaaactggcaatatctaggcaggtatatttcacttcacttaatcttcctattttcagtttggcatccacccccatcacagctagggctcccaggtagaaattagtttttatcctttcagagaataaatctccattcttttacctagatatatggagaaagtgaagggatctgaaagtatggctgcttccagatcagactttcagcttgatttttaacttttcattttgaaataacttcagacttacaaaaaacattgctaaaatagtacaaagagtttccataaacccttcaccattcatctatgggaagctttttagaggtacaacttccctagttcctacccgaggatttaagtgggtcaactgggttaagacatagaagtgtatgtttttaaaaaggtctctaaataactaatgtgcatccagatttaggagccactttcttagacattataaatgttaggaaagcatttatttattcattcaacaagtatttattaaacaattatgtattagacaccgtgctggacaccaatgatagagattaataaatcaggatctctgttctaaagttgctttattactaaacgggtgaaagagacatagaggcgtaaaattacaattcagtgggataaatgctatgttagagctacagaggtaagggactggtttactttagcagagagaattaagaagggctttatggctaaggtaaaaatttgatctaggacttgaaatcttatcaggaatcacccaagtaaaaaagcatattctattaagaaggagcagcaagcattaaagcaagggattctgaatggttacagcatattgttggaatggtaagaagattgataaagtgtggtatatgtggttggtaatggagagaaataaggctggagaggaaggatgagggtggattttaaagtaccttgtaagaaggactttgattttaaaggaccttgtgataagtttggattttattatgaagtcagtaggaagatggtagacttattcataggggagtcatctgttcaagcatgattgattgattgattgattttttgagatggagtctcactctgttgcccgggctggagtgcagtggcacagtctcggctcactgcaacctccgcctcccgggttcaagcaattctcctgcctcagccttctgagtagctgggactacaggcatgtgccaccacacctgcctaatttttgtatttttaatagagacggggtttcaccgtgttagccaggatggtctcgatcttctgaccttgtgatccacccacttcggcctcccaaagtgctgggattacaggcatgagcccctgcacctggcctgatttattttttaaaaacggaaatatagatgacaagatgacagcaagggttatgatttgtaataaggagaatataaacagggaaacctttgaggaagatgctatattgatttgattaagaaatcataaaggtcaatattaaggcattgtcataaccagttgctagtagaagtaattatttgtaatccttttaaccttgcatttgttgtttttaggtttgaagtcctgagttttctcatgctgtgttataattctgctattgtatatatgcctgcctcatcttaccaatctctttgtcggatgggttccaggtgagaagagtgattattactaatcttcatatttatttgatagatatttattgagcacattctctaagccaagcactgttctaacttctggtattacagcagtaaacaaaactcatggagcttgcattcctgtaggagtcc

SEQ ID NO: 25235 - DNA, 2300 bp, Homo sapien
ttctgtaaattaagaaagtaattattatttcgtgtagatctgtgattatttcattatctttgtatattttttgactataggaaatcgctgataaagatgggaacaataaagttctgtctttcactatcccctccttatccaagccttcaatataccatgaagtaagtaacattggaaaggtggaattattttaaattatattgagtaacaaatcaaaaagtcagtttcttatcagagataaatattcctaaaatatctttactgatttgcttcttaaaagtggatgtttgttattagaagactgagctgtgacgagagaggtagaaaataatgaaaattttctttagttcttttgtttttttattcttctatcagtatcttttttgtttgtttgtttgtttgttttttgagatggagtctcgctctgtccctcaggctggagtgcagtggtgcgatcttggctcactgcaacctctgcctcctgggttcaagcgattctcctgcctcggcctcctgagtagctgggactatagacacgtgccaccatgcctggctaatttttttatttttagtagagatggggtttcaccatgttggccaggctgatcttgaacacctgaccttgtgatccgcccgcctaggcctcccaaagtgctgggattacaggtatgagccaccacgcctgactctaccatcattttttactctcattagtcttttatgaatttttaaaaaattctttaatttttaaaatatttttatttttaattttttaaataataagcttaaaaatattctttaatttttaaagtcttccatactacttagaaatcaccttagattgatttgtttttgttattctttattattctaggaaaataactacttaaaagaatgttgacactctaattgttgtatttcagtttaaaggaatctaattgctgtattctaggtgttcagtacattatacttttttgcttatatttatttggctgaagaatttgagaacactgataatcatgtaggtaaatgatacctgttgagctgaacttcttctactttctgtctttaagtaaaatccaataagaaacttatgaatcaaacttgtggtctgcagtggcctttgttgccactacactaagtcgtgaggataacatttaaagaaactttactagtagtctaaaaattgtattctattttcctgtcaacacacagtatcctgaccatctcatagctctttgcactattaatttgcttaattaattccgtgggactttgttttgtgtttaaaatagaatgtctcccatttagccaggaatcattttagcacagtatatttctgaataatagattttaattaagttgtgtgtatcatgaaataaaatggagagtagtaaagtattaaagaatggatggttcttcttcttcttttcttttttttttttttttgagacagagtctcgctctgtcacccaggatggagtgcagtggcgcgatctcagctcactgccacctccacctcccgggttcaagcgattctcctgtctcagccttccgagtagctgggactacaggtgcatgccaccacgcccggctaatttttttgtatttttagtgcagatggggtttcactgtgttagccaggatggtcttgatatcctgacctcttgatctgcccaccttggcctcccgaagtgctgggattacaggcgtgagccaccgcgcctggcctggatggttcttctaactttagaaacatgaactcaataatgttagtattaaagagacatttgggccagttatggtggctcatgcttgtaatcccagcactttgggaggccgaggtgggtggatcacttgaggtcagaagtttgagaccagcctggccaacatggcgaaaccgcgtctctactaaaaatacaaaaattagctggatgtggtagtgggtacctgtaatgccagctactcaggtgtctgaggcacaggaatcactcaaacccaaaaggcggaggtttcagtgagcaaagattgtgccactgcactccaacctgggagacagagtgagactctgtctcaaaaaaaaaagagagatatttgattatagtctttaatattgtttgtataattataagcagttgtactcattctggaatatagacattaaaatggatgtatttttaacctttagttttttcagcaacttttcatactctcttaaatatagatttattacatgacttttaaaaaatgtttttagttttatattttacaggcaatttccaaaagaagctatagaattt

SEQ ID NO: 25236 - DNA, 2300 bp, Homo sapien
tgtgactgagattgcattattcttggaaaaggagaaaagacaaagaacaaaacaccaaacatcaataaaaatttttatctaaagcactgacaaatgtctcagtactgagaacatctgggaacaaacaactttaatgatgcacctctttcccaattaaatttttgagaaaaaatgaaattttgatttaggttcatatataggaatataaattaccattaatagaaaaaaatcacatcttataaagtttttctgacatgcagtaccgaaataaatttaggaaaattgtagagttgctgacactacattagaccttatctcctaagctaaaggcaatatttcaaacaccttacattttagaaatttataacacttcttttaaaatcattttccagtgctgctctcaaaattgtttttcaatgacctacaaaatcaagtttttatgtcgtttgcccttccataacacatactgaatagaattcctattttaattctacattttattgtggaaacaatgaattataaaatttttttaaataagataatttagttaattatatctataaatatattttgcctctgtccgagaggttcagagtccactttttaaacctaataaataattcataagtagcttctcagacttgcttacagaacaaactacttaaaagttgacttttttctgccgggcacggtggctcacgcctgtaatcccagcactttgggaggccgaggcgggcggatcatctgacgtccggagttcgagaccagcctgaccaacatggagaaaccccgtatctactaaaaatacaaaattagtcgggcgtggtggcgcatgcctgtaatcccagctactccggaggctggggcaggagaatggcttgaacccgggaggcgaaggttgctgtgagccgagatcgcgccattgcactccagcctgggcaacaacagcgaaactccgtctcaaaaaaaaaaaaagtttatttttttccccatattcagaccaccaccttatttgcacagtccctaacttccacaatatcctggggggaggaagggatctaccaactaattttctagtcattttccaacttacactgagctcctactgtacatttttaaaggattccccacttttctgaagatctttaaaaaatgttgtcagccttgaccctcaaataaattcacgaactacaaaacatgaacctggccacattcatcgcaaactagtatctgtcaagtccataattgggataagctcttcgtgactactctatcctccatgctaccacccttcgcctagagaacctgccaatgtaaatggcactcaagccaatgaaaaaagtgttctaacacattaataggttgcaagacctcctctcccaggagggacaacctagttgtttgggtaaataacagccaaagattacataatgtacagcaataatgagtgttcagaatctgaccgccagtaaatatttttcttctccgctccccctcaccacccccaggaaatggccctaagaagcaatcactgggatttctcttaactgtcttcaatgccgtgtccttttctcgcctggggctttgtgcaaagaatcccttcagccctcacgacaccgccttgctcccgcctctcctccctctctgctggcgccaccgcagcccccacgccctaggtgggcccccacgtcgccccacaaggctcggcttccacccgcctcggctgccgccttctcctcctcacgaccctcccaagatgctacctggtttacgagaggttccgggaccaccaacacaccggctaccgcctttccagaccaccctcgccagctcccgtctgtagtttccgcggccgaaggagaagaaaacccctcttcatctagcactttgcctcccccaaagacagcaccgccgcctacctgtcaccctgctgtctccggcttcctaccgccgccgcctcccgcagcagcctgccaactgcagcgcaacaaccaaccctctcattgggtgagaacacgctctcaacaacagcctcccttattggctgcagtatgccggcagccccgccctgtgtgcggtgtctaaggattccgtccccaagcaaggacaacatattatcttccccgcccttctcttttctacagtatctgttacctcagtcagattgaggatgcacatatactgggaaaataatcgacttccagcgtccctcatgtagtctctacctgattcaggaatctctaacccagtatcggaacgttaagcggcttctccgctttcctgccgtgagaaactcgagg

SEQ ID NO: 25237 - DNA, 2300 bp, Homo sapien
agatggagtatcactctgtcgccaggctggagtgcagtgggtggtgcaatgtcggctcactgcaacctccgcctcccaggttctagtgattctcctgcctcagcctaccgagtagctgggattacaggcgtgcaccaccacacccggctaattttttgtacttttagtagagactgggtttcaccatgttggtcagaatggtctcgatctctggacctcattatccgcctgcctcggccacccaaagtgttgggattacaggcgtgagccaccgtgcccagcctaagaaatatgtttttaaaagaacctttatagccacattgtttattctctctcccaactgtaaacaacccaaatgtccaataacaatagaagggattatggtatagtcacactgtagaatattatacaacaaaaaactacatgcaaaagtgtgattgaatctccacaaatatggataatgagcaaggggtgagtcagaaaaaaatacacatgcactctgaacccatttatatagattgaaatgcctaacaattcattttttaggaattcatcatagacggaaaaattaaagtaaaacaagtgagtgcttagcacaagtcaggataatggttacctcttggtggaggagatggaatcacagaaacatactgggagattctaaggcagtgtttttcaaccaatttttaactattgtccctgtaaggaacctttctagacattttattcctaatcacaccccccgccatgaaaatttaacactacatatatactgtataactgtttatatactgtggccctttggagggacacaaatcattgtagtaactaagattccgaccccggccccaccaattttcaaccccttgaaatgtaaaatcacccctgttaagactgcatgttctaagttattggcaatgctttattttctaatctaagaggtggatacaggagtgtctgcttctgttagttataattttttaaaatgtatgttttatacacccttctgtatatatacttgacaataaaaaataaaaatagaaaaattgacttaaattgtgctgaggactgaaaaatggtggttatttccgtttcagagcagctcaaataataacagtaaggaaattagttaaataaagaaaaaacatgcaaccaaaaattttaaaagctatctatgtctgaagtgaatctaaaagtctcatgaagatcaacctccactaaaggaagctggctctaagaaaatgtgctggtatcctttccctaagaaagaaataagaagataatgctacttccactacatgcaattttagtttaccgaagactatcaagtatatatcttaacttcctcgtattaaaaactgtgattatatgaatattagaacataaaaaacaaatgaactgttattacttttagtgatgctgttcttctgcctttgcgatccaaaggcaaacaaagacaattttgcgtgtggcagaagcgggaacaagcacctggatttaacaactacagtaatgatcactgaatcctccaaccacctcttcctaccccaactctaaactaggacttcattagttctcgcctgctagttctttgatctccctcccagcctcccatccttctccatttagtctctccttttctgcactccccagaatagagtctagctcttaatcctaatcaacgggcctcccaccaactccctaatttacctgacagcaatctgacctctcaggacactcaactctgcaaccggagccaaccggaaacggaggttgtcacctcgagtttctcacggcaggaaagcggagaagccgcttaacgttccgatactgggttagagattcctgaatcaggtagagactacatgagggacgctggaagtcgattattttcccagtatatgtgcatcctcaatctgactgaggtaacagatactgtagaaaagagaagggcggggaagataatatgttgtccttgcttggggacggaatccttagacaccgcacacagggcggggctgccggcatactgcagccaataagggaggctgttgttgagagcgtgttctcacccaatgagagggttggttgttgcgctgcagttggcaggctgctgcgggaggcggcggcggtaggaagccggagacagcagggtgacaggtaggcggcggtgctgtctttgggggaggcaaagtgctagatgaagaggggttttcttctccttcggccgcggaaactacagacgggagctggcgagggtggtctggaaaggcggtagccggtgtgttggtggtcccgga

SEQ ID NO: 25238 - DNA, 2300 bp, Homo sapien
ttatttttatccccttgattaatctattttgtttgtttgtttgttttttgagacaggggctcccactgttgctcaggctagagtgtagtagcatgatcatggctcactgccacctagacctcccaggctcaaggaatcctcagtagctggggctacatgcacatgccaccattcccagctaattttttattatttgtagagacagggtctcactatgttgcccaggctggtcttgaactcctgggctcaagcagtcctcctgccttagcctcccaaagtgctgggattacaggtgtgagccactgcaccctgcctgctttattctttgcaaatggtaaggccatgtaaatctaagaatgtggaaaagcctaaatgcagtatacacaaccatctgtggttctgttgaatttacatgttctgctctggcaagctggagtaacagggactggtgtatcctcctgcctgaaacaactgaaaaaccatgtagacaaaatgtctacctgcattctagcctgggcaagtagcaagactccatatcttaaaaaaaaatacaaaagagcaaagaaccaggaaaagatcactcatatgaggacaataacaatcaatcaatcaatagaattacacccagaaatgccataggtaatagaattagtatatttgccttggcttttgaggtgaggtaaaacaaacaagcaaaataattagtagatagggatactaaaacagattctatagccatatttcaataagatagaggaaagactgagcatgttaagttgagacatggaagatataaagactcgtattaaaactatagatggggccagatgcagtggctcacacctgtaatcccagcactttgagaggccaaggtgggagcatcgcttgaggccaggagtttgagatcaacccaggcaataaacagatatctcatctttacaaaataaaaaaattaactgggcacggtggcacacactctcagctattcaagaggttgaaacagaaggactccttgaggccaagaattcaaggctacagtaagctatgattgtgccgttgcaccactccagcctgggtgacagagcgagacactgtctctaaaaaagaaaaaaagctctagatgggccagatgtggtggctcatgcccataaccccagcactttgggaggctaagacaggaatcacttgaggccaggagttcaagaccagcctgggcaacatagcaagacattcatctctacaaaacaaacaaccaccaaaaaacacacacaaaaaaacttctagatgcaaactacaatgtctgaggtgaagaatacattgcatgaggttaaaagcagattagatactgaagaaaagattagtgaacatgaagacacacaatataaattatctaaaatgaaatacagaggccttgcatggtggctcatgcctgtaaccccagcactttgagaagctgaggtgggcagatcacttgaggtcaggagtttgagaccagcctggccaacatggcaaaaccccatctctactaaaaatacaaaaattagcctagcgtggtggtgggcgcctgtaaacccagctactcgggaggctggcaggagaatcacttgaacctgagaggtggaggttgcagtgagccaagattgtgacattgcactccagcctgagtgcgacagagcgagattccatctcaaaagataataataatagaaaaatgaaaaacagaaaaattactgaaagagaaaaataaagagtatcagggaaaccataacacagtatcagggaggctaatatatgtgtaattaaattccctgaaggagaggatgggagatagaaaaaatacttgaagaggtcgggcgctgtggctcattcatgcctgtaatcccagcactttgggagaggccaaggcgggtggatcacctaaggtcaggagtttgagaccagcctgaccaacatggcaaaacactgtctactaaaaaaataacaaaaattagccgaatgtggtggcgggtgcctgtattcccagctactcgggaggctaaggcaggagaatcgcttgaacccgggagggagaggttgcagtgagcccagactgcgccactacaatccagcctgggcaacacagcaagactctgtctcaaaaaaaaaaaaagaaaaagaaaaagaaaaaatatttaaagaaataatggctgaaaaattccaaattagataaaaacaaaccctttgatcaaagaagcttaatgagctcgcttcctctaagcagcctgaggtgatctgtgaaaatggttcactattcatttgtc

SEQ ID NO: 25239 - DNA, 2300 bp, Homo sapien
ttttttttttttgagatggagtcttactctgtctcccaggctagagtgcactggcataatctaggctcactgcaacctccgcctcccgggttcaagcaattctctgccttagcctcctgagtagctgggattacaggcgcccgccatcacacccagttaattttttgtatttttagtagagatggggtttcactatctgggccaggctggtcttgaactcctgacctcgtgatccacccgcctcagcctcccaaagtgctgggattacaggcataagccattgcgccgggccacaaatttttttttaaagaattagctgggcatggtggcacctgtagtggcacacctagcatggtggcatgctaggacctgtagtcctagctactcaggaggctgaggcagaaggatcacttgaacctgggaggttaaggctgcagtgagctgtgatcgggtcactgcactccagcctggagtgagaccctgtctcaaaaacaaacaaaaaaccaaacttggataactgacagagtttaggatagaattacatggaaaaaccaacaaaacaagacaattattaactccagaaaaaactaaaagttgtgtgggaaaggaaaagtaatcatagtttggtacataacttggctgtgactaccgtttacatgattataatagcatatatactgaagattaatcaaacagaatataactatcttgggaagatggagagattaaaaaaaaaggttgggggtgaatatggggtgaaagtgatggagaaaaagagctgaagtctcctctggtgtctcagcactccacccaaggtagagcctctggatggaagaaggaatctcccacctctccaccacactcccccaggatttaccttcagcatcaggtagctaggggcaagatgagaaatgctgatatgctggtctctgactgggagctgtgggaagagagaggttctgagttgcagcagtctggagtggagtctcttgctgaacaaagggagaggtttggtttaaataccacagactgactctcacattctgatccaagagttttcatagattttttggaacagatgtttcttcatttgctgtttgcccttaggaccatttcaaaggctttaaatggttaatggttgtttgttgttttaaataattttcagtttcactaggggtgaatcccgagctcttcatgccgtcctgctgttagtctctcttggtattattcttcacctttcctgtgagtttaaaattatctcaagaaaagttaaagctctttaagaatcacaataaagtagttattaggaataaataaaaacgtagaggggcgcggtggctcacgcctgtgatcccagcactttgggaggccgaggcgggcaaggatcacttgaggccagcagttggagaccagccttgccaacatggtgaaaccccatctctactaaaaatacaaaaaaaaaaaaaaattagtcgggcatggtggcttgcacctgtggtccccgctacttgggaggctgagggctggatggtttgagagcgggaaatccaggctgcagtgagctgtgatggcgccactgccttctagcctgggcgacagcgcgagaccctgtctcaagaaggaaaacaaaaaaaaacaaacaaaaacatacacacaaaaaaccacaaagtgtgttcacgtttgctatgactcccagacaacaattgtaaacactcgcgccgggcgtggtggctcacgcctgtaatcccagcactttgggaggccgaggcgggcggatcacgaggtcaagagttcgagaccattctggccaacagtgaaaccccgtctctactaaacacaaaaattaggcgggcgtgctggcgcgtgcctgtagtcccagctactcgggaggctgaggcaagagaatcgcttgaactaggaaggcggaggttgcagtgagctgaaattgcgccactgcactccagcctgggccacagagcgagactctgtctcaaaaaagaaggaaagaaagaaagaaaaaaaaaaacactcgcagtgtttactcctaacgcgtggaacttgtgtcgacatccacccccggttactgcatactcagtcacacaagccatagcaggaaacagcgagcttgcagcctcaccgacgagtctcaactaaaagggactcccggagctaggggtggggactcggcctcacacagtgagtgccggctattggacttttgtccagtgacagctgagacaacaaggaccacgggaggaggtgtaggagagaagcgccgcgaacagcgatcgcccagcacc

SEQ ID NO: 25240 - DNA, 2300 bp, Homo sapien
gacaactgaccacaacttcactagactctgggccagaacagcccagctaagctgctcctaaattcctcacccacaggtgaggatataattaaattagtaactgtgaagatataattaaattagtactgttgtttttagccactaaattttggagtgatttgtatacatttttaggtaaataattcaccaggtaagtcctttgacctttcctatcggtaaaaggaaaaggcttcttacttttctcctttgcttggcccacaactaaggattaaacaatgaattattggctgggcgcagtggctcacctgtaatcccagcactttgggaggctgaggcgggcagattacctgaggtcaggagttcaagaccagcctagccaacatggcgaaaccctgtctctactaaaaatacaaaaattagtcaggtgtagtggcacgcacctgtagtcccagctactcaggaggctgaggcaggagaatcgcttgaacccaggaggtggaggttgcagtgagccaacattgtgacactgcactccagcctgggcaacagagtgagactctgtctcaaaaaaaaaaattaattattatatcatgtaagaatgaagagctacaaaggaggtgctgatattcctaagtctataatcaataagcatcattaacaaggaaataggagacatgattcacaggttgcaaataacccattaaatagtgagggcaaccagccccagtggctcacatctgtaatcctagcactttgggaggccgagacgggcagatcacctgaggtcaggagttcgagaccagtctggccaatatggtgaaaccccgtctctactaaaaatacaaaaattagccaggcgtggtggtgctcacctgtaatcccagctactagggaggctgagacaggagaattgcttgaacccgggaggcagaggttgcagtgagccaagattgcgccactgcactccagcctgggcaacagagcagaactccgtctcaaattcaaataataataataataataataataataataataatgatgagggcaaatgccgttacaggatctctgggtagctgttatcaggactgtaattttgcacagcctttttgaagagcaatttgggagtatcattaaattttaaatgtgtataccctttataaaaaaaagaaaactctgtgtggtagaagaggcctggacgcactgtcccctagccatctcctctgagggtgcaggcttgtttcgatacccagtgctgaatccaggctgaacaaggagagaacctggactaggactccagttccatcactgctattctattccaaaggactcacacgtctctaatcatggagtatttgctcctccagggggcagaagcaaacagggaaacaccagactcaaagctcttttgtgtacttatctcaagattggttcacttccctcaaaacctctcttcactgataaatgtccttccttatcaaacaaagtccttgaaagaaaacttcaccacattctccctgcccatgctgatatgtaaggcttggacagaacaaatgctgtactgtgccttccagctctttcctttatttgtgctccctggaggttctggctggggaagcccctgtcacatgactgtgagcagacagctgtgtggtgcagggcaaaagaggaaccagccttggaatcacaagatgtgggtttaagtcctagttcctccatctcctcctactagggtctgaatcttgcatggtcttggaagagactgagctataacagcagagaagctaggaaggaaatgggaatctgaggtctggggcagaaaatccttacctaaaagaacagaagaaaaatggctaaagctggaggtgaagccaaaaaccatgcaggtcccaagtgccaataagaatagcaggtctgagcctcagacaagacacagcattgcttaaatatcctgtggcaagggagtcactccacaggcccagcctgaagacattaccgctgacatttcccattaacgtcacaattttcctctatgaggtggtgaggtggagtgggaagggctgttagctggcacttgcaactttattgcgccagcaagaacatgcatacagcccagtctaacgtacaggatcaaaaaggtaatgacagtgtgactttgagtcagtttgagtcagccccagtttattcatctataaaacaagattaaaactaatgcttggccaggtgcagtggctcacacctacaatcccagcactttgggaggctgaggtgggaggatggcttgagctcaggagtttgag

SEQ ID NO: 25241 - DNA, 2300 bp, Homo sapien
catacctataatctgagtactttgggaggctgaggtggactgatcacttgagcccaggagtttgagaccagcctgggcaacatagcaagactccatctctacaaaaaaagacaaaatttagctgagcgtggtggcgtgttcctgtagtcccagctacttgggaggctgaagtgagtggatcccctgagcccagagaggtcaaggttgtgatgagctgtgatcacaccactgcacttcagcatgggagacagagtgagaccctgtttcagaaaaaataaataaataaaaccaccagcaccacaaacaacaacaaaaagttattttgtacttgttttgagcacaggactcctgagggtatctttgcatttaatattacataggggtgccagtgggaagtaatgtgtatgcttggcctcatgagctaaaaccctgtgttaattatgacagaaggaaagtgtgtgagagagatcttaactacctagcagctctagctgccatcttgaaccatgaagatacgggccacacgtaggggtagctgggtagtgagcagcaagaagccttgttggatgagggcacgaaggagcagaatcactggaatcactgtgtcagccctaattacctacctctggacttttatgtgaggggaaaaaaaattgacagtttatatttatctcaacctagttaacccaagtgatgcattgttatgagattaaaatgtttggaggccgggtgcggtggctcacgcctataatcccagccctttgggaggccaaggcgggcggatcacgaggtcaggagatcaagaccatcctggctaacatgtaaaaccccgtctctactaaaaatacaaaaaattagccaggcgttgtggcggtcgcctgtagtccctgctatttgggaggccgaggcaagagaacggcatgaacctgggaggtggagcttgcagcgagctgagatcttgccactgcactccagcctgggcgacagtgcgagactctgtctcaaaaataaataaataaataaataataaataaaatgtttggaatgttggcttcatccctgggatgcaaggctggttcaacatacgcaaatcaagaaacataattcatcacataaacagaactaaagacaaaaaccacatgattatctcaatagatacagaaaaggccttcaataaaattcaacgttgcttcatgttaaaaactctcaataaactaggtattgatggaaaatatctcaaaataataaccatttatgacaaacccacagccattatcatactgaatgggcaaaagctggaagcattccccttgaaaactggcacaagacagggatgccgtctcaccactcctatttaacatagtattggaagttctggccaagaaaatcaggcaagagaaacaaataaggggtattcaaataggaaaagaggaagtaaaactgtgtttgcagatgacatgatactatatctagaaaaccccattatctccacccaaaagttccttaagctgataagcaacttcagcaaagtctcaggatacaaaatcaatgtgcagaaatcacaagcattctatacaccaacaatacacaagcagagagccaaatcatgaatgaactcccattcacagttgctagaaagagaataaaatacctaggaatacagctaataagatgtgaaggatctcttcaaggagaactacaaaccactgctcaaggaaataagagaggacacaaatgaaaaaacattccattctcgtggataggaagaatcaatatcatgaaaatggccatactacccaaagtaatttataggttcattgctattcccattaaactactattgacattcttcacagaattagaaaaaaactactttaaaattcaaatggaaccaaaaaagagcccgtataaccaagacaacaataagcaaaaagaacaaagctggaagcatcacactacccaacttcaaagtatactgcaaggctacagtagccaaaatggcatggtactggtacaaaaacagacacatagaccaatggaacagaatagagaccagagaaagaagaccacacatctacagccatctgatcatcgacaaacctgacaaaaacaagcaatggggaaaagattccctatttaataaatggtgctgggaaaactggctagccatatgcagaaaattgaaactgaccccttccttacaccttatacaaaaattaactcaagattaaagacttaatgtaaaacctaaaactataaaaaccctagaagaaaatctatttaataccattcaagacata

SEQ ID NO: 25242 - DNA, 2300 bp, Homo sapien
attggaaaccacagggggagccccaggctgggacaaataatgactagcctggtcccaacagaacaggcaaagaaggtggtccctacactctttatggtcagttggggccccctcctcactctgctgcagcattctagggtcagggccccaccttccctggaactggggtagtgagtaacccagcctgctgtgctccggcccccctttcccaagaaggttttttttttttttttttttgagagagtctttctctgtcgcccaggctggagtgcaatggcacgattttggctcactgcaacctctgcctcccgggttcaagcgattctccagcctcagcctcctagtagctgggattacaggcatgtgccaccaagcctggcgaattttatgtttttagttgagatgtggtttcaccatgatggccaggctggtcttgaactcctgacctcaagcaatctgcccacctcagcctcccaaagtgctgggattacaggtgtgagccactgtgcctggccaggacttgtctttttcttttctttttttttttgagaaggagtcttgctctgtagcccaggctggagtgtgatggcgtgatatccgctcaccgcaacctccacctcctgccttcaagcgattatcctgcctcaacctcccgagcagctaggattacaggtgtgtgccaccacgcccagctaattttttgtatttgtagtagagacagcgtttcaccatcttggccaagctggtctcgtgatccgcctgcctcagcctcccaaagtgctgggattacaggcgggagccactgcacctggccccaggacttgtctttcttaagcacagaagttctctgaatgatgcctaggacatggaaaggacattttaatacatttgctaatcaaagcatcataaatcttgctttttttccccatagataaaacatctttctaagactctgtacctctttccagagtgctgcacatttgagttagcttaattatagtgtagtgactttgatccaaacttgctggtttaaatcttggctcttccagccgctcactgtgtgaccttgggcaaattaattaacctttctgtgccttagttttcacatgttaaagcagcagtcatagtaatagtatttatcttacagtgttgttgggatggtgaaatgagtaaatatttgtaaatgccctggcacatggtagttgcaatattagtgtgcagtattgtttttatgattagaaataatgtcttcaaagtctcactttcctgctggtttgaatgtgctgtgagaacacatactgtcagttttgcctaccacaaatttgttgagtctcttgcaggtacctccaaatgggcttgtaattcaccatccccacttttcttttttttttcctttctttttctttttatttcttaatttctcccacaaagactgaaagtgaatccccacttttcttttatcttttaaaaattttatttgtgggccgggcacggtggctccatgcctgtaatcccagcactttgggaggccaaggagggtggatcacaagctcaggagttcgagaccagcctggccaacatggtgaaacctcgtctctactaaaaatacaaaaaattagccgggcgtggtggcgcatgcttgtaatcccagctactcgggaggttgaggcaggagaatcacttgaacacaggaggcagaggttgcggtaagtggagatcgctccattgtttatttgcatgtggacataagaaagggttaacatggccgacaactatttcatgagctttttggctttatttgaaaagtgaagtgtgtttggggaaggagttggttaggaaaacagatgcttccctttttgacttaccaaggaaatggagatccaaaggaaagcctgaagcactttgtggcttccacgggttcgtttctaggaagcttttgctttacctggggaaaccccaagctctacagtgagaaagttgtaaattagcctttaggagacgctgtttgtcaaagttatcttaaccctggaaaaggggagggaaaaaggcagataagcagtgatgacatcagcaggaaactagtatcaggctacccagtcctgaagattcagttttcacttaaacaaccagcaagtcttgaagtctcttcccaagcaaatgggagcttctttggaccttggagcacacagaggattctactttctttaaaactttgttttcaggcaatttccctgagaaccgtttacttccagaagattggtggagcttgatctgaaggtatgtaattaacaacccttctt

SEQ ID NO: 25243 - DNA, 2300 bp, Homo sapien
ttaggaagatgaagatgttttggcgatgagtggtggttacacatcagtattaatgtacttaatgttactgaactgtacacttaaaatgatgaaaatggtaatttttatgttatgtgtatttcatcacataaaaaaagacatgaaatgaatcggggaaaatatttgctacataactaagaatgaaggcccttaataaaatctgtaaaactatacacacttttaggaatgaatcaacaaataatttctatgaattagaaaaaagtgacaatccaactaaaaaatgaataagggatataagcaatgtgtttcacagaaaaaataaaaattgacaatgaagttatgaaaaaatgttcagtctccttagtaattgcacaaaacaaactaaaacaatgagacattacccctaagattagtaaatgttaaagaaaaataataattggtgagggtgtggggaagtgggcacttacacctatgtttggaaatataaattggtgcaaccttatagggagagcaatctcacaacattttccaaagacttacatgcacaaccctatggcagagaaatttattcctcttccaggattttttttccttcaaaaacagtgatgtggatgaaaaacacatgttcactactgcacagggtataacagctgaaaactggaaacgataatactcacattcccttcagtaggggaatggttaaataaattttacaagccatctggtagataccaggcatgagctaaaagttagggtccagttagagatggaaagcacaccagtaatttgaaagggaaaatgtaatatgaagaattattaactagtaaaagaaggctaactgctaaaggtacaagagcactcaagctgtctgcagtcagcaggccccggctggtgagcaggaagctgcccgctgggaggctgccaaagttccctgaaggtgagcaccactggttctacaagctgctggcagtcatggcgttaagagcaggaagagaagcaccagaacccggaagagaaatccagtcctctgctaggccttgcaccgtccctctggcgccctctactgacaaagccagtaaaattgtgccgctagcaaaggagatctttttatgggatgtagcttggtgtcaccaaagagaacagagtggacttggagctcagatgcaacacaatgattgatactggcacagtatacttaccctgcttttgtaaacaaaatggtatatgtgatgtctctctttgtctctctgtatataaaacaatatttgtttctacttattatgtatttatgtctttactctgcatgccaggagctaagtattttgcatgtattaactcattttgttctcataataaccttcacatgcaggaatcattatagctactttatgaatgagccgaggaaggcactgagacgttaagtaacttgcccaaggtcacgcagctagtaagtggcagagcaagaattactatggctttataagcctaggaaaaagtctgaaagaatcaaaatgttaacagcggggacctcaaggaagcattgaagaggccatgggagaagttttcactttgttaaaaaatcagtccttcaaataaataaatacagtgaggcttccccagaagcagatgtcactatgcttcctgtacagcctgtggaactgtgagccagttaaacctcttttctttataaattatccagtcttaggtatttctttataacagtgctaggatgagctgatacagtttcctacactgtaacctaaggcaatgctttgcacaaagggatgagccagattgcttagtaattaaaacgcaaatacaaaccacaagcatatccattcatgaattggggggctgctttgtgtgcatagataaggtatattttttaaaaaaattatttttccaagaagaaaataaaccagttaataaacgacaactcacagtgccaggaagtgagaaacaagtgtgtgataaacggtggagaatgggagcactctccgcagtgggcgggaggagacgaggagggcgttccctggggagtggcagtggttggagcaaaggtttggaggaggtaagtcatgtgctctgagtttttggtttctgtttcaccttgtgtctgagctggtctgaaggctggttgttcagactgagcttcctgcctgcctgtaccccgccaacagcttcagaagaaggtgactggtggctgcctgaggaataccagtgggcaagagaattagcatttctggagcatctgctgtctgtgagattaagcactatgtatattgctttattcactcccc

SEQ ID NO: 25244 - DNA, 2300 bp, Homo sapien
cagtgtctccctatgttgcccaggctggcctcgatctcttgggctcaagcgatcatcctgccttggtcttccaaagtgctgggattactggtgtgagccactgcacccacagcctatttattgagaaatgtggaaggcccaggcactattctaagtgctccagctgttttatctcccacagttttgctcagataggagttccaaagctggagctggaagactcatatttttagaaatgttacagttaattctgaggtgggtcagattgagattcatggctatgcattaatgtttaggtggtgactaaccactcagggttttagagacaaacagaccttattctgtcactcactgactgagcgtggccaagtctttcagcctctctaagcctcagtgtcctcatccataaaatgggaccaatcgtagcatccacttctgagaactgttcagaagtggaaatgagctagtttaggtggctgtgtctggcatacgccaatggtttgataagtattagcttgtgcctttattaggccaactcctttttgttaggtgactgagaaaccaaggaccttctgccctttatgcaccagtcactattagtttaaatttgttgctcttccatccacatgattcattccaaatttgaagtgttggagaaagggagttagtatgtcatagaaaaatctctgtttttggctcagcaggactgagtttgactccatgtaactgtctgagtcttagtttcctcatccataacatgggagaacaataccctgaattagagaattctgctgccagaattagagatagttcatgtcaaggtgcaacatataggtaatgtgttattgctggtgttctggttataaaatgtacaagatgtgaaagcaaaagggcagaaaaccctttttaaaaattcatggctgggcgcgctgcctcatgcctgtaatcccagcactctgccaggccgaggcgggtggatcacctgaggtcgtgagtttgagaccagcctgaccaacatggagaaaccctgtctctactaaaaatacaaaattagccgggcatggtggcgcatgcctgtaatcccagctacccaggaggctgaggcaggagaatcgcttgaacccgggaggcggaggttgctgtgagccgagatggcaccattgcactccagcctgggcaacaagagcgaaactccgtcccccgaacaaaaaattcaaatgggaaagagaggcagatggcagagaacaggggaggggctgggcaccgtggctcatgcctgtaatcccagcactttgggaggccaaggcgggtggatttcttgaggtcaggagttcaagaccagtctgaccaacatggtgaatccccatctctattaaaaatacaaaaattagccgggggtggtggtgggtgcctgtagtcccagctactcgggaggctgaggcaggagaatcacctgaactcaggaggtggaggttgcagtgagtcaagatcgcaccactgtactgttgcctgggcaacgcaccgagactccgtctcaaaaaaaaaaaaaaaatgagagaacaggggagggtctagggctcagagctttggagaacagacctcagtagcaccaacactccaggatcaatgctacaaagacacgggttacaactaaactggagaacatggccaaggatgggaactcagcctgagcagggctgagccgagcagggctaagccaagtagggctgagccagaacacttcctccttttttctgaacaatctacctacatttcagctacagggctggctttacccagtccggcgggagggaggagagggctggtctgtgacttcagtgctgaggtttgatcaaggcaaagggaaacttcctattcccagaccctttgcaagaaagaatggcatattacttgccaccgacaggggttattattactaaatggagtcagtataaatgctttccaataaagcatgtccagcgctcgggctttagtttgcacgtccatgaattgtctgccacatccctcttctgaatggttggaaattgggcatctgttcctttaaacaggaaacatttcttgttcgagtgagtcatctctgttctgctttaggagtaaagtttaccctgcagttccttctgtggtgaagttttctctttctctcggagaccagattctgcctttctgctggagggaagtgttttcacaggttctcctccttttatcttttgtgttttttttcaagccctgctgaatttgctagtcaactcaacaggaagtgaggccatggagggaggcag

SEQ ID NO: 25245 - DNA, 2300 bp, Homo sapien
aaaccacaatatttttgtttcttgacttgctctagaaacagggctgtgggggtggggaagcaacttggatctgcccttctgaggacacctctgggtgctgcctggcccaggtctcctgtgtggtttctctctgagccgttgcctctgactttgctactttttcactctgagcagtctccagttcctctgctacctttttgtcctccaagcttccctgccgcctcgaatgcagatacacggtctccctcctgtggacccgtttggagagtccagaagactttatcaatccacttttttttctttttcatttggccctggggccgacggttaagtactttattctgtcattctgtcgaatcacgatgccctgaggtgcacagccccttccccctcttccgtgtctgaagggtttccttttatctctccacccccacccttgccctcctgccctctctcttgttccccaaagacagttctctaatgttttgatgtggattcgtgaatttatctgtatctttgcaaaatgtatttttcttttgtatgtgtacactgttttttaactatgcgatctcaggcaagtaattcctctgtgcctctgttatctcatcattaaatgattaataatgcctccagaggtgactgtgaggcttgaaggagataatacgcatacatcacttactacacgagttagcaattattattgcatattaatactattggtattttattttgctcattctgtttctatttcttttttatttatttattttttgagacaaagtcttgctctgtcacccaggctgcagtgcagtggtgcaatcacggctcactgcagcctcaacatcctgggatcaagcaattttcccatctcagccttcagattagctgggaccacaggcgcgtgctaccacacctggctaattaaaaaatttttcttcatagagatggtgtctcattttgttgcccaggctggtctcaaactcctatgctcaagggatcctcccaccttggcctctcaaagtgctaggattacatgcatgagccacggtggccatccaggcattgatattatgaggccatcttgacctagccctctctggtgaagagtccttttcagatacttcgttcagtcttctcagctatgagtccctaccctctgaaagcttatattctatttggggaaagacaaaaggcagtttcaaagaagagaggtgtttgattttcttttcctacttttaatatcagaaaacatttcatctaactctcagtatgaaggcaatattttgtttactggtatatccctagagcccaacatggtgagggccccaggatttgcttctttgataagatggtaaacccagctttcagctaacttcatggtttcctcagctacactcatatacaaggatcacctttggtaagatggacttaccatcttaccaaagagtttttgcattttagagttttttctttttagatttttttcattttagaatttttttatttcagagttttttctttttagaggtttttcattttagagttttttctttttagagtttttttttttttttaattttagagtattttaggctgctgagggtggaatctggtgaccttggggccacagagatgctccttggctaaaccaggggctttagctctgaaagttcacagccaccctgagaaccaagatgagagggctctgcagtgtccaatctcaagacctctctgaggtgctccatcaagattcattgaatgaaaaaattaaagtcttaatgatgaacccagaaaaatctttaaatcctaaatatgaaatgaaagtgttcttagttacaatccagtccaacgtccttgttttggaatgtggaaatgaggccccaaaggtaaaatggcccatccaaagtcacagccaggggccagtgctcaggtggccaggtgccctgcgtgcggtctcctggaccaccaggcctttttcctgcagctttagaagctttagaaggcactctgctcactcaggggcaagtggtaagcgctctttcccctctagtgtttgtgactcaggagtttcgaaacaggaagtagagctggctggctgtgcccttccgtccttcattagacgtttgctcttgtcttagatgctcagatggtagtggataggcctgtgacgaaggtgctaccatcgtgagagtaaggtaaggatttgcctctttgttaaggtcagaggggccttttgggaggaaggcctttgattctggagttttctaggctgctgagagtgagatcgggtggccctgggg

SEQ ID NO: 25246 - DNA, 2300 bp, Homo sapien
aattacccacctgtttttttgttttgttttggttttggttttgctttttttttttaagagttggggtcttgctacctggggtcttgccacctggggtcttgcccagggtagacctgaactcctgggccacgttggtttattttactgcattcccagggcctagagcaacgattgacacgtgctagcagtatctattggaaattctggccaacttgcaatagacctgattatttctacactgaacatgtctaagatagctattactattcattcaggaaagcccagacaattatcatgccagcagcctgagacagtagccagtaatagcctggtgtggtagtttgctcctgtagtctcagctactcagcaggctgaggtgggaggatggctctagcctgggaggtggaggttgcaatgagccaagattgcgccctgcactccagcctgggtgacagagtgagaccctgtctcaaaaataaaaataagaataaaaaataaaccagcaaaagtttctgccctcacagagcttccattctagtgagagggtagtttgtcatcaggagggtgacgccggtagggctgggggccagctccctgcagggaacaaacatgatcgcagtggggtgggagtaggggatgagtccccagagcctctgtggtttccatttccacacaaaaaaaccactgctgctgtaatcaggagggggaaaagatttttaaaaattttctttcagggaatggaaggaaaggatatttttgaaagtaagactttgaaaactaaaagttttgggtcacttaaaaactcaaaatctttaggtcactttaaaaatatttaatcttggagctggaggccattattctaggtaattagctgggtgtggtggtgtgtccctgtaatcccaactactaggaggccgaggcaggaggattgcttgaacctgggaggcggaggttgcagtgagccgagatcgcgacactgcactccagcttgggtgacagagcaagactgggtctcaaaagaaaaaaaaaaaacgaaaactaaataccgtatgttctcacttaaaagtgggagctaagctatgaggatgcaaagacatacagagggatataatggactttggggattgatggtggggttgaatgggaggttggtcctaataggtcctagtacgtcccctacttctaagtcttccagtctgtcctttgcactttgaatgttaattccaagttggataatgtcattctcatttttacagtcctttcttagctcctcatcacctccaggacaaagcctaaacccctcgccccatggtaatgcggcccctttgtgacatggtacctggctagagcttcatccctttgtcccatcactctccatcccagacactttgtagttactttattgagctccttgtgcctgcctgaatggacttgaaagttcttacctccatcttttacattaattgtttcctgtaagaattgtgctttctcgcattctccccaaaatcccttccccataggaagcccttctcccaggctaagttaaggtttcttcctctacatccctaccacactctggtcacaaccctctaaccattggcttgttttttttgttttttgtgttttttttttttttgtgagacggagtcttgccctgtcacccaggctggagtgcagtggtgcaatctccgctcactgcaacctccacctcctgggttcaagcgattctcctgccccagcctcctgagtagctgggattacaggcacgtgcctccacacctggctaatttttgcacttttagtagagacggggtttcaccatgttagtcaggctggtctcaaactcctgacctcgtgatccgcctgccttggcctcccaaagtgttgggattagaggcgtgagccaccgcgcccagcccattggcttgtttgtatgtctaccttcctaaacagtaagagggaacttgtctggtgttctttttttctctcctgtgctgacagcacaatgaccagtacctagtagttgcagtagcctttgatgaacaagccagcaaatggtacttttcttccttatctgaacataccatttattttgacttagattatattctcctgccttttaaaaagatggacttcagcagaaatctttatgatattggggaacaactggacagtgaagatctggcctccctcaagttcctgagcctggactacattccgcaaaggaagcaagaacccatcaaggatgccttgatgttattccagagactccaggaaaagagaatgttggaggaaagcaa

SEQ ID NO: 25247 - DNA, 2300 bp, Homo sapien
cactgcactccagcctgggtgacagagcaagactccatctcaaataaataaataaattactagataaatgagaggcaatgcaaacaacaagaaaaacatgaaacagaatatgaatgaaaaaaagataatgttgagaaaaaagcaaccttttttaatgcttaatattggtatttagtattcttagagagttagttaaaggtccatgaaagaacaagatgttatgaaaaagggacagaacaagcaagtctccttgaaaattaaaaatttgagcaccaaaatgaaaaattcaataaagtagaagataaagtctaaggaagtaggataaaaagacaaaaatagaaaataggagtgaaagataagaaaatttgaagctaaatcaaggatgtccaatttttgacaataagagttccagaaagaaaggacagagaaaggggaaatggaactttccaagaacgaaatgacgcaatctccagattgaaagggtataatggattaagattcacttccaaacatatcataccctagaagcttctggaaagagaaaaaagtaagccaaatatgtaaagtatcagaaatggaaagtcttctctctagcaacactgaaagctaaaagactgtgaagaaaggccttcagaattctgaggaaaaatgcttttggaaatagaactctataaactaaagactcatacaggggctcaaaaaatgtacttctcatggttatgctccagcaaaggaaactgataagaaagaggaagtcatagatggaggaaacagggaacctactatggaagagacagagagatgtcccaggagaagagaaattcatctggcctatggaacagccagttggtattacagcagaaggatgcagtgctctggatggaaagttttccaggaagaaataaaaatgagtcagacaagtagcctgaaaatgttgaaagattttggccagatccattgagcacttggagaaaaaacagtgttaagcatataggaaacaaagcagatgaaaaaataatacaattacaagttccaggaaaggcaaaaaggttaataagaaaggaaacataatgaaagaacattatgtttacatagtcttaataatagaaatattactatgggccggaggtggtggctcatgcctacaatcccagcactttgggaggccaaggtgggtgggtcacttgaggctgggagtttgtgaccaacctggctaacatggcgaaaccctgtctctactaaaaatacaaaaattagctgggtgtggtggtgcgtgcctgtagtcccacctgcttgggaggctgaggcaggagaattgcttgaacttggggggcagaagttgcagtgagctgagattgtgacactgcactgtagcctgggtgacagagtgagaccttttctaaaaaaaattaaaaaaataaaaatattactatggattcaaccaaaacttgtaaataattgagtaagagcccaaatgcttattctccataataagaactcaatgcgaaagtctaaaatttataaatgagtaattagcagtgtacccaaattcattacaaaatggagctcaatgtggaaaaaagtggttaaaaactgaaagtggttgccttcatggaatgtgactaggtaatggggagggatagagaggggataaccttttgtataaggtcttctagttctatcttattaattcatatcttttattttgctatacataaataattttgagaaggtttaggataaaataagttggatcttttattcaaaaattgttttgtttttttctgattatgtaaataatataatcatttttaaaattggttcagtagtaagcctaaatgatagcttacccatcttgtaaactagtttactagagaaaacagaccaacaataacactctctcctttctcatttgcttcagggtttgagaatgtttttagctggtggcaataaatattagaagcctgcagaatccagctacgaatatagagggttttgctcttgaatttctggttcaaattcttttttttttttttttttttttattgatcattcttgggtgtttctcgcagagggggatttggcagggtcacaggacaatagtggagggaaggtcagcagataaacaagtgaacaaaggtctctggttttcctaggcagaggaccctgcggccttccgcagtgtttgtgtccctgggtacttaagattagggagtggtgatgactcttaacgagcatgctgccttcaagcatctgtttaacaaagcacatcttgcaccgcccttaatccatttaaccct

SEQ ID NO: 25248 - DNA, 2300 bp, Homo sapien
aagtgaggagcccctctgcccggccagtcgccccgtccaggagggaggtgggggttcaaccccccgcccggccagccgcccagtccgggagggaggtggggggtcagccccccgcctggccagccgccccgtccaggaggtgaggggcgcctctgcccggccgcccctactgggaagtgaggagcccctctgcccggccagccgccccgcccaggagggaggtgggggggtcagccccccgcccggccagccgccccgtccgggaggggggagggggggtcagccccctgcccggccagccgccccgtccgggagggaggtggggggggtcagccccccgcccggccagccgccccgtccgggagggaggtggggggatcagccccctgcctggccagccgccccgtccgggaggtgaggggcgcctctgcccggccgcccctactgggaagtgaggagcccctctgcccggccagccgccccgtccgggagggaggtgggggggtcagccccccttccggccggctgccccgtccgggaggtgaggggcgcctctgccgggccgcccctactgggaagtgaggacccctctgcccggccagccgccccatccgggagggaggtggggggaacagccccccgcccggccagccgccctatccaggaggtgaggggcgcctctgcccggccgcccctactgggaagtgaggagcccctctgcctggccagccgccccgtccgggagggcggtgggggggtcagccccccgcccggccagccgccccatctgggaggtgaggggcgcttctgccgggccgcccctactgggaagtgaggagcccctctgcccggccacgaccccgtctgggaggtgtgcccagcggctcattggggatgggccatgatgacaatggcggttttgtggaatagaaaggcgggaagggtggggaaaaaattgagaaatcggatggttgccgggtctgtgtggatagaagtagacatgggagacttttcattttgttctgtactaagaaaaattcttctgccttgggatcctgttgatctgtgaccttatccccaaccctgtgctctctgaaacatgtgctgtgtccactcagggttaaatggattaagggcggtgcaagatgtgctttgttaaacagatgcttgaaggcagcatgctcgttaagagtcatcaccactccctaatcttaagtacccagggacacaaacactgcggaaggccgcagggtcctctgcctaggaaaaccagagacctttgttcacttgtttatctgctgaccttccctccactattgtcctgtgaccctgccaaatccccctctgcgagaaacacccaagaatgatcaataaaaaaaaaaaaaaaaaaaaaagaatttgaaccagaaattcaagagcaaaaccctctatattcgtagctggattctgcaggcttctaatatttattgccaccagctaaaaacattctcaaaccctgaagcaaatgagaaaggagagagtgttattgttggtctgttttctctagtaaactagtttacaagatgggtaagctatcatttaggcttactactgaaccaattttaaaaatgattatattatttacataatcagaaaaaaacaaaacaatttttgaataaaagatccaacttattttatcctaaaccttctcaaaattatttatgtatagcaaaataaaagatatgaattaataagatagaactagaagaccttatacaaaaggttatcccctctctatccctccccattacctagtcacattccatgaaggcaaccactttcagtttttaaccacttttttccacattgagctccattttgtaatgaatttgggtacactgctaattactcatttataaattttagactttcgcattgagttcttattatggagaataagcatttgggctcttactcaattatttacaagttttggttgaatccatagtaatatttttatttttttaattttttttagaaaaggtctcactctgtcacccaggctacagtgcagtgtcacaatctcagctcactgcaacttctgccccccaagttcaagcaattctcctgcctcagcctcccaagcaggtgggactacaggcacgcaccaccacacccagctaatttttgtatttttagtagagacagggtttcgccatgttagccaggttggtcacaaactcccagcctcaagtgacccacccaccttggcctcccaaagtgctgggattgtaggcatgagccaccacctccggcccata

SEQ ID NO: 25249 - DNA, 2300 bp, Homo sapien
ttaaaaatcaactaatgttaaaaattcattaaggaaaagtctcaatttctgccccatcccctgacctgtcagttctacttctcaatgtgctcctagaggcaattattttcaactctgctatctatttctttggaattttatttacctcatacttccaagtaatttgtctgtgctccgtatgttaatttttctttctggtacagcagatgaggatttggctcttatacatccccattccactcattcttcccatgtagtcacagttcactttttggctaagtcactattaagtatttacatttgatacatatgagtgtgtgccatactatgattatgtttactttctcattcaatattttttaacctggagtaattgcacattttattttcttaggtttctatgtttctattgccaatctctcacccacactcccaaatgctctggttctggttgctctgtaacaaagttaccacaaatgtagtggctcaagcaacaatcttacaattctgaaagtcaaagtccaaaatgagcctcactgagctaaaatcaagaggtcggcagagctgcattccttccggaggctccagggggaattcgtttccttgccttttccagcttctagatgctgccccgattccttggctcctggaccttttcctcaatcactcctacttcttcctccattatcacatcttctctgactgataattcaggttaatctttctatctcaagatctttcatttaatcacagctgcttttgccatgtaaggtaacatagtcacactttccagggattaggacatgcggtatagggaaagggacagtattcatcctaccatgtgctcctacacatctaccagctgcctgtcaatatcatcaggtaatctaccagttccaagtcctgcaccctctgggacctctgatgtgtgaattggctccatcttgttcataccctgtctttgcaggcacataggctatagtgagctatggagagagccctagttactatgccaaacatgtacggacatcccttgtgcaatcttgtctcctctcccattttcttgctcttgtggaactaaatctcttttaatgctgtactctaattttagttggattctggaaaagaaagaagataagccagtgtggtcaagccaccatgtttatctgatagttttctttcatcaagattctcataataggggttttgttttttgggagccagggaaggagtttccactctgtaattcaagaaggtgaccaggaatgagaaacgaggagattcatttgcactgtagctcaagcagcagaactaattttccaggaagttctgtgcagaacttgctgtgggaatttctcttcccttcagtgagaactggtgtggcctgctggaaaggaaggagcttgggagtcaaagagatttgtgtttgtttccagctctgcaacttgctgccgccgtgacttctctgagtctcagtagcttcatctatagtatcagcataacaataattgagcagttttacctggctcacagcaaggactcggctatggcaaattttattttattttaattattttgttttatttttatttgtatcttattttattttttgagacgaagtctcactcttcacccaggctggagtgcagtggcacaatctcagctcactgcaacctctgcctcccaggttcaagcaatcctcccacctcagcctcctgagtagctgggactataggtgtgtgccaccatgcccagctaatttttgtattttcagtagagacggggtttcaccatgttggccaggctggtctcaaactcctgacctcaagtgatccatccacctcggcctcccaaagtgctgggattacaggcgtgagccaccatgcccagccagttatggcaaagtttaaattgctttcaagtcaagtctactgagtagaaagggatgagctgttaacctatagtcaagaccctgcaccagatcaacagcttctggaatctaccattgttctttgggtcctccctgggttcttcccaattcttctgtatttttgctttgattctaaatggtttaaccttctgctgttgtttttcaatttcagcaagagcctcctgatctagcagccaagactccccctgacctttggccatgtaccccaaccctctcatctactgcacctgctgggacccctggaacttgggaccacggaagctaatcaagacccctcaactaccacgcaagaactccacagggagttccaagtaagaattatctgggatggggtaggcacagggacctt

SEQ ID NO: 25250 - DNA, 2300 bp, Homo sapien
ccctcttctctccttacacaatactctctctatatgtgatctcactcgctcccttggcttggaatagtatccactctgaagactcctaaatctgcttctaggccagaatcttcctctgaacttctaaaatatgtaagaaactctaacagacgtcaccacttgtctattagtctccctgcacctcaacatatccaaaactgaactaataatctgctccctagaacctgtttatccctccacactttcctatctcaataaatggcaccacggtcaactcaattgctcgagctggaaagccaggaatcatcaccttctccttttcgctcatcccagcatccagtcaatcaccaagttctatcatgtcttctctccatccccactgctgctcctcagtcagggccatcgtcaggtcccatgacgaccactgccacagacttttacctggttttcctggcccttccaattgcttccctatattgcagtcagaatgatctttctgatatgtagatctagtcagatctcttctctgtttaacactgctgcctgactcactggactagaagagtaactcctgctatgaactcccactgcttctggcaagtctcaatatgagtcattgtggctgcatggtgacttacacctgtaatcccagcactttgggaggccgaagcaggaggatcacttgaattcaggagtacaagaccagcctggacaacatagcaaggcctcatgtatactaaaagtcaaaaaaattagctgggcggccgggcgcagtggctcacgcctgtaatcccagcactttgggaggccgaggcgggcggatcacgaggtcaggagatcgagaccatcccggctaaaacggtgaaaccccgtctctactaaaaatacaaaaaaattagccgggcgtagtggcgggcgcctgtagtcccagctacttgggaggctgaggcaggagaatggcgtgaacccgggaggcggagcttgcagtgagccgagatcccgccactgcactccagcctgggtgacagagcgagactccgtctcaaaaaaaaaaaaaaaaaaaaaaattagctgggcatggtgctgtgcacctgtgtagtcccatctacttgggagtctgaggcagaaggatcgcttgagtccaggaggtcaaggctgcagtgagctatgcatgcagcctgcactgccactgccactgcaccgcagcctgggtaacagagtgagctactgtctcaaaggaaaaaaaaattaattatgcttttattgagcttttttattgtctgttttctcattggtctctaagttgtattgagtataagaactgaggtatatccccacacctagcaatagtgcctggcacacagtagacaacaaatgtgaagttgagtgaatagatgaatttataacaatattttgtaagctaggggttgtgacccaccaggatcatgaaatcaatctagtggattataatcagctttaatttaaagaagaaaaagaaatagaagagaatagcaaataataagagtattatttcatgaaatttttttattacaaaatttgtaaaatgtatttcttataatgagtggcagtaaaactaaaatgaaagccactgggttgtaataagcaagtacttttttctatagtaagaaaaagcagctttatttaaaaaaaaaaatcggaaaaccttgtgactgcaaaagattcctgccttgggggatttttactttcacagatttcaaagccttaaactcgagggaaaaaagtgtctagagttttaggtttctgtgagtagatcacagaggaattaaaaatccatcacagatcctgcctggtaactattgccatagaccaatgaagcctaaaagtgctgttgaattctatttcctctgaagatatatcttaaacttttttgtcccatgactgatgacgaaagtggaaatccagtgttaaaagtatgaattctttgctgttgagggtggtcactgatttgtgtcttggagaatttaattggctgtttctcccaaccttctctcttgaagaaaagagccctgagccaatgaggagctactgttctgtgtccatagcaacaaaataaacaaactttggcctgccatctcccaagggcaaacctcacaactcaggcccaagtcacaggaatctgaatggtggggtgaccttctcctctagtttaatttcattgcaatactgagaaacttcaactgttttgtctttagaagggaaattcatgtttgtgccaggccagcctttgtaaaagcctttgattggattcactagaagtc

SEQ ID NO: 25251 - DNA, 2300 bp, Homo sapien
ccgcctcctgggttcaagcgattctcctgcctcagcctcctcagtagctgggactgcaggcatgtgccaccatgcctggctaatttttttttttttttgagatggagtctcgctgttgcccaggctggagtgcaggggtgcaatcttggctcactgcaacctctgcctccgggttcaagcaattcttctgccttagcctccgagtagctgggactacaggcgcgtgccaccacgcccggctaatttctgtatttttagtagagacggggtttcaccatattggccaggctggtgtatttcctttcagtagagacgggtttctccatgttggtcaggctgttcttgaactctccacctcaggagatctgtcctccttggcctcccaaagtgctgggattacaggagtgagccacagcgcccggccaaatgttggttctttctaacaaacctcttccatcatatgaataagtgtgtaagataacaaaacactgtctttcacatggtatgtgcttgctaaatgtctgagacttgctggacattacttaattttaaaaatagaaaactggagctgggtgtggcggctcacgtctgtaatcccagcactttgggaggccaaagcgggtggatcatgaggtcaagagatcgagaccatcctggccaacatggtgaaaccccatctctactaaaaacacaaaaattagctgggcgtggtggtgcgcgcctgtagtcccagctactctgcaggctgaggcaggagaatcgcttgaatccgggaggcggaggttgcagtgagccgagatcaccccactgcactccagcctggcgacagagcgagactctgtcttaaaaaaaaaaaagaaaagaaagttggaataactgctaggatgataaaatgtcttcatccctgacctttctcacctccaaatgtccttcacaatttgtttttaagtgtcatgtcaccaccattaacctgctatttggagactactgtacctcagacttccaagtcaacagcaaagatctaaaggtcgggaagatttacggagaccaagaactgaaagtgttccttttgttcctatggtccattccatcaacttgatgaatatcctgtgaagttaccttttttttttttttttctgacgtagaaacagcaggtctaagcaaaaggtgcatgagcaagagcaagtaacatccctattattatgacgcagatttttttttaagttgaaattcaatttttgggctgctactaaaaaggacatgtgcgaatatctattatttacgcttcaaactaaagtcagccgtttttctttttcaagatatgtggcatctggctcaaaatcaattgcaagaaaagcccaactctatttgacccagaaagagctctttccaataccctctcctcccacttacatcacagatggcgactgaagcttaaggtttaatgcccgaccctaaagccactcatcctaaaagacagggctccagatggatgctgtatggcagaggataaggcgctatgagaagctgccaagcctcagatgtgcagctgggctgaataccgacgccagcgcctagcgcccattactttgcacccacacttaggaaacaacccacgcctcaccgcgggacccggacccagccctccagcacccagcctccggctccgacgtccgcgcgtgacctccgggtaccggaggaccttgggacgaggaggtccctccgctttccggggaagttgtcaagggcaagttcgggttctgcgcggacagcttactcactggagtggttcggcatcctctgtcgtccgcccgcgcttcctcaggaagcccctaatgcagcggcagcctgaaagcagcagccgaagctgctgccgctgctcccactgccagcaaccgcccgggcgtggcagggacaggcgggcgacttcacaacatcatcactcggcgacctcggttctgcggcgacaccgggtcaatggcagcccccacacaattggggaagccaaaggagagccactctcccagcggcctccacggccccagcgcaagacctgctgggaattgtagtttcctgcccgccccgcctcaagctcgaaggccccgccttctcgctgcccagccccggggagggaggcggggccgcgaccccggcgcgggtggggcgaatgcgttcccagcgggtagcctgggactggtgcagagttccaagcccacggccccggtcgcggcctcgccgccctcccgcgccccgcgccgggagcgggcctagagcgctcgcctcgcccctccgcgagcagg

SEQ ID NO: 25252 - DNA, 2300 bp, Homo sapien
tgtatcagcttgaactatgctttgaaaggtacactcaaatgtactgatggcagtacaaaactataaggtttatttggaaagcaggttgtcaaatgtttcaataaccatgaaaatattcatactttttgacccagtaaaattccccggagtgatctattctaaggagatatccaagtaaatgaagaaactacacatcatagtcaatacactgttaatctgttaacagccaagtaatcattacacaagtgtttaatgagtggttaccatgggtcaggcactgtggacacccgctggtaatcagggcagacaagaccctggccacttgtagctgaccttcccacaagcagaagggttatggatgtcatgattaaccaaattttctggttatcatgattttgtatcctgcttttttcactcaatgtcagcaagttgttactgattttgtcttaataatgtgaaactccattacgttgtctatttttttctctttttcagaaaagctcagaagaaacagacacaatctggtaagaattgttagtaataaaagggttgtccctatggggtggtttaatctcagagatttttgccttagatacaccagactattaagagataattttacaagacattttgaggtcaaggcagcagctgcacccagcaaaggggtgggggtgggggatttgctgttattataattttctccggcatgctctttcacgagatatgaatataaaccctttcttaaaaaaaagtcatatttaagagacttatatttcgtattcacaagtacatcagtgcagtcccttacacttgtatccaaaacgctaattacgataaagctttataagtaatttcagtttgttccataatagaatggttcatgtgaagactttgatctgaaagattaacactttctgtagaaaccaaagggcgcatcttctagaacacgggttttgagttaatttaggcattcaacagaggccactgttacagggaatgcaaaaatgacccgatgtaactctttgttgagctttaaaattactgtaattttcaaagtgatcttgggaacccataaaatcttaacaaagatcatagcgacgcacagttcaggagaattttccaagcttagtgactcatgcgttcaacaaatctttactgagcgcctactgggtgccaggcaccgtgctaagcaggcgccgtgttacacatccgtatcaagttttggggaaaaggtacttgacaaagacccagcagggaaaaacacagcgttgaattgaaaaaccgaagacaaaacgacactcgagtatttaattttgtaaaaggttccttcctagtcctgctatgggggactttgcagcgaacttgcagaaggcggcagatagagctggggtctgagggtgtcttcgatatggcaactccccaagcccgagagcgcggccaaaggtgaggggtgcggggagagggcgcccgggcggcctgggccccgcgcacctggcacggccggcacggccaacccggcaggcaccactgggcgggctgcgaacccgcggcccgggccccgctgagcccgagctgcactggcgcagtggctgctcgccacctcgggccgcattcttgccacggctcccgccagccgccggtgctcgggctggaggtgggctagcgcgttctggcctctggcttcccgggcgtgcgcggaccaaggctcactccctcacacgtcccccaccggccccgacaccttcccttcccgggcctgcctcccgtctttaccctagcggcgaccacggccagcgactctcttcaggctgccagcggtgcggacaggggcgggcgccagagccctgctcgcggaggggcgaggcgagcgctctaggcccgctcccggcgcggggcgcgggagggcggcgaggccgcgaccggggccgtgggcttggaactctgcaccagtcccaggctacccgctgggaacgcattcgccccacccgcgccggggtcgcggccccgcctccctccccggggctgggcagcgagaaggcggggccttcgagcttgaggcggggcgggcaggaaactacaattcccagcaggtcttgcgctggggccgtggaggccgctgggagagtggctctcctttggcttccccaattgtgtgggggctgccattgacccggtgtcgccgcagaaccgaggtcgccgagtgatgatgttgtgaagtcgcccgcctgtccctgccacgcccgggcggttgctggcagtgggagcagcggcagcagcttcggctgctgctttcaggctgc

SEQ ID NO: 25253 - DNA, 2300 bp, Homo sapien
gacaaggaccaggactgtggaataggagcagcctagtgaatgtactgcccgccaccagacgctggccccctgctgatagctctgacgactgctgctgctttgtccttcactccgtactccagttggccaagcataggtcgcatgccagggtcaaggagactaagggagagtaaggatctgacctttttgaaataacacaaagtggcaaatgccccaaaattagaaaggagtttcaaatggtgccaattctaaaaaggtaaaaacatgtttacctcagtaaatgactgaggaaggatggttaggggagaataccatatagttcctctgtgactgcaagtgggaacaaggggagagtaggcagtggtaggagatgaatctggaaaggcaggtttggaacacgttgtgaaggacttcatgtggttggatttagaatggcctccacaacctaccctccttattactcagaggatttaaggtggagatttggaattgtccttccgctagagagacattgtggaatcatgatgacaataatagcatctaacaggcattatgctgaacattatgtatttttttctttaaccctttgccactcccatttcgcagatgaggataccgaggctctgagtcatacagttagtgatttgaaaccagatctttctgactgtaggatctaagctctcagctgctgcaggacctgctattgataaaatgccaaatttaaaacaactcaggcaacagtcaggaagatgtagtagatcagcaatgcacaaccagaagtgtcatcttcattacctgtgtcttttttaaaattacagcacctatattccatcacagagctactgaaccagggtttcttgggagtagggccaaggcagaggcattttgcagtagttccctcagtaattctggtgtgtgccctggctgagaattcagggcatatgagggagtcactgcatacatccagggcaacaggacagggctcaaactaagtcagtgatgctgacactgaggggaggagacgaatttgagattaacttcatttcaaaaataaaactgacaaaatttggtgaccatggagagagggaggtaactaatatttattaggtggctgccagcagatgccactctaggtgttttacatttaaaaagctgatgatatcaaatgctggtgagtatgtcaggcagtgacagctcttatacattgtttgtgggaatatgaaatgattcagccacttttgaaaacaatttggcaacttcttataacgttaagcatatgtttatcacatgacccagcaatctcactcgcagatatttgccaaagataaatgaaaacacatgtctacttaaaaacctgtataggaatgtttttggcagctttatagtcaccaaaaactgaaaacaagctaatagccaccatcagcattataaatggataaataaattgtggtatagccatacaattgtttattgctcagcaatagaaattaattgctgatacatacagcaacgtggatgagtctcagaagcatatgccaagtgaaagaagctaaacacaaaagaagttgacaactgtgttctttttgataccatttatgtgacaaaaatcagattggtggttgccagggactgggagtggggatgggattgccgagtagcattccattgtgtgagtatatcgcaattggtttatcaagtcacaattttagtcatcataatagatatgtaatggtgtgtcactgttttaatttgcatttctctatcttgagcatcttttcataggcatattggctgttcctatatcttattttgtggattgcctgtttaatcctctgcctgttttttaattggattgcttgataagtattattaatactttgaatcagtagtgtgccttttcattttcttaacagtactttttgaagagtaagacttttcaattttgatgatgtctaaattgtcagttttttttcttctttggttactaacatgagttttatgtctgattacaggaagaggatttgacaacttgacttctgtccatcttgcacggcatactcccacaggaacactggtaactataaaaattacaaatctggaaaactgcaatgaagaacgcctgaaagctttacaggtaacaatatgaagaaaatgatacacagttgggcctctgtatccactggttccacatctgcagattcaaccaattgtgaatagaaaatatatattttaaaataaataatacaataaaaaatagtacaaataaaacacagcataactatttacatagcatttacatt

SEQ ID NO: 25254 - DNA, 2300 bp, Homo sapien
tccagagggacagaactaatgaatatatgaaatggagtttactagggagaattggctcacactatcacaaggtgaagtcctgcagtaggccatctgctagctgaggaagaaagaagccagcagttgctccatccaattccaaaagcctcaaaagcagcaaagccaacagtgcaaccctcggtctgtggctgaaggcacaaaagtccccaggaggcccttgtgcaactcccagagtccgaaggccaaagaacctagagtctgatgtccaagggcaggaggagtggaaggaagcatccagcatggaagaaagatgaaatccacaaggctcagcaagcaaggttatccctcttctggccgccatctagccgtttggcagctgactgcatggtgcccacctacattgagggtgggtcttcctctcccagtccactgactcaaacgtcaatctcctctggcaacaccctcatagacacacccagaaacaatactttaccacaggagtccccaaaccccgctgtggacccatacgggtcagtggcctgttgggaacccagcgtcacagcagatgagcagcagggtgggtgagcattaccgcctgagttctgcctcctgtcagatcagcggccacattaaattctcataggagcaccaaccctattgtgaactcacacacaagtgatctaggtcgtgctgctccttatgagaatctaatgcctgatctgagatggaacagtttcatcctgaaaccatcccccaccccatggtaaaactgtataccacaaaactggtgccaaaaaggttgggaccactgtgttatcagctatctagacatccttcaatccaatcaagttgacacttaatattaaccatcacacggtgtttctggatcagactaacatttaaatcggtcgactaagtgaagcagattgcactctctaatatgagtggacctcatccaatcaattgaaggcctgaatagaagaggaaggctaaacttcccccaagtaaaagagaattcctcctgcctgaatgcatttgaactgggacattggctttttactgcctttggactcaaactgaaacactgactcttcctgggtcttgagtctgacaacctttggatgagaactacactatcagctcttctggatgtccagcttgctaactcacctggcagatctttggacttgtcagcctccacaatcgcatgaaccaattccttataataaatcagtttatgtatgtatgtatataaaatatagatatattatatacacacatcgattctgttggctatttctctggagtaccctaacacaccccatagtagaagatctgagaagcaccatttcgggccctctatggtccaatttttaaactacacacattcaggagaacctccacacagatttgaaagacctctaaggtctctgtgggcctctcttacggaagggaaatttagaagggggaggttagtaggatgaactatagcccttaccactagagttgctcttagggcctcagcggtcttcatcttctcccttttccactgtccattttaaattctttcactttggtgggtcttggtggcttaacggatggagtaacccaaaccttcattcttgagggggtccagtcaataaacatgaagataattgtgcttgaaatcgcctatggatttgtatattatttgtctttttaattttttagtcctgaggtaatcattttaaaataacttttaatgtaatataaataagattgtataaattaagaaaatcaactgaagtaggtcccagtttaccacacctccaaactatgtattctttttgagacatggcagagtctcttttctaattaggaaatattaattaattaagacctctatgccctcatatgttgtatctcctacaggagcaataaccatacaaaaggccagaatgccttctgcctccatttaatcaaatactcagttgattatagattatgtaaataaatctgcttgagaaagggcttttcttggcaaaacaaatcagaatctgtatattagctctgtcagactatgcaaggaaaataaataaaagcataaactcaattcagtaaatctttattgagctcccacggggtgcgtgaatttaggatctataatttacataagtaggaaagtgttactttagcccccttgtttaaaaaaaagcaaattacaatttctgtatatatttcaagtgaatcatttaatgtgagtgaggctcagttaggtgttaccataagtattaacagaagaaaaagggaaagcacaaaca

SEQ ID NO: 25255 - DNA, 2300 bp, Homo sapien
agagtttcaataagaatttttattttgaaggctgtttcaatgattagaagagcttgatcccagagctaaaaagctgcttatgaatattacactgaatttttactgtaatcctgagttttctatatggttctccctcatccatttctgaggcattatacagtatgcatcaaaaagcaagatgaaactgtgacatgttaaggactgggtggagctcattatcattgttgaaactctcagacttaaaggtagatgatatatgcccccaagtcagtttttagagaatatttatgatacttttcatgagtttcatttcagtacttttcactacttgcttgaattaaaaaaaaaaaatttcctacattgctatgaatgtagcaaatatttaggtaaatgagacttggatcctgatgttagccattgtctaaggaaatgaagctaacaccagaaattgcgttgttaaaaataaactatttatgggtggctttttaagtatttaaaaatattccaagtagcaaaaagcacttggacacaaaatagtgtcagaattaagaatttgaaatttttccattaaaatttttatttcaatttcaaatattttaaaataattaaagttgattttctccctttgtggagggtaggagactgaatagatacattgacagattgctcaaggaaaattaactagaaaatatatgataaattcaaaatcattgctaccaaatgtcttaccttttttttaatattgcagtttcagaaattcaacaagaacggttttgatccttttctaaggaatataaacaaaatgtcagtcagaaaaagaaaagatcaagatatatacaaatatagaaatatcttaggtgcagaggtcatagagcatgaagaccaggatcctccttatccagcacaatcaaaaactgcaggacctgctaatacaacctgggcccatgaccctaatatcttcacaacaaagatgttagaaactgagaataagttagcccctgatcctactatcaatacaataaagggtttagatacaaagaatagtttaaaagaaaatctaccaaatgtatctttaccaagcatcaaaggagaatcatcaagggctggaaatgtacaggcaaacacatgtcacctctcgaagtctttaaattttaccccccatatagaatatttaaaacaatcaatgatactcaagtcaattttaagtgaaaatctgcaagacctttcagacaaattattttctaaaccagaagttagtatgaacagtgaagcaagagagaaaagtagttctccacttctaagcattcatgataaatcatcaagtagtatggaagacaacgtattggaaaaaaaacaagatttaaacaactggctttcagaaaaagacattttaaattcaaagactactttaagtcaaataattaaaaatattcctgcagattcattttcagaaggtagtcaaataattgaaaatattcctgcagattcacttttagaaggtggtcaagtaattaaaaatattcctgaatattcactttcagaagggggtcagataattaaaaatattcctgcagattcatttttagaaagtggaccaggacaatctccagaggtagaagaacatgtctctaaaaaacacttcgaagctgatgagagagattttccaattaaaaaaaatagtagtaccaaaaagaaacatttaataagcgaagtacctaactccaaatcaggttcaagtggcactgtacatgactacattatgaggcaaatattcactgcaccaatattctcagaattggagatagaagtgaaagagccaagtgaaacaccaatgaacttggaaaatcaattacctacaccttggaagagaagtttgtcatcacatattctatttcatgaagaaaatgctgatgaaatagaattgccacagcccagatctgctacaagccagataatacaagcatttcctatagatacacttttagaatctgggataatcaaagtgatagaattagataaagaacaccataagagttctttgctgggtacggggatcacttctcctaaaggaaacctaaaggattcccaagagtattattcagaaatcagaagcgagacagaacctctttctgagcagagtatacccatcattcccaaagacactacttctgttagtagagctgaatttatacaggaagaccaaaatatgttcccacaagattcaagttattattcaatagcaaataaagaactgtatttgccaagaaatggtcagaggctttgtaaagacaaaaatgatc

SEQ ID NO: 25256 - DNA, 2300 bp, Homo sapien
aagagtccaagctagttgctttagagtgcctcacctacattttttaattgtctgactttttcctaatgacatcacttaatttgttcctcaatctcctgaatttcctatagactggaggttaggtctggtggtttgattagattttttaaaaaaatatgacttcatctgtgatgctgtgtactttatgttgcataacatgaaccctaagaacagagtgagctgctggacagcaagtttcatggggtgcagtaattaacacaccacatagtataaatctgaaataatgacaaatgtgttaagggccttgggatattgggccatgtactctgaggagcacaaggtgaggtgcaggttcctgcccctaaagaactctatcttttgagattagcaactaacagtgtgagcccactaataggatgtgaaagttgtcaaaatcaagttctggtcattgtgttaaaaatcctaacaaatagagctggggaaggccgtgaaaggacgattttcatgcacagatgtctgataatgaggactatcattaaaagactgcacaaaaccacaccttgcacaaaggccatcacaacctgacacacacaaaaaatacttctatgaggacatttgcccagcaactccctgtccaatgtccaactggcaacatccttgttattgatccttgtagccaaggataattctctcaaaacaatcatttttgctttaaaaaccgttgtcttccttgacctccctgtatatgcacatagtttactgtggcacttgtattcttattgcaatgcctactcctgaataaacatcattttctttcagagagtctccctctctgttatttaggctgacaaggatatgccaagaagtagcttggatatagcagttaactctgcctttaggatatgtgtatggggatataagagttaactaaaagctgacctttgagttggtccttgaataaaagaagaatagattccaaaaataagaggaataaataatgatcctgagctaggagagtacattttgcagacctttggtttccatattaagaaattcagatttttatgtacaataaagaagttctggaattctctggttttgttctgtttgcatttatttatatttttaacttttaggttcaagggtacatgtgcaggtttgttatataggtaaattttgtgtcatgggggtgtacagattatttcatcacccaggtaataagcctagtgcccaaaaggtagtttttgatcctctcccgcctcccacccttcgccgtcaagtaggccccagtgtctgttgctcccctctttgtgtccatgtgttctcattgtttagctcgcatttataagtgagaacgtggtatttggttttctgttcctgtgttagtctgcttaggataatggccttcagctccattcgttactgcaaaggactaatacgggggcagtgaaagggatggatgacagcaggttggcagacccatgagtaaatcattgcaattgtctcgtgtgtgtgttgtcccaaattaggtgccataaagggaaaaggtaagtaagattcagatatttagggtcagaattttaaaatgtgtctgaatgtttaagattttgtggatatgacattgctgcaccaaatgagtttggaacctactagaggtttaagagggaagatgaatattaacgtgttatgtgtctgtggaacaattgggtaaagatgtcaaagtagactgttggatatttaacgtctggagctcacgggacagtgtagaggaagtaatgactgacactgtaaatcttctagaaagaaatggtgcagggagaaaaggactcgtgagggctacagggcggacaagacagtgaactaaagtggttgggccccatgaggggccttgctctccaccagcgtgctctgatttccttctaaaggagactgaaatggcctggcaagtgcttgcagcagaccctccaggctcgctaagcacgcatgcttccaaagctgcctccagccactcccagcatgggcccggcctgagtgggtcactaggcggcacgcacgcgctgggaaaatgtgagaaaggctgcgggagggccgcgcctgcgcagtagcgggccgtcggttgggcgcagacaggccgcagaagatggagagatggagccaccccaagagacaaataggcctttcagcacacttgataaccgcagcgggcaggtccaagtcctgtccgccaccccgctattgcagaggaatccctacagcagcccggatatcatgcacattaaagggtcggaggcttcttcggt

SEQ ID NO: 25257 - DNA, 2300 bp, Homo sapien
aactaatgaaattttatagatcaagtttaattttctttaggatgttttaaccccaaaggaatgttgtccaaagtagtctagttagatgttttatgtggcctttgtaaattagataattttgtcatgcgtgttaagtatacactgtagctacttaaaacctagtaatagtatatgtgctagcattagactagagaaggaaaaaactatagtcaagaaagtaaagttttgttaagtttacaactgcgctgtgacaagaaacttttatattttctaggattgactttgctaaaatatcagtagcaatccgaaattttttggccctggatcctacagctttagcatctttctgtgagtaagcagtttaacatgataactgtgtaatacttcagttataccataattttgaaccaggataaatataattttttttaaaagttgtattactgctccttataaacattacctatagatgttcagtgaatttgtaattagaaacataaaaggcataatattgatagaattattttttcaattgaggttcatctaaataactttgaaaagcttaatttattgtactatattacttactttttaacttttgtattttctacttgacattaaacagattcagcgggtatggccttttaataacaaacaatattttatatctttctgatcatttggaatgcattttgttctaagttttgagaatattaataaaactagttttaggaccttgagcaagtcatttaacttttaaaaagatgttctaggttcttgtcagttctaatgatgaaatagtgaacgtctcaaaagatccttctgcacctattgttctcaaaaatttatataaggatgtctggcctattgaaatatatttatttggtcaaataaatttcttttatatcatcagtcatgaaagtatagattattttcgatattaatctataaattcaaaataaaccaggttgttaaaaattattagtaatttcatttgtctttttctcagtgtactttactgctcttatactatctctgagtcagcaaatgacaagtgacagaatccacctttacacaccttcttctgttaatggtagcctctggtaagaattcacaatgacattagcaattgttaatggcaataacagcaacttttcttatccttccattctttttcaactgcaaataatgaaggctctgtttttgtttccaaatatatggcaagaaaatacttattcctttggttaatgggtaactattgttatgtccacctgcatttttaatgaaatatcttccttttaaaaatctgttttagatcttcaagttatagtttttttttttttcgagatagagtctcgctgtgtcacccatgctggagtgcaatggcactatctcggctcactgcagccaccgcctcctgggttcaagcgattctgcagtcttagcctcctgagtagctgggattacaggcacccgccatcatgcctggctaatttttgtatttttgtagaaatgggcttcaccatgttggccaggctggtcttgaacttctgacctcaggtgatccacccgccttggcctcccatattgttgggattataggcatgagccactgcgcccagccaagttatagttctaaaataagtcatcatatgatggacggaaggagccctgcattcttaccccctgtcagggagtttcatatcccagaacagtgatgggagtgagtagctgggatagattcagaaaaccaagcaatgctagaaagagcggaacagggagagccaacatctgcagatcagcggccagccatgaagctgacaggatggctgagattatagttcataaaacttagagaagcagtcttttttttttttttttttttttttccccaaatgctgcacgtagcatccaaaagtagtcttttttgagagagtggctagggacattaggtaaagagaaagcaaagatactttattgaggattaatgtcatggtagttggaaggaaaacttttagagaattttcttgggaatactaactttgcatttatatgaatgtatacagcagatctgttcagagtttaaataacctttgaacccttgttctcattatatatgtggtatattttacagggaaattatattttctttcacactttacttgttatttctctaggagaggactgctgttttttcttaaagttcataaaatagatatatttgtgtatatgaaccaaactgaaggcacttctaatgagtgtttctacatttttagggaagcaggaattgaggaacagat

SEQ ID NO: 25258 - DNA, 2300 bp, Homo sapien
gtttgcagtgtattttagctcaggctgctataacaaaataccaccgactaagtggcttaaaccacggacatttatttctcatagttcctaaagctaggaagtgcaagacaaggttccagcagattaggttactggagaaggccccttcctggcttgccgacagctgccactgtgtcgtcatgtggcagagagagctctggtgtgtcttcttcttcttaaaaggattataatctcatcatgggagctttatcctcatgacttcatcgaaatctaattacctcccagtgacctcgcactcactggggggttagggcttcaacatatgaatttttgggggacgcattccgtctataacacagtgtttaagaaaaacctactcaaagcatgatcatgactatatactaccatggatatgttaagcatatgctgcctaaagaactcatctgaaacataaaggttagtccttaaaatttacaatttagattttgtgtaccttgttttagaaccctacttcagaagatcccatttaagggatcttgcagttcttggccaataagaaacctgtggtctagagaggctgacttacccagtgtctcacagtttggttagggtggaactgggacttgaactgtggttttatgacttctagtcacatggttttattcatctaccacgtggtcatttaaattaccgcagttctttttcaagcagtatcacttaatcctcatttttattcttgcttcacttagcatagaaatttccctgctagagtaactggccataaaaggtaccagtggttctattgtctgcccagaagttgtcttttcttagggaaaattgtcacacccctgtctttcatcctccaaaacacctgcgaactgggtttggtgaggataattgaaatggaacctttcctgtttcctgaggtctatttgtggattactagatatacaagaaggagcctctgaatcaacagtaaaaaggctaaagccctgctcatacaatattgcagtgctgacttttgaactgatgttcttcacaggaatgttctaaagagaaatttatgaagcagcctatttctttcctgtcatcccagaaagccatgctacacatcctgacatcttttcctaagaaatttaaagtagttttcaaatattgacttaccttgatagtataggcatataaactttaatacttctaaagtctctaaattagaattttgtagactaggtcatgttaaagatttctagactttattctgagttgaaagttcatttttttttattaaatataattgatttctgaaattgttacttcactttggattgagaagaaaatacactgacatcgcttatttttcttcaagatgaaaaattatgtttaaggaaccccaagaaaagatccttctgaaataggtactgagtcaaggagaattttcagatagaacagcaatatttcagtcttagtttgcggcttcctgagtatggaatttaaaaaaaaaaatggctaccagggttctctctcgctagttgttagtaattacgttatgtgttcttagggagattccaggctgctgatcgttcagagttgataaagaccacagaaaacatagatgtgtcaatggacgtgaagccttcctggaccaccagagatgtggcacttacagtgcaccgggctttcaggtggctgcttttgttggacttttcttaaaataaatgttaactgagttctgtaattaaagaaaaaaataacctcttggttgttcagtattattaatgaaatcacaacttaaaatggtaggtaggtatattttttaaacatcctattggaattgagtgatctacctatcagtgtaactaaaaagaaagagcttgcttttacttgtcatgaaatgttgaattttattcttgtatatgaagagattttaaacatgttttagctttttactttagtaattcatgtataataatcaaacccttttccattcaggatgattggtctcttttctcatggattcttggctggctgtgctgtgtggaatattgttgtgatatatgttctagcaggagatcagctatccaacctctcaaaccttctgcaacaatacaagaccctagcgtatccattccagagtcttctgtacttgcttttggctctgagtacaatttcagcttttgacaggtaatgcctatgactccagatctgtctaacttcttcaggaggaaatgctgagcaaaatgtgtcactgaccatgatagttttcaaaatagaattatagagtatcaatgttacttcaaaaa

SEQ ID NO: 25259 - DNA, 2300 bp, Homo sapien
gtggttacctattttaacttaattttttttcctttacctcatatgcagctgtggtagaaatatgaataatgttaagtcactgagtatgagaacctttcgcagatttcacatgatctttttaagatttaaataaagagctttcctaaataaaataagcaatagttaactttagaaactgtactctatgaaacgtgttttatgaaaacatcttttacaaaaagtgcttacttgactaactcagcaagaaaggtttaatgtacacatttcacatctaaaatcaaaacctacaagaaactgcactgccttcactatttacaaatcggcctacaaggaaaaaattattctcatgagaggtgtgacaaacactaattttccttaacagccaatatctacatgcaggcctaaattagaaaaaggcaatggattaatcccagagacctatatatagaaaatcacaagagtgaaaccgtgtctcagagttaaagaaaccagggactaacagaaattcttgagcatgcaggacggcagataaaaaacaacttgctaaataaaacgcctaaacttcttccattgtgagattaaaaaacaaaacaaaacaaaacaaagcaaactggctgaaagtggttagtactaacacggatggctacctggagtctgtacaaaatgagcttgctggcgtcacagcttgaatctttccccatgtttcacactgactccctccaaaatttgcacatgcgacccatgaagggacatgaagaggtaactgcgaacgccagaggattttccagatggcttctttccttccaccaatcacctactaatcccagaatccaccccctaaacgttttctaataaaaatactgtcttaaagccaacacagggagacagattagagctatactcctgtctccttgttagctgactcacaatgaaaacttttctcaaaaaatcagcgccataatattggcttctgtgcgtatagggcaacaagccccgtttgtttggtaacaagattaggatgccattacaaagtgctgtttctctttctttccccagatttgagatttccaggcgctttccctgtccctgtatctgttcatcttctgcatcattctcttctccatatccacaccattcttccatctttcccatttctttcttaactgtaaaacagaatgcatgattcaaaatatttgtagttctctgttacttaaagtgaaagttatctttaaaaaaaaacaaacccaaccaaaccaaacgatgcaaatcaggtagtttgtagtgatatttatgtgaggttggatttgattttaaggttgagaaaaagtttttccaaatttgatttacacagttgtgggatgaagggtaagcaatcggagaaaatgtgagaattgcctatattaatacacatccacacacccaggcctgcacagactcgttggtcctggagagtaaacgcattcctcccaaacccagcagcgcctggcaggacagaggcgggcggggacctggctcagggggcggctgcctcgccaggcgccacgaagccccggcgtcccacaggtcccggaggccgctgcgtcgcggggagctgggctcgggccgccggcggttgcgccggggcagccccgcggggagagcaccatgaggactgactcgggggctcggctggaggagggccacctggtgagcggcgaggggcgcgtcggcctcgagaggtggcgggtaaacagctacacttggcagtgggggtgggtgtgtgtgggggggcgccaacgagctgggaatcactaagggagggccttgctcgtggggtgcgcgcatccgcccctccagtgttcacaggaatgggacggagacgcaggcgaggccgggaccgaactcccggagtgggagagagaggcctggcatgaagtttgcggggacctgagcccgcgttgccacgacgacgcctcactcatctgaggcccggggcccggcgggtgccggggcttccagccaggcctctcctagactcctccgaggagaggtctgtagctgcccagaagagatctgttcgcctgcggagtcctttaattaaggtcttccgtcacgccccgcttcccgcaaacaaatcaccgccaccacttaggaaaccacgggaaagctgtgattgcagcgccacggtcgccagatttctgctcctgggcacattacccccaactccgaggccccctttttggcagggctagtctggactggccaatccaggtccctgcacgcctctcaccgcaacatccccgcagggcgctgcgcgcggg

SEQ ID NO: 25260 - DNA, 2300 bp, Homo sapien
ttttgtagaattttgaaaaaatatttttgaaactttattgaaaatcatctgtgcaaaattttcggaccttactgtttttatacatagtttcacaactgaatgtgacagcataacaaactgtattttttccatttgtccaattaagtctgtactatccatatttttctatttctcctaaaggatgaagacctacaagagatggaaaatttagcccaaagaatggaaactcagtttggccaattttttgatcatgtgattgtgaatgacagcttgcacgatgcatgtgcccagttgttgtctgccatacagaaggctcaggaggagcctcagtgggtaccagcaacatggatttcctcagatactgagtctcaatgagacttcttgtttaatgctggagttttaacactgtacccttgatacagcgatccatagttgcaatctaaaacaacagtatttgacccattttaatgtgtacaactttaaaagtgcagcaatttattaattaatcttatttgaaaaaaatttttattgtatggttatgtggttacctattttaacttaattttttttcctttacctcatatgcagctgtggtagaaatatgaataatgttaagtcactgagtatgagaacctttcgcagatttcacatgatctttttaagatttaaataaagagctttcctaaataaaataagcaatagttaactttagaaactgtactctatgaaacgtgttttatgaaaacatcttttacaaaaagtgcttacttgactaactcagcaagaaaggtttaatgtacacatttcacatctaaaatcaaaacctacaagaaactgcactgccttcactatttacaaatcggcctacaaggaaaaaattattctcatgagaggtgtgacaaacactaattttccttaacagccaatatctacatgcaggcctaaattagaaaaaggcaatggattaatcccagagacctatatatagaaaatcacaagagtgaaaccgtgtctcagagttaaagaaaccagggactaacagaaattcttgagcatgcaggacggcagataaaaaacaacttgctaaataaaacgcctaaacttcttccattgtgagattaaaaaacaaaacaaaacaaaacaaagcaaactggctgaaagtggttagtactaacacggatggctacctggagtctgtacaaaatgagcttgctggcgtcacagcttgaatctttccccatgtttcacactgactccctccaaaatttgcacatgcgacccatgaagggacatgaagaggtaactgcgaacgccagaggattttccagatggcttctttccttccaccaatcacctactaatcccagaatccaccccctaaacgttttctaataaaaatactgtcttaaagccaacacagggagacagattagagctatactcctgtctccttgttagctgactcacaatgaaaacttttctcaaaaaatcagcgccataatattggcttctgtgcgtatagggcaacaagccccgtttgtttggtaacaagattaggatgccattacaaagtgctgtttctctttctttccccagatttgagatttccaggcgctttccctgtccctgtatctgttcatcttctgcatcattctcttctccatatccacaccattcttccatctttcccatttctttcttaactgtaaaacagaatgcatgattcaaaatatttgtagttctctgttacttaaagtgaaagttatctttaaaaaaaaacaaacccaaccaaaccaaacgatgcaaatcaggtagtttgtagtgatatttatgtgaggttggatttgattttaaggttgagaaaaagtttttccaaatttgatttacacagttgtgggatgaagggtaagcaatcggagaaaatgtgagaattgcctatattaatacacatccacacacccaggcctgcacagactcgttggtcctggagagtaaacgcattcctcccaaacccagcagcgcctggcaggacagaggcgggcggggacctggctcagggggcggctgcctcgccaggcgccacgaagccccggcgtcccacaggtcccggaggccgctgcgtcgcggggagctgggctcgggccgccggcggttgcgccggggcagccccgcggggagagcaccatgaggactgactcgggggctcggctggaggagggccacctggtgagcggcgaggggcgcgtcggcctcgagaggtggcgggtaaacagctacacttggcagtgggggtgggtgtg

SEQ ID NO: 25261 - DNA, 2300 bp, Homo sapien
tctcaagaggcctttccatcttgttgctgcctctaccagaatgtgcctgtcctctgttggaaggggaccaacccttaaaaatccgtttatgttaaatactttgcatttacattggagattgttttgagtttctgaacaaacacataaataaccacatttgcctggtaaagccaaatttacagaatttctgactctgggcgggggtggataatatgtggaaatggacaaacaaaaactttgagacaaattgacccattgagaagatttccaatgatgataggctgtctctgttctaagaaaagccatgttacaattcgtccttttactggagtcttgaatgaaactgttcagttactttggattcttcctactatatgcttttcagatagcatattaaagttataaattttgaagtgtattggaagaaaaaccctaaatctccaggccaatgtttgtaaatagaagtccttggcactcctgcagcagtttacaatggtcattcacatgcgtaatgaatgcttacagcagcccaaggatgcaggtgttatccccatttccccccatttttcagacaagcagtgaccaagatttgctcactgccagagctgggactccagcctagaacttccctactccctacttccctagaagtccagtgctttttgctactacagctgccagagatgtcatttcatagctggttatgtattgaaagttcttaaaagtgagttaaaaatgaaaatcttattgaaatcaagtgcttttcacaaaatatgctgtactcaaaacacaaatgtatcacattcccaacttgtgttttcatctatgatggagagataaggaaagccatgtgattaatatgggtagaagggctgaggaccctctgataattgccatttggtctctaccttttgccttgctgtcagcaataccttcctctcctttctgcaatatccccttccaaatgctctccccactgagcactccctgcagtattaagttttcagataaagaagtagctcctatctgagacagaaagcactatttgttaggttcagaacagtggcttgggaggggattgaccagaaggtactgtttttgatgggtttctattattagctgaacagtcttcagttgttttctcaccataacatgagagatttaataaggttagtaggttattggcttatttccggtcctgccacatttttttctttcattaaaaatgctatcttctgttgtggaatgtctgtcatcttgaactaatcaacaaaaatactatgtttttctgccgttaactatgtgttggcaatttgagagaaaatactagaatgtaggtttgaaaatgatacaaattagacttcaaggaatacttaagaagatttgtggcaggaaaggcttgtgagtaatttagttgttaggctgggttaggcatctgtggattacatcaaagaggatgtgcagagattttatcgggagcagtgaggtgactttggcagctaacaggccactagtatcctactaaagcttttgtctggataggagcaacatgcatgtttacagtcttgcaggtaagagaccttggcaaataatcctcagttaccagaagatgtatccataactgcctagcttgcctgtcagtttttaatagctaaagatataaatctgggtaatctaactcaaatggcttagtttcattttaactcaaatgatatggggaattttatgatcttgaaagagcaggttttgcttcgagaagccatttcttcagtatggaataatgagttgtcaggaagattgagtacaatgggcatttgccctggtcctaatcaacagcatttggacccagaggaagccagctatttttgtaagggccatttctcatcattaagtttccaagtgcttttttagggtttgtctagtaaaaagcactattttgaaaaacaagcatagtaagggtagggggttgtggcatttaatagtacgttttaaaaagctaatggaaatacttttaaaacaagatttaggacaaattccttaggcatcagtcacactaatgcatcttctgagtcaagaactggctatcctttctgtgtactcagtccggaattgcatgtggtgggtgcttacttatttgcagtctcaatcaagaattctcactctcaagatagcagaaatagataagcttcaactgacaaatttggtacagaagtcatggaaaggaaggtaagtcttttgccaggcatcatgccaggcatcagcatctttcaggactaaggaaacaaaagaggaaaactcga

SEQ ID NO: 25262 - DNA, 2300 bp, Homo sapien
gtaacactagtagctgttttgaataacataggtgctcttcctcatctcatctcctacaccgtggtgagcatacagagtgtcctgatttgtgttaagtgactgagaagatgttaattacttttgaaaaaggatcatggtttttgctctactttataatcaagacaagtgtttattaaaatactgttttggaatgttggctgtaatgtaacagcaattttcataataaaaggcattcatctttatgtggttgttttatgattgtagaagaaatgaacagggcagcctaaaagatgaaaggaaacccagacttagtatttctttagcccacattgtaatccatgcctctaagtattggcctcaaaagtccctctggggttttagaaatctctgtctttaaaataaacgtaaaccaatagttatagcaccctttctagcaaagagcaaattaactttctgaccccaataacccaaggacacgggtctccaaagaaatctattatttctttgaataaaaagcatattttgatagttactcgttattttttttcctcctaaacagatcgagggaagggaaggtgaggctttaaaattctgcttagaaacgttagatattaattatctcccagttgtaatgttttctcaagaggcctttccatcttgttgctgcctctaccagaatgtgcctgtcctctgttggaaggggaccaacccttaaaaatccgtttatgttaaatactttgcatttacattggagattgttttgagtttctgaacaaacacataaataaccacatttgcctggtaaagccaaatttacagaatttctgactctgggcgggggtggataatatgtggaaatggacaaacaaaaactttgagacaaattgacccattgagaagatttccaatgatgataggctgtctctgttctaagaaaagccatgttacaattcgtccttttactggagtcttgaatgaaactgttcagttactttggattcttcctactatatgcttttcagatagcatattaaagttataaattttgaagtgtattggaagaaaaaccctaaatctccaggccaatgtttgtaaatagaagtccttggcactcctgcagcagtttacaatggtcattcacatgcgtaatgaatgcttacagcagcccaaggatgcaggtgttatccccatttccccccatttttcagacaagcagtgaccaagatttgctcactgccagagctgggactccagcctagaacttccctactccctacttccctagaagtccagtgctttttgctactacagctgccagagatgtcatttcatagctggttatgtattgaaagttcttaaaagtgagttaaaaatgaaaatcttattgaaatcaagtgcttttcacaaaatatgctgtactcaaaacacaaatgtatcacattcccaacttgtgttttcatctatgatggagagataaggaaagccatgtgattaatatgggtagaagggctgaggaccctctgataattgccatttggtctctaccttttgccttgctgtcagcaataccttcctctcctttctgcaatatccccttccaaatgctctccccactgagcactccctgcagtattaagttttcagataaagaagtagctcctatctgagacagaaagcactatttgttaggttcagaacagtggcttgggaggggattgaccagaaggtactgtttttgatgggtttctattattagctgaacagtcttcagttgttttctcaccataacatgagagatttaataaggttagtaggttattggcttatttccggtcctgccacatttttttctttcattaaaaatgctatcttctgttgtggaatgtctgtcatcttgaactaatcaacaaaaatactatgtttttctgccgttaactatgtgttggcaatttgagagaaaatactagaatgtaggtttgaaaatgatacaaattagacttcaaggaatacttaagaagatttgtggcaggaaaggcttgtgagtaatttagttgttaggctgggttaggcatctgtggattacatcaaagaggatgtgcagagattttatcgggagcagtgaggtgactttggcagctaacaggccactagtatcctactaaagcttttgtctggataggagcaacatgcatgtttacagtcttgcaggtaagagaccttggcaaataatcctcagttaccagaagatgtatccataactgcctagcttgcctgtcagtttttaatagctaaagatataa

SEQ ID NO: 25263 - DNA, 2300 bp, Homo sapien
atggctaattattagtaagcatctctaactaccttatttaaaattgcaaactcctttcaagcccccttcactccttatcttctctctccaaagggcctatcaccatcgaatacactatataatttactcactttgtctattgtctgtcctccttactataatgtaagattcagaagggtagggattttaggctatctcattcactgctgtagcatagtacatactttataaatattttgatgatatttgatgagcatagtacatactttataaatgtttgttgaattaacaccctcatgtaggaatattggaaagtacattttactatgaagtttcctgactgcagccgtagagccctcgaggtgaattagaaatagagtagatgaatttctaactattaagtgggaagtaacaatgcaagagcctgagataggctcatggcagaccatgagagacccaacagacaaccaacagtgttctgtttttccctgcttcacttctccacttttaatttaattaaattaattaatttatttttttgagactgagtcttgctctgttgcccaggctggagtgcagtgacacagtcttggcccattgcaacctctgcctcctgggttcaagcaattctcctgcctcagtctcccaggtagctgagattacaggtgcccaccaccacgcccagctaatttttgtatttttagtagagacggggtttcaccacgttggtcaggctggtcttgaactcctgacctcaagtgatctgcccgcctcagcctcctgaaatgctaggattacaggcctcagccaccttgtttggccttaattttatttcctactgtttacctactgtttatcccctttttatttgatctgctttcccactctgttttcccttcttttttgtaaactgaaaccattggcttatttctagctttcttttccccataaagtaactcacattctcaaagtgacatgctgcagggaaattaacccccaaaactagtatattctaggatttcttatttttattaagtaaaatagcatatgggcttttttttttagtctttgtgtttgtttttctggctagtaagttatgaatgtgtggggacaagatctttcttgctaaaggtaacattgggaccaagtacaatggttcatccctataatcccagaactttgggaggccaagactggaggatcacttgaggccagttcaagaccagcctgggcaacatagcaagaccctgtctctaccaaaacaaaacaaatttaaagattaaaggcaacattggccaagatgtgtctgtagttgccagtcctggctttacattccccatgaatgatttcacagtctagatagacgatcaaataggctgatgaaaggaatgaagctctcgtgtgtgtctttggttaccatgggatgttaatagtgcattgggtctgtagcttgcctgcctgatttaatgggatatgtgaataaagacatggaatgttttttatacagtggtatctggggtaaatgacaaaaagtccctttttaagaaaatctcttttcattgtacaaaaggcaggttaattcttagatcctagatattttaatatatagcatagagatcctccctggtctcattaatcttattttactcggaaagtggtcctgagacatgtatccctatcatttggatctttatatatccagggggtctgtttccaaacagttgtaatgtgaaatgaaaggtatcttggagataattgaaagtaggtgtgtatagttatgtatagatctggatatgcatatataacaatgatgtactgatgaaccagctctaaaaaaaagcgaccccgacgacccccccaaaaaaaaccctagtctgtggtgcttgcagattttcactatggccaattttcaagctgccaatggtttaattacttgcttgcaaattttctgaatatttaacagttagctcttgtcagctgatataagccagcttcagtataccaaattagtaacataattatatgttatatttaatccttttgttttcttctgtttcagcttggatatataagcagagtgacagcaggaaaagatagctatttagccttggtggataaaaacattatggggtatattgccagtctccacgagttagctactacagaaagacgattctattcaaaactaagtgatatcaaatctcagattctcaggcctcttctcagtttaggtaagttgcaaccccctctctcccaccattaaaccatcaggtctttatctcttcttcctatgtcacaaa

SEQ ID NO: 25264 - DNA, 2300 bp, Homo sapien
tggggggaatttgcattttatacagaatcactttcctttttcaggtcttttcttgatccaggagagatttaaccaagagtctgacacattttaaggtcctataacatatgctacctggaagcttcatctacgtaacaagaaccttggcttctataacccccttcattttaactcaaatatttctttctgctaacttcaactctttaggaaaagcttagctttttcaacccatcataaagtctctgaatccacctataatctgtgagcaccaccggccccccatgtattgatctatgtctttgcctataacttctgtctctctaaaatgtataaaaccaagctataacccaaccaccctgggcacatgttctcaggacttcttgaggctgtgtcccaggccatggttactcatgtttcgatcagagtatatttaacctcttcaaatattttataaagtttgtcttttttcatcaacagaacaaagtctttcctttggggagattagggatcctgagttcaggatcttctaagaagaaagagggagaagaaaaggactcggtgaaaaggagccggggctcggtggctcgcgcctgtaatcctagcaccttgggaggctgaggcacgtggatcaattgaggtcaggagttcgagaccaggctggccaacatggtgaaatcccatctctactacaaacacaaaaattagccgggcgtagtggcgggcacctgtaatcccagctatttgggaggctgaggcaggagaatcgcttgaacctgggaggcggaggttgcagtgagccgagatcgcgccactgcactccagcctgggcgacagatcgagactccctctaaacaaaacaaaacaaatcaaaactggttgcaggtaggttttgtggtagtggctgatgggatttgggatttaaggaaattcacctctagtggtctcactttcctcagagatgtaagagacaaaattttttatttttatttttaccaaagcgggtgagtgagtagagttcagtaagaggttagaagagcgtgagggctgggaacagcaggggaggggaataggagataatctgagtagcaatgtgtaaatgtgactgtcttaggctcagcaatattgcgtagtcgcacgtggaagtcccgactgaagttggacacttttcgttcgcagtggtgccaattctcagggttgtgtgattttctgcaccgatgcaggagtgagcaaggttggttgaactgttgcagactaacagttttgcaggtgggcgaaggatcagggaggaaattgagttgagggtgttggtgaataggatataggagtttcagaacccgactacacatctgtcgttgatggtctaaatatttgcatgtttgcaggtccagcgatggcacaatgcctagcagcagaaggtttgcacccactgtgcgacatgagtggcagctctggaaaatcataaaatcatgggaggacttgagagtgcaggctgggtggggtgggactgtggctgcgaaaaacagtgttatgaaactgtgcgcgggacaagaaagctgattttactgattgtatattggggagtactacgggaatcactggagaggccacttcattttctcctatcccaccccatcttttggggttgcaactaaccagtaagtttacacattgaggatacaatggcgaaacggggccgcgaggcgatgacgtcattcgcgggagtaggggggagaagcgaccactgttagggtactgtccataaaggcaatttgaaaatatttcagcctttttacttttatacttccggcccttgcagtttgaggtggtaacaaacgactgctgctcccaaccactttcaccaccgcctgttaccatgggagcgctcgggtagctaggcttggacgactctattctacgtcatcatcaaagcgcatctcaggactgatagctccgccctaaactaagggagagactgtgctcccaagtacgtagcctgcagtgcctaacgcattctcagcaattttgacccccaacagacgccgtcgacagtctcccaagaacaattcccaggagctcggattccaagagccgcccgcgccctcgtttaccttcgctagtcgccctgcagccccgccctgtccggaggccccgccctccatgaatcagctgatcccgcggacccactgggttgccaagctcgcgccggatgcggagcgcggtgctgccggtggagcttcaggtgagcgagtgtgggtcccgggttggctattggctaaggagggcttatcggctgggacccc

SEQ ID NO: 25265 - DNA, 2300 bp, Homo sapien
ggaggattgcttgagcccaggagttctagacaggtacgcggtgcatgcctgtgaatagcttctgcactccagcctgagcaagaaagcaagaccctgtctccggaagaaaaaaaaaaaaaagtagttaattctagtatctaaacatagcaatttacacctttaataatcaggctataggccaatgctgtggctcacgcgtgtattcccagcactttgggaggcaggaggatcgcttgagctcaggaattggagacaagcctacgtaacatagtgaaacctctgtctgtacaaataataaaagaattttccaggcatggtggcgtgcacccccagtgccagctatttgggaggctgaggtaggaggaatgcttgaagccaggagttgaagacaagcctaggcaacatagtgagaccctgtgtctataaaaaataattagctggttgtcttggcacaggcctgcagctagctactcggaagactgaggtgggaggatcactgagcccaggaggctgaggctgcagtgaacagtgatcacccagctggattccagcctggaagacagagggagaccctgtttccaaaaaaaaaaaaaaaaaaaaatgcaagaaaagacatcataaacttgacctgggacataacttttatgtgatgaaattcacaatcttttaggaagaaattagcatttctgataaaatgtattataattatattattataaattcaaatggaattaaatattctgagaaactagcttctcactctctcagttgtcagtcaaaactttaatggtctttggccgggtgcggtggctcacgcctgtaatcccagcactttgggaggccgaggcgggtggatcacaaggttaggagatcgagaccatcctggctaacacggtgaaacctcgtctctactaaaaatacaaaaaattagccgggtgcggtgccagacgcctgtagtcccagctgctcaggaggctgaggcaggagaatggtgtgaacccgggaggcggagcttgcagtgagccgagattgcgccactgcactccagcctgggcgacagtgcgagactctgtctcaaaaaaaaaaaaaaaaaaaaagttgaatggtctttgagccaagtagtcttccttttcttcttcttctttttttttttttttcaaaaaatatctctagattgaatcttggaattggcttaagtctcttctcttgtggcaattttgaaatgaaaaaatacatgctcataattaaattacctgaacattttaaaaaaccatcatgaggttcaaatatcaaatattcataaatattgttgtgataatagacataactcttattttttcccttaataatgattgtttatatatcctccattctgtctcactttatgattagtatattatagtggcaataatcttaggaatctaacagagaaaagtgttgcatttgaagactacagactgcaaaccaatttaagccagattccttgacatgttgtgctgttaatatagtactttacatatagtaaacattaattacatatatgtggaaggaagcaagcaagaaaggaagaaagtatttcattcaaactcctctctctccatcaccattggctaatatcatcatttgtacagttaagaacaacataggtgctcaccacatagtttttgaataaatgaatgaatggcaacccttctaagactattggatacactattgtttgaaggcaaagagatgcagtagatattttcaacttttttcctgttttatgattctgtggtttctttgactactaaaagttagctaggtagcaaatttgttttaaagtctgaaaaccaaaatgctttcagataaaaggtagggagaaaaatactcctcaacatgtccactttagcaccaggaaaacctaatatcaatatcaccatcaatgatatcatataaatatcattgcatagataagcaatgtcaatccctaaaaactatgtataccaatagcactaacttgtggccagaacaagaaccttaactgtgccaaattttattctattcaataacagctgcctcgttttcagttgtgcacatctgaatgcaagcaatccctgtctgatgtggagtttcttgcactgataaggaaaaactgctgaagttgtgaggctgctccaggcagagccatcatgtgagtcatatgaaagctccacgctgctgacctctggcaaaaagggagagaacaaggataggagaggcagtgggggaaaggttcaagtgcgggttttctccttgaacctacaagattatgggtcaag

SEQ ID NO: 25266 - DNA, 2300 bp, Homo sapien
agaaaaaaaaaaaaaagtagttaattctagtatctaaacatagcaatttacacctttaataatcaggctataggccaatgctgtggctcacgcgtgtattcccagcactttgggaggcaggaggatcgcttgagctcaggaattggagacaagcctacgtaacatagtgaaacctctgtctgtacaaataataaaagaattttccaggcatggtggcgtgcacccccagtgccagctatttgggaggctgaggtaggaggaatgcttgaagccaggagttgaagacaagcctaggcaacatagtgagaccctgtgtctataaaaaataattagctggttgtcttggcacaggcctgcagctagctactcggaagactgaggtgggaggatcactgagcccaggaggctgaggctgcagtgaacagtgatcacccagctggattccagcctggaagacagagggagaccctgtttccaaaaaaaaaaaaaaaaaaaaatgcaagaaaagacatcataaacttgacctgggacataacttttatgtgatgaaattcacaatcttttaggaagaaattagcatttctgataaaatgtattataattatattattataaattcaaatggaattaaatattctgagaaactagcttctcactctctcagttgtcagtcaaaactttaatggtctttggccgggtgcggtggctcacgcctgtaatcccagcactttgggaggccgaggcgggtggatcacaaggttaggagatcgagaccatcctggctaacacggtgaaacctcgtctctactaaaaatacaaaaaattagccgggtgcggtgccagacgcctgtagtcccagctgctcaggaggctgaggcaggagaatggtgtgaacccgggaggcggagcttgcagtgagccgagattgcgccactgcactccagcctgggcgacagtgcgagactctgtctcaaaaaaaaaaaaaaaaaaaaagttgaatggtctttgagccaagtagtcttccttttcttcttcttctttttttttttttttcaaaaaatatctctagattgaatcttggaattggcttaagtctcttctcttgtggcaattttgaaatgaaaaaatacatgctcataattaaattacctgaacattttaaaaaaccatcatgaggttcaaatatcaaatattcataaatattgttgtgataatagacataactcttattttttcccttaataatgattgtttatatatcctccattctgtctcactttatgattagtatattatagtggcaataatcttaggaatctaacagagaaaagtgttgcatttgaagactacagactgcaaaccaatttaagccagattccttgacatgttgtgctgttaatatagtactttacatatagtaaacattaattacatatatgtggaaggaagcaagcaagaaaggaagaaagtatttcattcaaactcctctctctccatcaccattggctaatatcatcatttgtacagttaagaacaacataggtgctcaccacatagtttttgaataaatgaatgaatggcaacccttctaagactattggatacactattgtttgaaggcaaagagatgcagtagatattttcaacttttttcctgttttatgattctgtggtttctttgactactaaaagttagctaggtagcaaatttgttttaaagtctgaaaaccaaaatgctttcagataaaaggtagggagaaaaatactcctcaacatgtccactttagcaccaggaaaacctaatatcaatatcaccatcaatgatatcatataaatatcattgcatagataagcaatgtcaatccctaaaaactatgtataccaatagcactaacttgtggccagaacaagaaccttaactgtgccaaattttattctattcaataacagctgcctcgttttcagttgtgcacatctgaatgcaagcaatccctgtctgatgtggagtttcttgcactgataaggaaaaactgctgaagttgtgaggctgctccaggcagagccatcatgtgagtcatatgaaagctccacgctgctgacctctggcaaaaagggagagaacaaggataggagaggcagtgggggaaaggttcaagtgcgggttttctccttgaacctacaagattatgggtcaagagctgtgtgcaaagactgtacagcctggatgcagctgctaccattgttcagagggaggcgaggcacacagctgtcggaggagtcagcctgagaccacggaggct

SEQ ID NO: 25267 - DNA, 2300 bp, Homo sapien
agcaaaacaacaatttttggttttcagtttcccagacagtgaaggagagatttagtaattttctcaagtgaaaaagaattcaataacttgcaaatagaaactgagatcaaatttccaaataaagtatattgaatttttgtttaaacttttaaaatctcaagcttaaagctttgaacataagattaaaaaaactttttttagtatccattttgttggctttagttaaatatcatacaaagtaaccaaccatctggtaactttcaccttagagaaaacatgatagtggttgtcacctatttcttctattgttttctcttcattatctttgctttcttttcactgcactttgccagccaacagaggatgtatgggtacatgtgactcacacccacttgtttacacatgcatctgtgcaaatacataagatggtaggttaaaaaaagaagaattagtttcttgtcccctggccttctcccacaaaagaagaattagtccagttggtttttcaaaatggattccaggattcttagtgttccctcgggctcagggtggttgataggaaaagcctataatcctctcagtcacttttcagtttgtttagggaatggatcaaagaaggaagattttactgggtggcatgatttttttattatatgagggaaaatagcacttcactgtcttttgtttaaagacaagcttaacagatgctaaaaagtacatctctcagccagattcctagtcaacaagctgatagacactaagattctggattcttcattgattatattcagtcattgttgggcaattgactccctgccataataattgggccagtatctataaccagcattttacagatggattcgctagactctttctgtaagagatgtttctaaaaagagttatagtgagatatgcttctaagaaaagttatactgtagtagtgtaatgaaagctactagtgttttattagtatttcacaagaacaatgttactctgtctcccatatataactgtctatgggcttttatgattattctttaaaaaaaaaaaaatactaaggtaatgcctaccggggaactcatggtgctggcttcatccaaagtctgagctgttttggctttatactccgaaagactttattttcatacatcttaactaaaaactggggctttaaattggtcattcaaggccaggcgcggttgctcatgcctgaaatcccagcactttgggaggccgaggtgggcagatcacgaggtcaggagattgagaccatcctggccaacacggtgaaaccccgtctctactaaaaatacaacaacaacaacaacaaaaatagccaggcgtggtggcttgcatctgtaatcccagctactcaggaggctgaggcaggagaatggtgtgaacctgggaggcagagcttgcagtgagccgagatcgcatcactgcactccagcctgggcgacagagcgagactccgtctcaaaaaaaaaaaacatcggtaattcaaagcatagaccagccctttttcaagtgatgttgttcccatgacaatccatcagtgaaaaaccaaataccatattccaagctgctagtcacagagaaaacaagcagatgagatgaatgtaatagaaaagactagagttagttttggggtcatctttagccaacattccattgcctgaagctcagtaatctgaatcctttttaatttgagcacatcagggaacagctgaatacccatgctgaggcataatttaagctgtcaagtgtctcctgtcaatatacatgtggtcatctgatgcaaggcaaagagacagtcactcctgcttctttatatccctagctcccaacatggtgtcctaatgcatgataatcatgcagtaaatgttcagtgatgagaacatgactttgagcaaggctgtatgatctgcctcagaacaagtgagtcagtaagaatgcaggccccggaccataggaatgtattacagttttgcccaagaaaccacaaacgttggaaacactcaagtttctttctcgtatacatcagctggtgtcatgcaatgggacatacatctgacgcttccctgttcttccctgatttgtcctgcatgtctccatacctcttccatccacctcatctccccacctcacctttctttttctttgtttggctttatataggtgctgggagtccctacagaggatacttggccgggagtctccaagctacctaactacaatccaggtaatattgatctgagcttctgaatactctgagaattagtaatgtaaggaga

SEQ ID NO: 25268 - DNA, 2300 bp, Homo sapien
agagagagagagagacagaggaaagaggaggaggaggagagattgattgattgatttttttcttttccttctcaacatgtcactttcctgcatgggaattcctgatattcctggcagcccggagagaggggagaggccccctggtgacttatgacccccgcaggagtaaccagagagcgcgcgcgagcgcccagcgcctggctcaagacgaagatttaaccgagaacaaaagaacgtttgccaatcagaaaacgctacccgagaacgaggataaccccgctttgtgttttgaaaactctttaattagcctggtttctaagacgcattaaaacattcctacgcagattctaaatggaggatcaaatggttgcttctgcaacgaagatgggatcccgaaagggcacacgccgcagaaccaaggcacacggggccactgagacgcccggcgcgtcgtacagagtgttcctgggcgctcggtctcaggttacttctagaaccagtctccccaacgccgtcttcgtttccttaaaacctcgctagagtcaccccagttccccagactccaggccgtgcgcgcgggcggggtggcctgagcccgggttccccgctctccctgcttcgggcccttcctccgaggggtccttcctcccgccgtcactcggccccctccgcccgactcgggtttctcctcggaggcggcccctcctcctttttataactcgggggaggggagaggggactgtggcctcgcgtggactctttgggtccggggggaaagaggcgatccgcaaggcgcacccccttctcgtcccgtcccaaaccccacattgaggacccggcgacccgaaagccccgccagagccagcctttgcagtcctaacgcgactcctggtcacgtctctccccgaaggggcgctgcgcggtcctcgctcccctcaaacgccgctggcgaaggcgcccctgctcaggaatgcgcatctgagtgcaccaggaagaggaacaaatctttgaagcaaattccctttctgcgcgttttcgtccctgagcgaattcagggtaaaagtttttccgaacttttccctcccagtcccccgcccctcccctcaggaatccgcccagagcgccgcggacaccgcctccgccactcccgcgcccgccccttccgacttccgcccaatccgaaggcggccaccgaaaaaacaaaggccgccattgggccgccggggcctggggccgcccccggagtggtttgtgaatggggggggaggggaggggaggggaggggacgggaggggacgggagggggcgggccggcccggaaccccgcgagcccgacgcttcttctggcgaccagcgcgactccgaggcgttagtcggcgctcactcccggcgggcggcggcggcggcggcggcggcgggcgccaggactcgctgctggggctgcgaggggctggaggggccggggccaggccgcgggcacgagcgcctcgcggtttcggacgcagtgtgactgggtttccaaaaagaactcgccgtgctcccgactccggggccgagatcggactcagcaagagccggccgtttggctgaaacttggggccgagcttttggggctgaagaaggagcggggtgtggaggaggaggcgaaggaggcggcgacgagcggagcctcgaggccaggaggcggggcagcaccgcggaggcggcggccggggcgagcgagcggcggcggcaggggttctcctagcggggaccggaccaggcgcggggggcgtgcgcgctgcggtgcgccgggggtccagagtcttgggcaaactttgaagggtgccggagccgcttgttgctcctcgcggcggagggagccgcaccgttacgtccccgcggggagagcgaggcggccctcctcggcgcccccaacccaggctgacgagttttgggcccccggcggccctgcgagtgcagggcggcggcgtctgcggcgccttcgcggcgcgggcacccaggcggcagcgccctttgctccacgccgcccacggcccggccccggcgccgtgaggactctcatgcgtcgggcgcggcggcgcctccccgcatccaagcctctcccaaccgcctcgtcgcactcctcaggctgagagcaccgctgcactcgcggccggcgatgcgggaccccggcgcggccgctccgctttcgtccctgggcctctgtgccctggtgctggcgctgctgggcgcactgtccgcgggcgccggggcgcagccgtaccacggagagaagggcatctccgtgccggaccacg

SEQ ID NO: 25269 - DNA, 2300 bp, Homo sapien
attcatattgttgtgaatccaccttcagaactttttcatcttctcatactgaaactctgtacccactatacactgatgttccattcccctctccctgacagcccctgtcaattaccattcaactttctgtctctgtgaatcagaccactctaagtacttcacataagagaaatcatacaatgtttgttctttcatgattggcttatcttgtttagtgtaatgtcttcaaggtacatgcgtgttgtagcatatgtctgaatttccttccttttttttttttttttttttttttgagatggagtctcactctgttgcccaggctggagtacagtggcatgatctcggctcactgcaacctccgcttcccaggttgaagcggttctcctgcctcagcctcccaagtagctgggactacaggcgtgtgccaccacacctggctaaatttttatttttagtacagacggggtttcatcaagttggccaggctggtttcgaactcctgacctcaggtgatccgcccacctcggcctcccaaagtgctgggattacaggcatgagccatggtgaccaactgaatttccttccttcttaaggctgaataatactgcattgtatgcatatgctacattttgttgattcattcatctgtcgatggacacttgagttacttccaccttttggctcttataaacagttttgctctgcatatgagtatacaaatatctctttgagaccctgctttcacctcctttaggtatacagacccagaagtggaattactggtgatacggtaattctgtttaattttcttagaaactgtcataccatttcctacagaggctgcgccattttgcatttccaacagcaatgcacaaggttttcaatttctccgtatcttcaccaaatacttgttattttctgtttttgtttttgttttttaataatagccatcttagtaggtgtgaagtggtatctcattgtggttttgattaaattctgtttggagcctctgcattcactcattcgctgtcttgattccccctaataaaccctattttattttacaacagaacctctatttctttctcaggagacttgaacttggttgggggtggaggggtcagagggggaggggaaagtgccacataggaagatcaaaaaggtaagtgggcttgtagcctgttgtgcttcttcatataggccagcagtgggcactcccacaagactgccagggtagttcagctgacagctaacaggcagcttgcttttccaggcttgagcaggttcctagatccccagcaaaggggtctttttgtttcctgaccctcttccctcctgtctgtgctcgtcacaatgtcactgttaaagagacccaagcatcccaggctacacagtgcttctcaaagcaggtgctcctggcattctagtgggacagttcatcactatgtgggaatttcacaccatgtagaacatttagcatctggggcctctgcttgatcaatgccagcaagacccccaatcattgcaacaaccaaaatgtcccccacccacatttccagagcacccccatcaggggatagcttgcccagttgagaaccaggtatgcaaaggaagctagagaatcccagtgtctcccgctcaggcaaagcagcaactaccataatgaggtctcgtgtccagttgaggggatgatggagctcagccaaggaaaaagtcacaggtggttttaggtgacctagattacaccctggctctgttaatggttagttgacagtgacaggctcacatatcaggagagaggggaagacgctctctaaaaacaagatgagaacaataacagaaaaagtaccccaacaagtcccccaccccatgcaactgggacttgcaacctgagcctggtcccttcagtgtccatttgacccccacccccatccccggggaatgcacactgcacccggcacccgtctctgccttgcctgggttagtttaagggacttcatttccctgtgctgccatagcaaccaggaaacaacctccgctcagacaagaaggatggtgctgtggccgagatctgtagatgcacacggctggtaacagagcaaccgggaccaagggacaacaagagctcaggagaaggggagagacaggtcgcccagagagtagacaatccagggcttgaggaggctggctgtgcggtttattttttctctccacaaagacacacactgtctaaactgtgtggctggttgttactaagaagctgctgcgagagggaaaaatgtatttaataaaaggccctg

SEQ ID NO: 25270 - DNA, 2300 bp, Homo sapien
ctgggattacaggcacccgccatcatgcctggctaatttttgtatttttagtagagtcagggtttcaacaactcctgacctcaggtgatccatcctcctcagcctcccaaagtggattacagtcatgagccatcgcgcctggccgcaagctattattcttgacatgtttcttcttcggaagccataaagtggtgatgatgccaccttttcagctacatatgaggtagggaagtctttatgtttctaggaatcacaagaggtttctgtcaaaggaaatgaaggagagtccctactgtgttttagtagctccctactggtggctatcaggacaccttccagagtgggctgtgaggccttactggtctcactacagtgagggaaagaacactgcttccttctgaaggctgggacaaatgcagctatcacagcctgcccttctacaatctctcaacactgtggtacgtgtgatagacctaacttagcgccatgccaagcctgatgggaatctcctgtaatttttgtaaggagagctttttagtcagggttcagcccagaacagaaactgcccaaatatttttaagaagaaacagagttactatacagtaactgcctcttatcatgctcagtcttcatgagctcagtgcccagagctttgatgcttctgcctcacttctgctctccaaatctcatgcaagcacatctaattggcagaaaataatttgcatccagctccctagctgcaaagattatctgggaaatgtagtttttagccttctagcctctgtagtacaggaacacccactggaaggaaatgctgggtgcccagagaccatatccagccacattttcctttactcaaacatttgaccagagatcactagtactggtaacacctgccaacattatttctcatgagggttatgaaaaacactgaaaaggcacaaggggcagtgtacactataaccacgtggggctcctatcttcctgtatttcttcctatccagagatggatggattgtggactctatgattcagaactgatgtttagagaataaaaataataatagtcacaaatgattaatggctgaaatcctgtttcaggatttagacacaagaactgctccaccgagagaatctccttggggaaaggggcatatttagaaacatgccatgttaggagaaccttagaaatcatcagtttagcattttccaaagtttgccaaaaactttttagatccacatgatgctttaccaaaaacaaagggattcagtgatcaaataagtttgggaaacagtgcatatccccatcctgaagaaccacggtgcacatcagcatatcggaggctctaggaagtcctgcggtaagggatctgcttaactttggtccactggtttccaaatgtatctggccctagaacctttccttttttacacaatgcctgttaaccttctgaggaattggagttcgacgggacatgtgctgtgaggactggatctaataccaactcctctttttccatatgaggaagctgaggtccaaggcaatgaagttatttgcctgtgatcacagaaatcctgggcagtacaggtgggaataaaaccagagttttttcttcttcctcacatggccttatcaaaattaattgtcctcccttacatctctcggcatcatcagtaaggtaacagctactaagagatgggctacttaaggaaaatcatactttaaacagtaccccaccaacatggaaggattcttttacccgtggggtcccacaaccaacttatcacaaaggaaaaatgggagaacagtcacttagcctatgtttacccctaaatgatcagtgttttcagaccagctgggatattcttagactcatctttctgtcaaccaaatcacagaccatcacaaaatgacaccaagaatactagttatctagaatactagttatctattactgcaaaataaatgatcctgaaacctaaaacaataaacctttgttatgcctcagtttctgtgggaatcttggagtggcttaggtgtgtggttctggtgcagccttttgtgaggtcacagacagagtgtcagccagggatgcagtcatctgaagacttgactggggctggagaacctcctctcaaggcaactcccacacaagcctaggaagttcattctggctgttggcaaggggcttctgttccttgccatgtggactgcttgccataggctgcttgagtggcctcatcacagacatggtggttggctttccccagagtgagtaatccgagagagagagcaagga

SEQ ID NO: 25271 - DNA, 2300 bp, Homo sapien
agttagagctcccagggggatgtcttttgcctggagacttattcaggcctccagcaactattccctacgcccatctcaccctcctcctcattcaggaagatttaaagtgaaaatgtgtagcataaacaggatcttaaatctcgtcccaagaatttgataatgacaataccaaaaggccatcttgggtcttagtctcctgcattaaacaagcagactcaaaatttattataatactacaaacactctgtaggtcataggtgtcttgagtcacatcatataaaataaagtatttttagatattcttaaggaaaggtcagaaggaccaaaattatccttccttttatggttaagtttatactggggagaattttttttttttaataatctggaatttgcatttgcattttccatttatgaccaaaaaaacacaaaaccatgaagtgactgaggctgactttcaggccttctcccattggttcctgctggggccagcaagtccctgtgcaaagctatgagaaggcaaagatgctttctgagacctgtttggcaatggatatatcccctccatggtgatgaaacattgcaagttatggggtatgttccatgacagcatgttagccatcaaagggtgtgcatgcctcagaaatgatatacatagacaaaggccctgaacggatttaaagaagctcctgccagcacctccaacagctactgcccttgtaaccactggatatttggccactttggaccctacgggtgtgatattctttcccaaaccctgacatgtatctaggaaggagccaggtggcccgcctggcctaataaggtgactctttggagctgatctctattttgacaccagatggggcccaaaagagggtcccataccaaggcaaatatgcatcctgaaacaatgggaataaatatgactatgtttctttctttctttcttttttgagacagagtttcgctcttgttgcccaggctggagtgcaatggcacgatcttagctcactgcaacctccgcctcctgggttcaagtgattctcttgcctcggcctcccaagtagctgggattacaggcgcccgctaccacatctggctaatttttgtatttttagtagagacagggtttcaccatgttggccaggctagtctcaaactcctgacctcaagtgatccgcccgccttggcctcccaaagtgctgggattacaggcgtgagccaccacgccctgccgactatgtttcatttttattgaaaacaacaaacaatgacctgggaattaaacatagccaatgcagatttaaatagaaggaaatgttaaggagccatattccctgctagaatcagatgccctttcctgcttttcaagttttgagtgtttggtgaaggagtccatgatttgaagaaggcagaagaggcttgggatgagaaccccatctagtaagggtcatctctaaaactgcctgattatctggtgggaatgctatctcctcactaaaagcctgtggttagattaatgctagcatttgaaaatctgctaaggcctgatggtgggcagccaaggaaggaatgtgttttctgtttatctctttagtggcagaaatgttcatcacagaaagactgtgaactcccagtttcaggcatgcctggaagttgtgcagcctatagtctgtataacctgtatacactgtaaaaactggaatgtgcacaccagtttctgaatgacaaaaaagaaccaggcctttgtttgcagccagttacctgggttggtcgatgggttaatcagtttctttgacttgataacagtttctttgacttgatcttgccgcatcgttctgaaaggaggttttaccacccccactgttctgtctaccaggaatgcagtttgagttgtgtctcctccttgacagcttggacctcagtaaattaccaaggtcttgacccaagagatggagaagtcctaagtgatttttcagtctcctatctaaaaatgtgtttacatttcttgaactctggctgactgattcattctcctggtgttgcaagaactttccttatgcattagaattcataagtttcatttctaagaggcccatggttccttccaagccacagtgtagtgaacctcatcacaacacaattctgctgggctggatttgtcccaagtgtggatcatggccaaagcagctgtgatgtggcaagctcattgaagctaacgggaggcagtgtgatgtggaggggaaagtgcaagacactaagtcaggacatctgggttctgggtcctggtcttgtgt

SEQ ID NO: 25272 - DNA, 2300 bp, Homo sapien
tctcctgcctcagtctcccgagtaactgggattacaggcctgagccaccaagcctggctagcttttgcatttttagtagagatggggtttcaccatattggccagcctggtctccaactcctgatctcaagtgatctgcccgtcttggcctcccaaagtgctgggattacaggtgtgaagcaccacgcctgattgttttttttttttgagacaaggtcttactctgttgcccaggctggagtggagtgggatgatcttggcacactgcaacatgttgcccaggctggtcttgaactcctgggctcaagagatctgcccacctgggcctcccaaagtgctgggattacaggtgtgagccacggtgcccggcctccttgtgtgtgtgttttttggtttttttttttgagatggtgaccaaaaaaacacaacaacaaacaacaaacaaaaaacaaaacgaagtcattcttttgcatgtgaatgtccagcagtggtagtaccaactgttgaaaagactgttctttcaccattgatttgtcttggtgtttttgttgatgtaaatgtgagggttattgatttatttcaggattctcaattctatttgtttatattcttatcctccatgagtatgcccgtagggccactgtgtatgccagtagggccattgtgttttacagaagaaatctaagaagaatcattcttttttttttttccattaaaagtcatgtttactaatctagcaccacaattcgtcttagaacctcccatgcagttggaaagggaatatgggaagaggtgagtatgttggaaatgtagggtagttctcaaattgaggccccattttgcttgctctaaagccaaaaacacagggtctagcaaagaggagcccagaggctggagatgaaaacaaaagcttttggttcagatggtaaaggaggccctcaagagcagtagaatcagtatatcccgaaggcagtgctggaggcattctcatgaagtagggggtttcttcttggcatccaagtcctttttaatttcttcaagttttttagccaggtttggtatgtcatagttctgagccagatacattccaaccacgttgcccaatgtaaatccaagcaggaattggagcatgatgttggtggggagggcgaggagggcgcaaagggctgctgcagctctgcaggccggtcagagcctgcttccccatgcgaggggagcggaatcgccccccccgccacctttttttttttgagagggagtttcactcttgtcgcccaggctgcagtgcaatggcgcggatctcggctcactgcaacctccgcctcccgggttcaagcgattctccagcctcagcctccctagtagctgggattataggcgccagccaccacgcccggctaatttttgttatttttagtagagacgtggtttcaccgtgttggccaggctggtctcgaactcctgatctcaggtgatccgcccgcctcggcctcccaaagtgctgggattataggcgtgagccacagcgccctgccaagaagaatcattctttaaccttaactcaaagcaaccaattcaagggttggaattactcactccccatttagaactttcagcagcggtctttagcatcagtagccgtcaagattgtgttgggtcgttgctttcttgttgttttaaatcacggtcatgtgtttggcaagggtgctggttaaccgaaaatgttggttctagagctagaagtactggcattcaaataaacatatttgggggttgggggttgatgagcaaggctgggaggagacaaaagaagtatctcggctcagtcgtcagagacgcgcaaggtgtaacggagagagcaatctaggttgtgagagtggctccaaacattgagacatggagccaggacctttgctcctgggggatggccctagtactgatgcgcaggacctggtccttgaaggagctgacaaaactgccgttcacccgcgcgaccaccggcaaagcagctccacagcctgcccctccccttggctgctcccccacccatttcccgccttgtctttcctctcttctctctctccctcctccctgcgcgaagcggaagtgacgcgaggcgtagcggaagttactgcagccgcggtgttgtgctgtggggaagggagaaggatttgtaaaccccggagcgaggttctgcttacccgaggccgctgctgtgcggagacccccgggtgaagccaccgtcatcatgtctgaccaggtaccgggctgggagccatccaacggcggtggccagggcc

SEQ ID NO: 25273 - DNA, 2300 bp, Homo sapien
aggattttctttcctcttaatctcaggttgcagagttgctacctatttaatgttccacaatcttgagcaggttgcaatttttttttttagatggagtctcgctgtgtcgcctaggctggagtgcagtagtgccacctcggctcactgcaccctccgcctcctgggttcaagcaattctcccagcaggttgcaatttaatgattaggaacaatctgcatatagggcctgggaagtgagtaaggaaattttacccctgttggaagacagacttgtgaaacaactggggtatttaatcccagtccctgagactgaaaggcttccagaaaagcaagtaacactaaatcaagaagacagtctaaattcagccccgcacagtggctcatgcctgtaatcccagcactttgggaagccgaggtgggtggatcacctgaggtcaggagttcgagacaagcctgaccatcatggaggaaccccatctctactaaaaatacaaaattagccaggcgtggtggtacatgcctgtaatcccagctactcgggaggctgaggcaggagaattgcttgaacccgggaggcagaggttgcagtaagcagagatcataccactgcactccagcctaggcaacaagagtgaaactccgtctcaaaaaaaacaaagaagaaaaagaaaaaaaaaaagacattctaaattcataccctggggtcattttaacaaatgcagcaaaaataggagaggcttattgaaagaaaactgtgctaataattcatttggccagacagaagggaacggccaggaatgctcacaaatatagtgacagtaatggtgtcattctgaggccttcgcctcaaggcagggcttgaaaggggataaagtctaatggcactagctggcatttcaaattctagatgcctgaggcagactggcaccgaaacagctcctcgtttctctcaaagtgaacatataattcatagagggttaacaaaataatatcgtgaagtttttcccctttaaatctctagcggtggcggggcgcggtggctcacgcctgtaatcccagcactttgggaggccgaggtgggaggatcccttgaggtcaagagtccgagaccagcctgggcaacatcgtgaaaccctgtctctacaaaaaattagctgggtgtggtggcacaggcctgtagtcccagctgctccggagggtgaagtgggaggatcgcttgagcctgggagttggaggttgcagtgagccgtgatagtgccactgcactccagcttgggcaacagccagactgtctcaaaaaaaaaaaaaaaaaaaaaaaaaaaaaaaaaaaaggccgggcctagtgggtcacgcctgtaatcccagcactttgggaggccgaggcgggcgtatcacgaggtcaagagatcgagactatcctggccaacatgctgaaaccccatctctactaaaaatacaaaaattagctgggcgtggtggtgtgtgcctctagtcccagctactggggaggctgaggcaggagaatttctttttttttttttttttttgagacggagtctcgctctgtcgcccaggctggagtgcagtggcaggatcttggttcactgcaagctccgccccctgggttcaggccattctcctgcctcagcctcccgagtagctgggactacaggcgcctgcaaccacacccggctaattttttgtatttttagtagagacggagtttcaccgtgttagccaggatggtctcgatcgatctcctgaccttgtgatccgcccgcctcggcctcccaaagtgctgggattacaggcgtgagccactgcgcccggctaggagaatttcttgaacccgggaggcggaggttgcagtaagccgagatcacaccactgcactccagcctgggttacagagcgagactccgtctccaaaaaagaaaaaaagaaaaaagaaaaaaaggcgcaaaggctccgttcaggccctagatcccgcgatacaaactttctcggcccgccccagcccgctgtggcgggaacattctggaagtgacggcaatctctgcggcagtcttctgtcggaagtgacgttgctatcccagaatcctcagagaaggagtagcgcgttcgtgcgtcctagttccagtacagcgtggagggtttaggcagcgtgttctgattctttgcgggacggcgagcgcatttgtgctttgcccgccgcggcctaggaggccttttgaggccgcgtagtcggtgtttttgaactgactctacagcttctggcaggccgtgcggcgccctgacccg

SEQ ID NO: 25274 - DNA, 2300 bp, Homo sapien
tgaacccaggaggtggagcttgcagtgagccgagatcctgccattgcactccagcctgggcgacagagcgagactccgtctcaataaataaataaattaattaaaaaatactatcaccattctaaaactgaagttaaaataacaaaggaaatgtgataaaatcagggcaattcatgagcacacaaaggtcttcaaagactatgttatgtcagccaaaaccattactatgacaaataaaaccattgtgttcccaactgcaacatcttgaagaaaacattgctaataaagaccatctaaataagaaagttagagatattgctacattttctgtattacatttgtctcaaagtttttatttgtctcaaatttttaatcatttcttttcagccagggtaatgataaatatttgtatacagaaatccattttaagttttatcattttaagataatttccatttctaagtagaaatagtatacaactattaccattgcaatctttagcattgttgttacaacagtactagttttaaaacaagtctttatattttatagatacaaactgaaatattaacaggtaaaaattaaatgtctaggtcttgcttcaaaacaatacaaggcggctgggtgtgttggctcacgcctgtaatcccaacgctttgggaggccgaggcaggtggatcacctgatgtcaggagttcaagaccagcctggccaacttggtgaaacccagtctctactaaaaatacaaaaactagttgggtgttgtggtgcgtgcctgtaatcccagctattcaggagactgaggcaggagaatcgcttgaacccgggaggcggaggctgcagtgtgccgagattgcgccactgcactccagcctggcgacagagtgagactccatctcagaaaaaaaaaaaaaaagccatttactgtgattcctaaaagtatgcatgaacatgtgttgcacagacattcaaagtcttggagaatatatacctaaatgttgataagtatattgttgattaaagtaccctatgtttcttttgcatttaaaaaatttctcacatctagatgtgtctcacaattgacgatagttttagagaaatccataatactttcatgttaggatgatcatagcagtaaataacgaatataatctattgaaagtagacaaaagttttttttgttttttgttttatttttttgagatggagttttttgctcttgttgcccaggttggagtgcagtcgcgcaatctcggctcactgcaacctctgcctccgggttcaagcaattctcctgcctcagcctcccgagtggcggggattacaggcatgtgccaccacgcccagctaattttgtattttttttttttttttttttttgtagagacggggtttctccatgttgatcaggctggtcttgaactcctgacctcaggtgatccgcctgcctcagcctcccaaagtgctgggattacagatgtgagccaccatgcttggcgcaaattaaagtttttaatgattacaatactttactgtaaagggattaatggctcttttaaaagaaaggttctcggccaggtgcagtggtgcacacctgtaatcccagctactcaggaggccgaggcactagaatctcataaacccaggaggtgaaggttgcagtgagccaggattgctccactgcactccaggctgggctacagagcgagactccatctcaaaaaaataaaaagaaaggttccctgccctaccccctaggaccccatagctccagctacggcccaaggctggggcaggaatatctcttgaggccaggtagattctagactgaatagccactgtactacagctgactggactagatctgaattccatttagctgttaaatgggcaattcgaactagtaatttgaccaaaattacatgcagggtaagaaaactagttcattatcttagtgaaagaaatagcttctacaccttcattttacatgtaaaattgtatttgaagaatgcagctgtatatgcctcacctgtaccatttaaataaaactatttaaacattttattacaggttctaaatgagaagaaacttcaagaggttgatagtttatggaaagaatttgaaactccagagaaagcaaacaaaatgtaagtactcttgaaatcaataatttagcagttaacatttagggcttgttttattttttacatttttccctgatttatataatgttacattcgtagttttctgttttgaaatctgtttcaggaataattttggtatgaacctaattattacaa

SEQ ID NO: 25275 - DNA, 2300 bp, Homo sapien
ggctgttagcagttaagttttgggggaatcattaagtcatacgcaaaattttcaactgtgcagggggtcagtccccctagtcccttattgttcaaaagtcaactgcacttcttttagaaatttttttaagagacagggtttgctctgtcacctggactggagtgctgtggtgtgaccatggctcactgcagccccaacctcctggactcaagcgatcctcctgcttcagtgtcccaagtagctaggggttaaatcttgactttaccacataaacctcttcacaagcattatctcacttatttctcagagaaatccagtttcagataagcaaacaggttctgagagtttaagtaatttatcctagtactttgctaccatgcacatggaccctcatctaccaccacctgagcttgtaaaaaatgaggaaatcttgggctccaacccagacctgcattttttttttgctctggtggcactaatagagcatcagatttgcattttatcaagcaaggtctctagataattcctatgcacactagctagggtttgagacatttggccctactccatgttatcctaaagggtacaaatacagctgggataaaggatgagcctgagccaagtctgaaaatggccattgagaagcaacagatggatcagagaacccttcacgggcagcaaataaatcttttctaaaagagccctggaacagagcgccaaagttggaggagagaggacagctcactcaagggccttgtaattgtgctgaggagccagaaggcaatggacagatacagcagtttaaactggaagatagaaatttacatttttgaagggaaatggagaatcagtaggttttcagcagagttttgtggtgcagccacagaaattcttcaaatttactaataaaaactaggcatataaaattcacccgagtttccgatttcaaactaagttcacaaggctcttcattagaagtgtttcaatagtaccaagtagaacaagaacctaccttttggttagttttttaaatagttaaaccttcagcccttatgagaggtggttgctgtatgatttaactatgctttctctgggcctgcagaagactattcaaataactggaagtttattatttaggtttctcaaaaacctaccttgttttgcatgtaaaccttttgactatgcagctgggtaggtggttaggcctttttcatcaaaagtcggtcataaactaagtctgttttgtcctaaattaggaatgtatctgcggtaccagtgggtgatgcgaaaatgacagtgttctcctgggaacaagataaccagctttattatgtaattttatctagggatggctgcatgtattttatcaacatttacttcaagcaaattaaatttgaagcctagtaacatctctgaaagtttatgtcatttcattttctacaaaccagttgggagaggtaaaattgaccattatctgtgatttacaaatgaggaaaccaaagaggggctgttgacttgaaaagcagaggtggaactcaaaagccatagtcattctagtttccatccaccaacagcttttactgaattgggctttagtatgatgtctatgacatacacaaactggcacttttttttttcttattttttccctattctccattctttatgatcactttgtacaacctttaaaaaagtcacttcaggctgactactttaaaaacaaatcagggttttaagaattattttggtatgccttttagaattgcaaacagtaaagggagggatactgtctcccacccttttgaactaaaaagttttgctcacctaatttaaaaatttgaataagaaacaaatatttatttaaataaagaggtagaaagattataggtggaaaataaaaagtagtccaaaaaggcaaaagaaacacattagagtggggtcttgaattggtccacttaatcactgacttccaaaagattaaatttcaaaacaactctcacttttcagttataattatcaaaacaataatcatcacatggcaaactacagaaagagccaaagattctctacctaagatataaagagatcacaaaattgtcttaaaatacaaagaaaattttatttgtatatcaaagactctaagaaatgatgacataaggttaacagagttgatgtcaagacaaataggtttgaagttatagatgataaatcactttgtcttactgaaccttcccttgattacgttagagagcatccctggtatgctcccagttgaatcttaagcatgatgtgtgtccggg

SEQ ID NO: 25276 - DNA, 2300 bp, Homo sapien
ttcgtctttttaagggattttactaggtagaatttttttttctctgtctaaagggtaaacagcataaacatatttcaactaaaaagagtcttagaatccggggttggtattgctacaacccctaattatggaagatgtttagtataacagaaccagtttaaggaatgtggagatttatttacatcaaattcagataaagaggtaacagcggactagaagaagcaagcagagcatgacttaaggagtctatctatgactgtatctgtggaactgcccttagccacaatgaaagaccagcaaaaccagccttcagcataaccctcctgcctggtaggagatgggaaggccagacttcacccctcaagatcgccctcccacgcgcattttccacctcgcagctaagaattcagtccagacttccgatcatggcgccacgcacgtcaccttctcccctcgccgccagcaaaatcccacccacgtcggctgaccccgcagcggggtgtaagggcgggagggatcccgtctcctatactggtcgcttgtacaaaccagatccaaaaaacgcactacacaaatccttggaaactgcggtaccaacgggatcttctcaattccttgagtgcaaaatgatcccactctctatcccgacacaactctaactccattttcctttcacgtgccctaaaaagccctcaaggcccccagccttggtgaatccaggccctctctcggggtgggcaccgcgctgtacggacagacgcgcgcacgcagcgggacgatttatagaattaaaagtcttttttttttttctggcttcgcatccttgcaaatactcaatattcctgtcaactaagaaggctaagggaatgggcggttgaggaaagcaggacgtcgattacagcgaacacatcaaaggggtggtctttccaattccggcttttgtttgagtcagaggggagcctgaggaggccaaggtctccggttctgggaaaggcgggtccatccggattctttgggctgcggagagggaggttccagccccgtgaaacaacagagggcagttctgcccctcgaggctttcctccgagagtactgagacggagacgcctcagtcgggagaaatcccggaactcggaggagtctgctgaacgccgaacaaaaggatgtggccgtcgtctcttaaacaaatacgcgaatcccaagccatgcacatttggaaggcatgtgtatgtgtgtgaaggagaaaggccaccgctgcccaccgcagccccacccagccctcggccattcaccggagagacgcgctgcggtggggcctcggagccctcagccagccccgaacgaggggcggggccgggcggggccgtgagcgcgcaggcgcagtgcgggcttcatcccgccgccggcgccgccgccgccgccgcccgctctgcaccacaggctagagacagacagggccgggaagagccggagactgaggaggaggcggaggcggcggcggaggcggggcgactccggtgaccgggagcgccgcagactggcagctgcggcgactcccccctttgtgtctggtctgctcggagccactggaagtgcctcccggagggacgcagggtgtctcgccgcctccctgcccacccccttccccggctaccttcatccgccctcccgccgccccccgccctcggtccgcgacgcccgagttccgtcaggagcccagagctgcgggagaacgaggcggcggcggcggcggcggcggcggcggcggcggcagcagcagcggcttcctcggggggttgtgattcgctcacaggagccattgacgggagaagaggaggctttcttggtggaatttacctcaggcaagatcgagccgcaggaataaaaagcgaggaagggaagggagcgccgccgggaggactagaaggggcagcctctcacacccactccgcctgccgtctcggggagcccggaccggggccgcgaccgcgacccctcccctcccccgctcctacctctcctcagccttcgccagggcctccccaaccctctcacggttgttctgcgaaggcgtggggactgtgagcttgtccatggaggcaggcaccttttttgatccagtcaaggaagaggatttgttgttttcgaaatcagagtgaaggaagcaccgaagcgaaacttaaggaatcctgccttcccggagccgcgggcgatgcgactagggctgccgggcgccgccgccgcccgtccggcttcgtccttcccggcagtcgggaactagttctgaccctcgccccccg

SEQ ID NO: 25277 - DNA, 2300 bp, Homo sapien
cccagctaattgttgtatatttagtagagatggggtttcgctatgttggccaggctggtctcaaattcccgacctcagatggatgatccgcccacctcggcctcccaaagtgctgagactacaggcctgagccaccgcgcccggccccaattgtatttcatattactataataactaccctgataccaaagttattgaaagataagggggggaaaaaaagccctgaagagaaaaagaactaattcaagtgatttataagcacagtatttgactatatacactcttgtgcaagacgtgatataaaggatggaggagaattgcaaacaaatactgaactcttttgagaagatttgtcttttagtagtgtgggcaaagcaattctgaaaccatcgtagatgcattataggattaagaaaataagttgaggctgggtgcaggggctcatacctgtaatcccagcactttgggagactgaggcgggcagatcacgaggtaaagagatcaagaccatcctggccaacatggtgaaaccccatctctactaaaaatacaaaaattagctgggtgtgctggtgcatgcctgtaatcccatctacccaggaggctgagacaggagaatcacttgaacctgggaggcggaggttgcagtgagccgagatcatgccattgcactccagcctgggcagcaagagtgaaacgctgtctcaaaagataaaaataaaaaaaaggaacgaagccttcttagaaaaatgatttatcccaagactggagcaggatagatacaagataagcctgggacatcttgtaatgttttaataatttttgtaagaaagtaaggaaagaggccgggcgcggtggctcacgcctgtaatcccagcactttgggaggccgaggcagctggatcatgaggtcaggagatcgagaccatcctggctaacaaggtgaaaccccgtctctactaaaaatacaaaaaaaaattagccgggcgcggtggcgggcgcctgtagtcccagctactcgggaggctgaggcaggagaatggcgtgaacccgggaagcggagcttgcagtgagccgagattgcgccactgcagtccgcagtccggcctgggcgacagagcgagactccgtctcaaaaaaaaaaaaaaaaaaagaaagtaaggaaagagcctgtaatcccagcactttggcaggccaaggcaagaggactgcttgatcccagaatttcacaaccagcctgggcaacatagaccttatctcaaaaaaaaattaaaaagtagccaggtgtggcacacgcctgtagtcccagctacttgagaggctgaggtgggaggatcacttgaacttgggaagtcaaggctgcattgagctgtgatcaggcccctgtactccagcctgggtgacagtgagaccctgtctcaaaaacaaaacaaagcaaaaaaaggaaggaaaagtacctaaaaatatcatggagacttgtcataaggacacaggagccagctggaaggaactcccactggctaaatctgggtcaatttgagtgctaaacaagtacattaatgaactgtgaaccactggaaggaaaatgaatcatgagtagaatgtcaagtgccaactggtaaatgtaggattgctggagttggcagcttatcattctgcaaccattgtgttaaggattggatcaggcaagaatcatcaaaggatcctaaatctaggggcagtttcaatgaggagccaggatatttgcatgccttccacatatctcaagggaaaagttagtaattataaaatgggaaaaatggacaccttgaccaggtaataaaagttaacattattaaagaaggacacatggaaatccatgatacctagagaaggacacataactaatatagtactatattccagtcaagaatgcataacctgaatttaatcatgaggtaatatcacacaaaccccaaattaggaatgttctgttacaaaaagggggatcgcatttttcaaaaatgcgaatgtcatataaaacagactgtgggaaaggtctaggtcaaaggaagcaaaaaagactggacgactaggcagtgcctgtcttttactggatgagaagaatgtgataaaggacatgatgattagagaaaaatgttgtttcaatgttaaatgtgctgaagctgataatactgtggttttataagagaataaccatattcttaggaaataatctaagaagtgtttaagaataaaggaccatgattctactgtgtattggttcaaaaaaagattgtgtgtgtgtgtgtgtgtgtgtg

SEQ ID NO: 25278 - DNA, 2300 bp, Homo sapien
aaaatattaaaatttatttcactggatggtaatgtaaccttaaaagcatcataataggtaaagtctaatattagttcccttaacaaaatcctaactgtataccagaattaggtcactgaaagaacttgatttgaattacgtttagacaaaaatgatttaattgtaaattcttaaaactttctaaatgcataattggcaaaaaaaaaaacccactgttaccagtgtaggaagttacaagaaggcacatactgaatgctgaagtatacatatgctatttctcttaaacctcagagcaaccatatgagcattgtaattaatattcccattttacagatgaggaaactgaagctaagagaagctaagtaatatgcccaaggtccacatctagtaacagacaaagctgggatttcagtctatgtctgcctctctccacatctctttcatccataccacactgcctacatgccatatgacaggatgtgtaatgggctaacgtttatttaaaaagttcaggccaggtgcagtggcttatgcctataatccccgcactttgggaggccgagccgggtggatcatgaggtcagacgttcaacaccagcctggccaagatggtgaaaccccgtctctattaaaaatattttttaaaaattaactgagcgtggtggtgggcgcctgtagtcccagctactcaggaggctaaggcaggagaatctcttgaacccgagaggtggaggttgcagtgagctgagatcgcgccactgcactgcagcctaggcgacagagcaagactgcctcaaaaaaaaaacataaaaattcagtcactatactctggcacaattttcatttgtatatgagccaaaccacataccttaatgatttgggaagttaggcaaatatgagatatgtagacatatctatgctgattgttgcttgagaaataattactaattctagacaaaactcaatcctgtatcttccatcatgaatcttaaaatcatttcacttcactcctaacatttcttacattgcagaactaatggtaaagtaaattttacggaaaaagttaagatagctttgggaacagagacctttccctaaattgattccatagcagatttgggggaattaacaaagaatttcagtctcatcaatcctttgaatccatcttcaaaacttctgcttttaataactttagaaaatttactaatctatagaactaattgagtaggatataggaaggatacaaggatataatgtcctttttataaaagtttagtatagcttctttacatgtatccacttgttccagaaaatgtgcattggttctgaatgtgaaaatatttaaagagagaaaggaacactcaagtaagtgtgggcttcagtgggaattatcacaaaacattggcaagtatttttatttaaattattttcaaatttgacttctacagccaagtggaattggtaggctgtagctgttacactgaaatttctagtctttgtaagtgcctcctgaaagtcatttaaaatggaaaaatatttcaatgagcttttccttttttcatatttatggacatgaatattttattggagatcattaactcctagaatttgagattatatttccatacaacattttataaagttatgttgaacttactacctgttatgtgcaggttattatgtaactattcacagattgcttcatatattgctttatcttcccatctaacttcttaaagttaaaatccggacacacatgttgattatctagaccagtcattctggaaattgtaacactcccacataaaccccaggagactttttcagaatgcaatgtttctaaatgtactgttactggcagtttactctccagcatataaggttgcattttaacttttagattatgaactgtgcaaactttacccaaaactatcttgcatgattccctcctaaatatattccttgattaagtaaatctggcaaatcactgtttgagctagttacataaaatttgttatcaagagaaggcttttctacaagtttccagattaacataaagaaaagagggaatcacagggcatttaagtgcaccttcccattactttccttaaatcacctcatagttaggctgggcgcggtggctcacgcctgtaatcccagcactttgggaggccgagacggtggatcacgaggtcaggggactgagatcatcctggctaacacgatgaaacctcatctctactaaaaatacaaataattagccaggcatggtggcacgcgcctgtagtcccagctactcg

SEQ ID NO: 25279 - DNA, 2300 bp, Homo sapien
agagcaccagccaacttaaggcaggttcctgggctaaggggctggggctttctctgtggagggggagagaggaggagaaaggggaatggatggtaaggagagatgtgggtctctgaatcacatggagactctggaagtgctgaccatcttctacacaccacattctcatatcatccttggttaataatcataacaacagtatgaagcacatggtactgtttaactgcattttacagataaggagactggctagtgatccactcaaggtcacagagtaagtggtggtcatgggattttaatttcctctctaggtcttttttttttaattttttttttttttaagacagagtttcgctcttgttgcccaggctggagtgcaatggaacgatctcggctccttccaacctctgcctcccgggttcaagcgattctcctgcctcagcctcccgagtagctgagattacaggcatgtgccaccacgcccggctaattttgtatttttagtagagacggggtttcctccatgttggtcaagctggtctcgaactcccgacctcaggtgatccgcccgcctcagcctctcaaagtgctgggattacaggcatgagccaccacacccggcctcctctctaggtctttaaaagccttccacctcacgcctgtaattccagcatttttggaggccgaggtgggcggatcatgagatcaagagatcaagaccaccctggccaacatggtgaaaccgcctctttactaaaaacagaaaaattacggggcgtggcggcacgcgcctgtaatcccagctacttgggaggcggaggcaggagaattgcttgaacgcgggaggcggaggttgcactgagccgagattcgagccagtgcactccgccactgcactccagcctaggtgacagagagagacttcttctcaaaaaaaaaaaaaaaaggccttccaccaccgcgcaaagggacccagtaggatttcaggtccagagtgaatcatactatgccctccactcccacatttttacacgacgaaatctgtctagcatgtacaactaataaaaatagtagagggaaaagaggtcatggataggcaatttatagccagacaggtgggagtgtaggttttggctccaccattttttattttcttgatgaggagccctttaggtcattttagaaatagtgtcactgcctgccttcccgagtctttgccacaccaaagacttgtttcctccgctagacaaaaatatggatggctgtcccagttctgtctcaaacaatgatcgtgtagaatcaaataaggccctctgtaaactatagcactttacaaactggtaaggtagcagccatccttccaaggtatcagggaacagcgaagcagctgattaaaatagtcttgattacttgagatacaggagggtaggaataacatgtggtaactgaactctatagatactatctaaaatcgcattctaacaggcaagtttaatctttctgagatttgcctctttgtagagctctaaaaaataaaaggagaggggcgtaaaatgccagtaagattagttaaatttcttctccttttgagccctgcccataggtagatggaattagggcagaacaaaaacattaagaataaaagcccgaacgagatgcgcgtacaggtgaacacaagtgaacactggggtaaggaaatgagttatgcggaaaaggcttcagaccatccctgggaactgctccgggtctggacatttcctttggcaaccttccagagtctgagtccccagggctccccccggcgggaaaggaaaggcgcgcgtggctaggcgcgcgcgtacacgggcactcacgtgtacacacacacgcgcgcacactacacatacacacagggcccatttcctccgctccctccccgcggggggcgggtctctttctctttaaagagcagacggtctccgcgcacacccaggctctcaaggcctcgggggcccgggacccgagctgctcgtagccaatgggagcagtggagcggctcgagcgcggctgacgctgcaccaatgggcgatcgtggggggcgggggcagcagaggagacactattgttgatgaggagcggcggcggcggcggcggcggctgcaccacctcgttgctgcctgccccggcccggtctccccctgcaccccggagtccggcttcgtcaccccgtcttggggggcctgccctccggcctcgagaatcctccccctgcagcccaacaacaacaaaaccccccgtctcgcccagtcaccggggagggg

SEQ ID NO: 25280 - DNA, 2300 bp, Homo sapien
agacggggtttcctccatgttggtcaagctggtctcgaactcccgacctcaggtgatccgcccgcctcagcctctcaaagtgctgggattacaggcatgagccaccacacccggcctcctctctaggtctttaaaagccttccacctcacgcctgtaattccagcatttttggaggccgaggtgggcggatcatgagatcaagagatcaagaccaccctggccaacatggtgaaaccgcctctttactaaaaacagaaaaattacggggcgtggcggcacgcgcctgtaatcccagctacttgggaggcggaggcaggagaattgcttgaacgcgggaggcggaggttgcactgagccgagattcgagccagtgcactccgccactgcactccagcctaggtgacagagagagacttcttctcaaaaaaaaaaaaaaaaggccttccaccaccgcgcaaagggacccagtaggatttcaggtccagagtgaatcatactatgccctccactcccacatttttacacgacgaaatctgtctagcatgtacaactaataaaaatagtagagggaaaagaggtcatggataggcaatttatagccagacaggtgggagtgtaggttttggctccaccattttttattttcttgatgaggagccctttaggtcattttagaaatagtgtcactgcctgccttcccgagtctttgccacaccaaagacttgtttcctccgctagacaaaaatatggatggctgtcccagttctgtctcaaacaatgatcgtgtagaatcaaataaggccctctgtaaactatagcactttacaaactggtaaggtagcagccatccttccaaggtatcagggaacagcgaagcagctgattaaaatagtcttgattacttgagatacaggagggtaggaataacatgtggtaactgaactctatagatactatctaaaatcgcattctaacaggcaagtttaatctttctgagatttgcctctttgtagagctctaaaaaataaaaggagaggggcgtaaaatgccagtaagattagttaaatttcttctccttttgagccctgcccataggtagatggaattagggcagaacaaaaacattaagaataaaagcccgaacgagatgcgcgtacaggtgaacacaagtgaacactggggtaaggaaatgagttatgcggaaaaggcttcagaccatccctgggaactgctccgggtctggacatttcctttggcaaccttccagagtctgagtccccagggctccccccggcgggaaaggaaaggcgcgcgtggctaggcgcgcgcgtacacgggcactcacgtgtacacacacacgcgcgcacactacacatacacacagggcccatttcctccgctccctccccgcggggggcgggtctctttctctttaaagagcagacggtctccgcgcacacccaggctctcaaggcctcgggggcccgggacccgagctgctcgtagccaatgggagcagtggagcggctcgagcgcggctgacgctgcaccaatgggcgatcgtggggggcgggggcagcagaggagacactattgttgatgaggagcggcggcggcggcggcggcggctgcaccacctcgttgctgcctgccccggcccggtctccccctgcaccccggagtccggcttcgtcaccccgtcttggggggcctgccctccggcctcgagaatcctccccctgcagcccaacaacaacaaaaccccccgtctcgcccagtcaccggggaggggggggaccatgtcccagcgggtgaggcgcaatgggtcccccacgccggccggctcccttgggggtggtgcggtggccacggccgggggacccgggagccgcttgcagcccatgagggcgacggttccgttccagctgaagcagcagcagcagcagcaacatggcagccccacgcggagcggcggcggcggcggcggcaacaacaacggtggctgctgtggtggcgcctcaggccccgcaggcggcggcggcggcggtggcccgcgcaccgcctcgcgcagcaccagccccacgcgcggcggcgggaacgcggccgcgcgcaccagccccacggtggccacgcagacgggcgcgtccgcgacgtccacgcgaggcaccagccccacgcgcagcgccgcgcctggagctcgcgggagccccccacggccgccgccgccgccgccgctgctgggcaccgtgtcgtcgcccagctcgtcgcccacccacctgtggaccggcgaggtgagcgc

SEQ ID NO: 25281 - DNA, 2300 bp, Homo sapien
tgtgactctgccgtaatgtgtccaatcatcttctcattttggacattttgttgtttctagttttctgcaattcattgttatgtgctctttttgtaaataaacttgaaagttgatcattaattttgaaatagtttttttaatgccactttgatttgggggcttaatcttaaaggatgtgcacattgaatatagttttaatgtggtccatttatttaggagaacacattttccttttttactggcaactatggggtaagggtagttagaattattctcacagaaaattatacatagatttattttccaattattaaatcatgtatgaggtgttggttggtacttaaagtttattttgatgtatcaaagcttggcctgcattattgaagatgttattgcaaaacccacttctttttttttttttttttttttgagacagagtctcactctgtcgccagactggagtgcagtggtgcgatcttggctcactgcaacctccaactctaggattcaagcgattctcctgcctcagcctcctcggtagctgggattacaggcgcccgccaccacacctggctaatttttgtatttttagtagagacggggtttcgccatgttggccagggtggtctcgaacttctgacctcaggtgatcctcctacctcggcctcccatagtgctgggattacaggcttgagccaccacgcctggccaaaaccaacttttttatatgtgtctttcctcacattacttattaatgtgaggaaacattaataagtaatatgctttattgccaccatattattttactattttaatttacattggatgtcttataactattatattggcaaatacccactttgtttgctcagaaatgaaacctacccctgttacaaagctggtggttggttcttggcacttgatttggtttatgcatgccctaggatactctcaaaggcaagggatcaattagcaaggtgttaatttgtcttaatcttttgggctggtactaagttattgtgaagcagatgtgttattactccatcctctgtgaagattgaggaataagatgatcactaagtgccagtattacttttagatgtcattatcaaataacattgtcactaattttttagtgacaatatttagtgaaagattgtcactgatttattttatattttcccatgataattaccttcctgtcttattttcattatgtcctcccatttccctgaaatgtatcgaacaagggtttaatttataaacaagaaggagatccaaataagaatttgttggatatgagagatacattgattctatggaaaattcctgggcccaatccctggagatttagatttgctaggcctagggtgggtcaactgttttcactcagtatagttctctggagagtcatgaaagttattgcgtgtatgagtagcttgttcctttttgtttctgtttatatacagtaatccttatcctttttttttttatggtttcagttacttctagtcaaccttggtctgaaaagattaagtggaaaatttcaagaaataaacaatttatatgttataaattgcgccattctgagtagggtgacgaaatgtcttgctatctcgcatcccccaccaggaacgtgaatcattcctttgtccaacgtatgcacgttgtctatgctccctacctgctagtcactttggagccctctcaatcgttggattgactgtcatggttttgcagtgctgatgttcgaggaatttttgttttacttaatggcctcaaagcccaagagcagtgatgctggcttgttgttatacttgttctattttattattagttattgttgttaatctcatgctgtgcctaacttacaagttaaactttatcatagatatgtatatataggaaaaaacagtgtatatagaattgagtacaatgtgccatttcaggcatctttactgggggtcttggaagtatcccctgtggttaaaggggattaccatagttaagttggagaactttctacatagtttaaaacttagtttctgctttgtttctttcctaattttattaaaacaagcatttttgtcttaaatctaggtgacaaaacacgacagccttcttcaagcccctccagtattatccgacgcacttcctccctggatactcttgctgcaccgtatcttgctggacactggcctcgggatagccatgggcaagctgcaccttgcatgagggacaaagctacacaggtaagcttattatagttcttatcctgaagtgtttttctctgaagctac

SEQ ID NO: 25282 - DNA, 2300 bp, Homo sapien
tgtcaggacagtataatgcttatatcaaatccatgctccctaggtacccaaattaaattccctctctattccaaattatgtccagagaaattattcaggataacatattaagaggtttggcaattaaatggtgattaatatatactgcccaggaatatgggaggatatccaaaggataataatctagaggctatctggaaaattggccactttgtggactttacagcttgtccttgttctattttatgctttttatttaaatctactttgtctgatattaatatagctattctaatttcattttgcttctatttacctggtatatcttaactcatatctttatttttatctttgtgtccttttgttttaggtagatctcaaatagcatatagttggatttcgatttttgttttttatgattcgagattctttgtatttaaaaagaagtttgcatctatcatactaaataatataattgttcttcttccatcttcttgttttgtactgtgtgttacatgccttactcttgtttttcccactcggtcttttgcttttgctaaagtttttctggctcttttgttttacccccagtaatttggaaattagacattctatttttatttaattagtaattacttcaaattaaaagaaagtgaacctctatttctttactaacatgaaaaatacaatagcatgtatcgatgtgcctggaaataacgaatgagtcacatactttagtatttcccttttgttcctactcttacagtttgttggaataatttgggctttagatccaaaatgttattagtatttattctttttacatatccttaaagaaatacttttcactctgcatttccttatatagccatgttaaccttgttaagaataacttcttggaggttattttttattttttattttttttgagacggagtctcgctctgttgtcaggctggagtgcagtggcgtgatcttggctcactgcaacctccgcctcctgggttcaagtgattctcctgcctcagcctcctgagtagctgggattacaggtacgtgccaccatgcccggctaattttttgtattttagtagagacagggtttcactatgttggccaggatggtctcgatctcctgacctcatgatccactcacctcggcatctgcccacctcggcctcccaaagtgttgggattacaggcatgagccactgcacctagcatatgttaatttttatgtttacagtttacaatgtccatctgtatttcttttataacatatcttcccttatacttaaggactttatttgtgttgatttattggacactaaaatatttctttgagtgatttttaaagagtatgtgttggaatctttgcatatctgaaaatattaaatggatgtttgacatagcgattataactataggaaattttcctaaggaactgatactagtatgtaaagatgtatgtacaagtttattttgcagttttattacaaaagcaaaacttagaaagtaataaacatctataaatagatatcaaataaaatataattttttctagacataactgcaaaatcgtaagttttattacgtttgtcatctaactaaaattaatataaatataattaatcttttgcctgtttcttgtgcaagttgaaattatagcatacatttagaccatataaagcaagtattagcatgtctgactgagaacattaatattaggggccagatgtggtagttcgcacctgtaatcccagtgctgcatgaggctgaggcaggagattgcttgagcccacattattctgaactatgattgcaccactacactccagcatgagcgatggaacgagaccctgactctaaaaaaaaattacatttagtaccttttttccatttgtcagattaaatattggctagctaaacatatttattgagttttttttggtttttttgtttgtttgttttttgtttttgtttttgagacggagtctcgctttgtctcccaggctggagtgcagtggcgcgatctcggctcaccgcaagctccgcctcccgggttcacgccattctctgcctcagcctccggagtagctgggactacaggcgcccgccaccatgcccggctaatttttttttgtatttttagtagagacagggtttcaccgtgttagccaggatggtctcgatctcatgaccgcgtgatccgctcgcctcagcctcccaaagttgtggaattacaggcgtgagccaccgtgcccagcctattattgagaatttttaaaagaagtttaatt

SEQ ID NO: 25283 - DNA, 2300 bp, Homo sapien
caccgtacggccgaacgcgacccgaggaggcggaagagcggcgccggtaagcttctgctgcctcctgtccgcccctattccccctcaggcggcggtcaggcccggagaccaaatcccgggttcccatggcgacgccgggaggcgggggcgcggcgggaggctccggccacacgcgcgcgcgcgcggcttctcggggccttgctggcctcctcggttctctgggggaccccggccgctgcctgcggccttcttccaggcgaggccctgctcggggttcttccggcctccccccaggcaaaacccgcaaggagcggtttctggcgtggctgggtcccctgcggcggaagggcgcctcccggccacgctcgctgtagtgaaggagcgcggcagcctggggctcgtttgggtgatttccctcggcggtggaggtcgctcctaatagaggcggcggcggatcacccgaacagccttcaggtgcttccctgctgacctctttttaacgtggtgcttatttttatttcgctattattttgtaatgggaatgtcttccttagaaactaattggcaaccgatggataaaaacaaaacatagtaaatgtgcagtttgagctgaactgcagaatgcacgggcccgcgaggggctccgcgcacagatcctgctccttaggccggcaacccgaccccacggcacagatatggctcctggaaacgcgcgtcagctggtcaggtgcccaggtgatgtcagtggtcagatacctgatgctctaaggaagacggagaggggaaagcggggagtccatcctggcagctcacccgcgatgctggggcgttgccagtagagggggtggaatcatttttcgtgtaatagatgatcttgatgcacacagcataaaagctgttataaactatgggtctctgtaaaatagattgttgggaaggtaacatttttccatggttttgatttttcccaaaagtatttatgtattgatttatttggttctgactcaggcgacgtactgtaagacgatattactttaatcatcttcacatcagtatttatggaatagccacaggtgcctcatcctttagtaggagttaattatacatttactggccgagtaaacatctccgaatggtatgtatgtatttttatgtgaccaaaattttaaatcgtttagtatttgttatctgtgcctatcatacccagtattctttgaaatctctttatttaatagttcaaaatgattgtttatctagtcgttgaaacagctatgtggaaggcagtgttctaattaccagtttaattttagagttagaagggtgctcagagatcagccagtccaaagaggaaaaattgcaaatatgagaactggtggaaaaagtaggatgccatatttttattataaatatcataaaaatataaaacaaagtttataccagttatggaactaggaccagatatcaaaatattagatacaaaatagataatatactgtcttgttctactatactgccaaacttggtgatttcattgtgtgattctatatttacattttttctgtacttttatactttagctttttcagtactcactgcgcttcctttaaaattttattctttttatattctttaacaacaacagatgggatatgtgagttttaaatatatctgtaactggaaagatttcctcgttcgaagtagattttgttatttaataatattcttattaccctcttccattttgtctatttttcattcatcacttaagttttgtgtttttttcggaaatcaaaattttcaaacttgtacttggatccagtattcaccattaaaatttagtcaccttctatgtatctcattattattttgccattattgactcacttgcatgtaacactagggttttaaaattccttttttaatttagttgagataaaaaaagactaaaattccttttttaatttagttgagattaaaaaaaagactaaagtaacacaatatctatatttacagaggccgacattaacaactgttaacattttgttgtatttctttctagtatttttttagataaggaaataaaacatttccaataaagctgaagtctcatcccacccatccgttatcaggtactcaacatcatgagttggtatctgtgttttgtgttttttaaattatattttatacatgtctattattgcatgtgtttttaaattttaaataagttacatcatattgcatatagcctgcacttgtgtttttcactcagtgttattttattttattttatttcttatttt

SEQ ID NO: 25284 - DNA, 2300 bp, Homo sapien
aaataccccaagaactttactatggggcatagtaacatttgaaagtcatttcgcttgccactttatttattccttggtgagaaagataatctgttcttttcagatattttataatgtatccttcagttgtgaattagctatctttgtttcatttcgttcattgatggattcaacattcattcaggacctagtttgtattaggcactgtgctaggtgctaaggctgcagaaatgcgtaagggaggagcagctttgaagcagctcggcacctaatggggaagacaggcaggtagatcgttacagccagagagcagtatgccccttaggagaaatgcctcatttggtaagattcaggaaagccatcccaaggaaataggtcaatcactcatgtttgccaaacgctaatttttacccttctgaggaaagctgtagactcctcaaaaaaacaaacaaaattttgcacataatctcaggtatttgcctattccttgaaatccaaatatctcagggtaaaagtctaaagacatttaatgttttcagtccaaattaaccctctgtagcttgccacttttcctattctaaaagtataatttccaggttaaggtgagtattttgtactgttaatattccagaacctcggccgggcgcggtggctcatgcctgtaatctcagcactttgggaggccgaggcgggcggatcacgaggtcaggagatcgagaccatcctggctaacacggtgaaaccccgactctactaaaaatacaaaaaacttagccaggcgtggtggcaggcgcctgtagtcccagctattcgggaggctgaggcaggagaatggcgtgaacccgggaggcggagcttgcagtgagccgagatcgcgccactgtactccggcctgggcgacagagcgagactccgtctcaaataaaataaaataaaataaattctagactcaccccatctttgtcatcatacagattttaattatcacctcgagtgttaaccttttaattctttgctagcctatgtgtcgcagttgtaattaataattcgtattctgctgttttaggaaagttcttttaagttttggagtcacctttaaaaagaatgaagtttgaatttattaaattatctcctactagtagtaaatagttttgccttcctttttgtttttttcctgagactttcaggatccggttttaccttttactcttgaagattcatcataaacattatggatatggatatgtgcatttgagattggttatgaacggttgttaacttagacctctttaaacctttaacacgggagttaaatacagcgggcgaacgctttccgcctaaggagcactggtgctaaggggccgccccagaaggcccggcaggtccgggggtgggggtgctcggagggagccgggagggccccgggccaatgccttccacttccccacgcctcagagagctcacactcagctcctcgtaatgttctgaccggtttggtgtttgtcatttcactttattaagtaaagaggaaatcgggaaaggaggaatagagagggtccccgagttcattcaagagcagaccgagagatgctccgatcccgagtcgggccggtggcggggtcaggccggcgcccgaggggggcgaacgcggacgccaggtcgcgcggtttaaatctcccgcctcccgcagcgggagcctgacacctccacgcactggtgcggaggggcactggctgccggagggccgggagtcggcgcggggctcgcgggcggtggccggaacgggtgccgggacggatcaccgtacggccgaacgcgacccgaggaggcggaagagcggcgccggtaagcttctgctgcctcctgtccgcccctattccccctcaggcggcggtcaggcccggagaccaaatcccgggttcccatggcgacgccgggaggcgggggcgcggcgggaggctccggccacacgcgcgcgcgcgcggcttctcggggccttgctggcctcctcggttctctgggggaccccggccgctgcctgcggccttcttccaggcgaggccctgctcggggttcttccggcctccccccaggcaaaacccgcaaggagcggtttctggcgtggctgggtcccctgcggcggaagggcgcctcccggccacgctcgctgtagtgaaggagcgcggcagcctggggctcgtttgggtgatttccctcggcggtggaggtcgctcctaatagaggcggcggcggatcacccgaacagccttcaggtgcttccctgctgacctctttttaac

SEQ ID NO: 25285 - DNA, 2300 bp, Homo sapien
caagtgattgtcgtgcctcagcctcccaagtagctgggattacaggtgcacgccaccacatggggctaatttttgaatttttagtagaaacagggtttcaccatgttggccaggctgttctcaaactcctgaccacaagtgctccgcttgcctcagtctcccaaagtgctgggattataggcttgaactaccacgctcttcctagtgcaagccatttaaacattgtatccaacagctaaagaaagaattcattccacaggcatttatgaaatatgagagacttgactcctgtccaggagaagcatcagcagctagctctacattattttctgatactattcctacactgtgccaccgtgtttccttagcgacttgtgaagaaaaagtgattatatgaagtgtaaatactacacttcattaatggcttggagatactgtgtatctttctgtaattttacccagttaagtgaataaaagcaacaggcccggccggtagccattattctgacttccaggtgtgttccttggaggactttagtcggcctcagattgagctgaagaagatattagtttactgttctcttgacttaaaacttcatcttgttggaacaaacattttctaaaataccccaagaactttactatggggcatagtaacatttgaaagtcatttcgcttgccactttatttattccttggtgagaaagataatctgttcttttcagatattttataatgtatccttcagttgtgaattagctatctttgtttcatttcgttcattgatggattcaacattcattcaggacctagtttgtattaggcactgtgctaggtgctaaggctgcagaaatgcgtaagggaggagcagctttgaagcagctcggcacctaatggggaagacaggcaggtagatcgttacagccagagagcagtatgccccttaggagaaatgcctcatttggtaagattcaggaaagccatcccaaggaaataggtcaatcactcatgtttgccaaacgctaatttttacccttctgaggaaagctgtagactcctcaaaaaaacaaacaaaattttgcacataatctcaggtatttgcctattccttgaaatccaaatatctcagggtaaaagtctaaagacatttaatgttttcagtccaaattaaccctctgtagcttgccacttttcctattctaaaagtataatttccaggttaaggtgagtattttgtactgttaatattccagaacctcggccgggcgcggtggctcatgcctgtaatctcagcactttgggaggccgaggcgggcggatcacgaggtcaggagatcgagaccatcctggctaacacggtgaaaccccgactctactaaaaatacaaaaaacttagccaggcgtggtggcaggcgcctgtagtcccagctattcgggaggctgaggcaggagaatggcgtgaacccgggaggcggagcttgcagtgagccgagatcgcgccactgtactccggcctgggcgacagagcgagactccgtctcaaataaaataaaataaaataaattctagactcaccccatctttgtcatcatacagattttaattatcacctcgagtgttaaccttttaattctttgctagcctatgtgtcgcagttgtaattaataattcgtattctgctgttttaggaaagttcttttaagttttggagtcacctttaaaaagaatgaagtttgaatttattaaattatctcctactagtagtaaatagttttgccttcctttttgtttttttcctgagactttcaggatccggttttaccttttactcttgaagattcatcataaacattatggatatggatatgtgcatttgagattggttatgaacggttgttaacttagacctctttaaacctttaacacgggagttaaatacagcgggcgaacgctttccgcctaaggagcactggtgctaaggggccgccccagaaggcccggcaggtccgggggtgggggtgctcggagggagccgggagggccccgggccaatgccttccacttccccacgcctcagagagctcacactcagctcctcgtaatgttctgaccggtttggtgtttgtcatttcactttattaagtaaagaggaaatcgggaaaggaggaatagagagggtccccgagttcattcaagagcagaccgagagatgctccgatcccgagtcgggccggtggcggggtcaggccggcgcccgaggggggcgaacgcggacgccaggtcgcgcggtttaaatctcc

SEQ ID NO: 25286 - DNA, 2300 bp, Homo sapien
atttttttaccttttggagggcctaaattcacacacacacatatgacatgtatccattcatttcaggggttaaaacacagtggcctattatctcttacaacttcatgtgaatcaacaattatctcaaggctggacgcagtgggtcatgcctgtaattccaggactttgggagaccgaggtgggcggatcacttgaggccaggagttcgagaccagcatggccaccaagacaaattcctgtctctactaaaaatacaaaaattagccaggcttggtggcacatgcctgtaattccagctactctggaggctgaggcgggaagattgtttgaacccgggagacagaggttacagtgagccaagatcccaccactgcagtccagcctgggcaacagagtgagactctgtctccaaaaaaaccaaaccaaacaaacaaaaaaaagccccacatatttcaaaaaattttattttaagaaaaacaaaaaaacctactttcaattaaaaaacacagtggttatgttaatgcatcaccacattcctagagaagtattaaggcaatgtatgtaagtaagtacatatactcaggtgcattgataatacgatttatgtatactttcagcaacaacacaaggggagagaagatgatttactagctctcctcataaagctacaaacaaaaccacagatgtaactcaggtgggagtttcctagtttatggctaactttagcttattaacacgacaaatattatcattttcactgaaaaatttgacattttttgttgactcagccaatccaagaagcttaattaatatatagtccctgccctcaagagacttccaatatagttggaagagaccaggcaaacacaaagaaagctaacaatgcaatatataccacaaggcagcatataattagttttcgaatgagtgctaacagaccttgagaccactggttaaaatgtttatatatctatatagatatacataaatggtaaatatgttttttcattttcaaaaactttttttccgttttcaaaaactgtgaaccaccactagcagacaccctataacaaggcccactgttcatttttaaattacacatataaaatgtttcattcagaaagcaaacctgaagcccttcagcctcctccacactcacaattcaaattatatagaacctacgaagctggttagaaagcaggtaatctcagaaaaaagggtgggggtgacagcagaaacaaccagggatccacaaggtcataccaaaggggtggtcggaaaggaacctggggaagggagagaaggctggaacgcttacttacttcttgttatcagtgtagaagcgtgtttggagctgagccatggcgaggagtacacacgacttgcccacggaaacgtacgggttagcagacccacaacacgaagctcctgccttttaagactacaaagaggcagctcaaaattagactgcacaggtaagcgaggaactgcagtctaagcctggactctgccttctgccctccggtctcctctgcagaaagcacgaggttgcccttctacagacgcccagaccacaaacatcgactacctactcctagatttaggagtcatcgattagaaaaggatagtcgtaaaggtagcatgtccctttaatcattgttagaattcttcccatacgtgtgggcccgtaatcgattaggaaaaagatcccactcaaatccgctttattaataaaaaattttttttcaagaggctgtcctgagcctggatagttcaaacacagctcctagttactacaagtctcagaaagcatcgcttctcaaacgctgtgaccaccgggaattgtagtctttttttgccacgctgccctcagagtatcttatttgcattaaatcctctagactccagccagatatcaaatttcctctgccttcagctttgcttgactaacgccttgccagtttttttttctcatacatattcccaaccagaggctcactcggcagaggtttttcctaaatctcgcctctaactgcggcttttagagagaggcgagaggcggaaatacaaagaaaagaacggatgagagaggaaacggtcgacggtggccgatagtggtcctactgtcgtgggactgctctgcgcgctcccggtggggcgcgcctgcgcattatgctggtctccatggcggggcctcggagccaagacgaggttgagtagactcgttttgaattttctcccctctgctccggcggacttcccatgtcgccttgtggggctatcggcggcggcaggactgg

SEQ ID NO: 25287 - DNA, 2300 bp, Homo sapien
tgcatcaccacattcctagagaagtattaaggcaatgtatgtaagtaagtacatatactcaggtgcattgataatacgatttatgtatactttcagcaacaacacaaggggagagaagatgatttactagctctcctcataaagctacaaacaaaaccacagatgtaactcaggtgggagtttcctagtttatggctaactttagcttattaacacgacaaatattatcattttcactgaaaaatttgacattttttgttgactcagccaatccaagaagcttaattaatatatagtccctgccctcaagagacttccaatatagttggaagagaccaggcaaacacaaagaaagctaacaatgcaatatataccacaaggcagcatataattagttttcgaatgagtgctaacagaccttgagaccactggttaaaatgtttatatatctatatagatatacataaatggtaaatatgttttttcattttcaaaaactttttttccgttttcaaaaactgtgaaccaccactagcagacaccctataacaaggcccactgttcatttttaaattacacatataaaatgtttcattcagaaagcaaacctgaagcccttcagcctcctccacactcacaattcaaattatatagaacctacgaagctggttagaaagcaggtaatctcagaaaaaagggtgggggtgacagcagaaacaaccagggatccacaaggtcataccaaaggggtggtcggaaaggaacctggggaagggagagaaggctggaacgcttacttacttcttgttatcagtgtagaagcgtgtttggagctgagccatggcgaggagtacacacgacttgcccacggaaacgtacgggttagcagacccacaacacgaagctcctgccttttaagactacaaagaggcagctcaaaattagactgcacaggtaagcgaggaactgcagtctaagcctggactctgccttctgccctccggtctcctctgcagaaagcacgaggttgcccttctacagacgcccagaccacaaacatcgactacctactcctagatttaggagtcatcgattagaaaaggatagtcgtaaaggtagcatgtccctttaatcattgttagaattcttcccatacgtgtgggcccgtaatcgattaggaaaaagatcccactcaaatccgctttattaataaaaaattttttttcaagaggctgtcctgagcctggatagttcaaacacagctcctagttactacaagtctcagaaagcatcgcttctcaaacgctgtgaccaccgggaattgtagtctttttttgccacgctgccctcagagtatcttatttgcattaaatcctctagactccagccagatatcaaatttcctctgccttcagctttgcttgactaacgccttgccagtttttttttctcatacatattcccaaccagaggctcactcggcagaggtttttcctaaatctcgcctctaactgcggcttttagagagaggcgagaggcggaaatacaaagaaaagaacggatgagagaggaaacggtcgacggtggccgatagtggtcctactgtcgtgggactgctctgcgcgctcccggtggggcgcgcctgcgcattatgctggtctccatggcggggcctcggagccaagacgaggttgagtagactcgttttgaattttctcccctctgctccggcggacttcccatgtcgccttgtggggctatcggcggcggcaggactgggggagtcagaggtctggcagcgctgtctgcgcagacctaccggacgctacctcccaaccccccgtcttcctcctgcctcctcctcctcccgtcacctcctgacccgccggagctccgagcaactgccggcctccgcccccagccgcagccggtcactggcggcgccttccgcgccaagcttgggggccttttcggggtcccacatggcacggcttccgacccccggcccgggacggggctcgcaggccccagaggggcaggctggagaaggaggaggttaggtgtcttcaggagggttgctgagcccaaggacgcgccatcgccgcggagaaggagccggaccccttgggcggagcgcccaatgtgtggtccctcacgccgtcccgcaccttgctttttagggttctttttccgctttctgagcccttttataccttacgtttagaaggggaaaatcatcctcccacaccttctccccgactttttgccttttttgtcttgaagttacccaaaggcctgtg

SEQ ID NO: 25288 - DNA, 2300 bp, Homo sapien
gtcaattatacattttataaatatattttaaccaatgacatattaccagtaagtacagattcaacggcaagatttcattaagaaagtgtttcaagcttcagatgcccaagacttatttaatgtgtaaatcctcaccactacaataaccacatggttaaacgatcaccacttccattagcaagctcaagcctaataagtgatctcctgggacttcagcacagaggttttctaattttattcctccactcaatgtggctattctcccttatctattcacgctggcaaagcttctagttaaactggaattagtaactatttgatgataataattaacatatactgagtgcttccgatgccgcagttaattcttatagttgataaaagtgtggcacaaaaaggttaatcaagtagcagaggcaggatttgaacccaggaattctggttccagggcccggattcggagctacaaaggtgagtaaactgaaaagagtcctacttttattgtcattgctctctaataaaaattattttttcttccaattgtttaaatctcttctcattctctatttaaatattaggcgttcatttaaacattaggcgtctaccttacagtaggacatctttaaacaacgtaaaaaaggaaagctttgtcttcacctgcacacataccggtctgcccataaattttgcaatccagttctgcctgattctaaactgcttgtctcttgaagcgaatgccttaaaaagtgacattgggatcaggatagttatctccatccatcctccctcagaaaaacaactatattagagtaattcttgggaccattgagaacaatacacaggcctttgggtaacttcaagacaaaaaaggcaaaaagtcggggagaaggtgtgggaggatgattttccccttctaaacgtaaggtataaaagggctcagaaagcggaaaaagaaccctaaaaagcaaggtgcgggacggcgtgagggaccacacattgggcgctccgcccaaggggtccggctccttctccgcggcgatggcgcgtccttgggctcagcaaccctcctgaagacacctaacctcctccttctccagcctgcccctctggggcctgcgagccccgtcccgggccgggggtcggaagccgtgccatgtgggaccccgaaaaggcccccaagcttggcgcggaaggcgccgccagtgaccggctgcggctgggggcggaggccggcagttgctcggagctccggcgggtcaggaggtgacgggaggaggaggaggcaggaggaagacggggggttgggaggtagcgtccggtaggtctgcgcagacagcgctgccagacctctgactcccccagtcctgccgccgccgatagccccacaaggcgacatgggaagtccgccggagcagaggggagaaaattcaaaacgagtctactcaacctcgtcttggctccgaggccccgccatggagaccagcataatgcgcaggcgcgccccaccgggagcgcgcagagcagtcccacgacagtaggaccactatcggccaccgtcgaccgtttcctctctcatccgttcttttctttgtatttccgcctctcgcctctctctaaaagccgcagttagaggcgagatttaggaaaaacctctgccgagtgagcctctggttgggaatatgtatgagaaaaaaaaactggcaaggcgttagtcaagcaaagctgaaggcagaggaaatttgatatctggctggagtctagaggatttaatgcaaataagatactctgagggcagcgtggcaaaaaaagactacaattcccggtggtcacagcgtttgagaagcgatgctttctgagacttgtagtaactaggagctgtgtttgaactatccaggctcaggacagcctcttgaaaaaaaattttttattaataaagcggatttgagtgggatctttttcctaatcgattacgggcccacacgtatgggaagaattctaacaatgattaaagggacatgctacctttacgactatccttttctaatcgatgactcctaaatctaggagtaggtagtcgatgtttgtggtctgggcgtctgtagaagggcaacctcgtgctttctgcagaggagaccggagggcagaaggcagagtccaggcttagactgcagttcctcgcttacctgtgcagtctaattttgagctgcctctttgtagtcttaaaaggcaggagcttcgtgttgtgggtctgctaacccgtacgtttccgtgggcaagtcgtgtgtactcctcgccatggc

SEQ ID NO: 25289 - DNA, 2300 bp, Homo sapien
cctaatgcatagtctttgtatcctatcacactgtggcattatatatataaaacaaaaaactttataataaagagaaatgtattttccaaactgtggttctccagataacaatgtgtctccatgaggaccatatagtaaatacatcccataaaaaatgattaccaaccaaaagcttgcaattaatgttccaactaaagaaaaagactcaaagtaaaagcatcagctatcctaggtactgtttggaggcaacaccaaacacgacacataaatcattgttgaaaaaaaccgtaaaacataatgctgggtatttagttatgttgaatgctaaaactaatctttccttaactaaaggtctccgtcaaatgaaaagtgtattttagtcaagtcaggatttctgttttgcaaactgaaagtcttatattattaagcatatattcaggttattttcctgatcataattttcaaatcaaattaagatcaaactctactgtcaggtactgtatattctcattttgataaatttcaaattaatgataaaaatgtattaacctgctggtcaattatacattttataaatatattttaaccaatgacatattaccagtaagtacagattcaacggcaagatttcattaagaaagtgtttcaagcttcagatgcccaagacttatttaatgtgtaaatcctcaccactacaataaccacatggttaaacgatcaccacttccattagcaagctcaagcctaataagtgatctcctgggacttcagcacagaggttttctaattttattcctccactcaatgtggctattctcccttatctattcacgctggcaaagcttctagttaaactggaattagtaactatttgatgataataattaacatatactgagtgcttccgatgccgcagttaattcttatagttgataaaagtgtggcacaaaaaggttaatcaagtagcagaggcaggatttgaacccaggaattctggttccagggcccggattcggagctacaaaggtgagtaaactgaaaagagtcctacttttattgtcattgctctctaataaaaattattttttcttccaattgtttaaatctcttctcattctctatttaaatattaggcgttcatttaaacattaggcgtctaccttacagtaggacatctttaaacaacgtaaaaaaggaaagctttgtcttcacctgcacacataccggtctgcccataaattttgcaatccagttctgcctgattctaaactgcttgtctcttgaagcgaatgccttaaaaagtgacattgggatcaggatagttatctccatccatcctccctcagaaaaacaactatattagagtaattcttgggaccattgagaacaatacacaggcctttgggtaacttcaagacaaaaaaggcaaaaagtcggggagaaggtgtgggaggatgattttccccttctaaacgtaaggtataaaagggctcagaaagcggaaaaagaaccctaaaaagcaaggtgcgggacggcgtgagggaccacacattgggcgctccgcccaaggggtccggctccttctccgcggcgatggcgcgtccttgggctcagcaaccctcctgaagacacctaacctcctccttctccagcctgcccctctggggcctgcgagccccgtcccgggccgggggtcggaagccgtgccatgtgggaccccgaaaaggcccccaagcttggcgcggaaggcgccgccagtgaccggctgcggctgggggcggaggccggcagttgctcggagctccggcgggtcaggaggtgacgggaggaggaggaggcaggaggaagacggggggttgggaggtagcgtccggtaggtctgcgcagacagcgctgccagacctctgactcccccagtcctgccgccgccgatagccccacaaggcgacatgggaagtccgccggagcagaggggagaaaattcaaaacgagtctactcaacctcgtcttggctccgaggccccgccatggagaccagcataatgcgcaggcgcgccccaccgggagcgcgcagagcagtcccacgacagtaggaccactatcggccaccgtcgaccgtttcctctctcatccgttcttttctttgtatttccgcctctcgcctctctctaaaagccgcagttagaggcgagatttaggaaaaacctctgccgagtgagcctctggttgggaatatgtatgagaaaaaaaaactggcaaggcgttagtcaagcaaagctgaaggcagaggaaatttgata

SEQ ID NO: 25290 - DNA, 2300 bp, Homo sapien
ttgtttttttttaagtagagacagggtttcactatgttggccaggctggcctcccaactcctgacctcaagatccgcccactttagactcccaaagcgctgggattacaggcatgagccactgcatccagcagaaaatttaaaaattaatataggttattgtttatatataattgcatgcatttaaaagttcgatgtttaacataactttaaaaactgattcttaaaaaataaattatcctattaaaatatttgtgaattagtcttgatttcatttttgacaccactgattcatagtaattttgtacatattataaaaggaatgttatgtcatttacctctaaaagatgcggtaaattttactttctaaagtacttttgagcaatattttatttatttatttatttatttatttatttatttttgagacagagtctcactctgtcgccaggctgtagtgccgtggcacaatcttggctccctgcgacctgtgcttcccaggttcaagcgattctcctgcctcaacctccccagtagctaggactataggtgcgcaccaccacacctagctaacttttttgtatttttagtagagatggggtttcaccacgttggccaggatggtctcaatctcttaacttcgtgatctgcccaccttggcctcccaaagtgctgggattacaggtgtgagccaccagcatcccgccgagcaatactttttaatgtagttaataagatctggcgctgataatgaatagatttaaagatcttttacatcttaggacattaaccaaggtatctggaatttaaagaaacaacttcaagctgctttctctttaattaccctatttggggatttattctaaggttattggttgtaacaataatattttaatacacagaagtctgtgaaggatactcaacaacatggttggatgttaagaccattttttttggatattacacataagaaattgcctccaaaattttgaactgatagaattgctgttgaataagatcctaacagcagtggcccaagtatggtccttgaaggagacatgacaacaacctgaatcgtctctacccctctgccatacattcactgtctaaaaacaataaaaagccctttcttcccagaataaaaacgctgagctcgccgggcgcggtggctcacgcctgtaatcccagcactttgggaggccgaggcgggcggatcacgaagtcaggagatcgagaccatcccggctaacacggtgaaaccctgtctctactgaaaatacaaaaaaattagccgggcgtagtggcgggcgcctgtagtcccagctacttgggaggctgaggcaggagaatggcgtgaacccgggaggcggagcttgcagtgagccgagatcccgccactgcactccagcctgggcgacagagcgagactccgtctcaaaaaaaaaaaaaaaaaaaaaaaaaagcgctgagctgctaattttacagatgctttccaatctttacttttgatataagataaaatccactttttaaatgtgataacaaaacattctagaaagcaatttgccggcaaaatttaatgctttagtgtgttttctgaaatccaatcattaactgtttaggctccatatttaatattttcttttttctttctgctctctttaattgtaatacgcttgcttaagaaataagcctgtcaattctagggtttgggaggtagggcatggggagaagagcttttattttcaagcttcttgtggctccaaaagataccctaatagtaagtattttcattgatgaaaaatgtaatttgctagagatctttgttttagtgatagttataaaacgtgagaatttaaatattccaaatacctgattttagacaaggaaacaggcacagagagattgtcacctgtcccaagatacatgtagttacctgtaaagtcagtcctcatctttagttctcttaaatgaatcaattgatagttttaccacaccaggctgataatggttattttaaaataaaacctgcataacaaaaagtaataattatctttatgtgtaggaaaataaaatatacattaaataccttctcattacagagaaaatgctgctgtgaagacccaattaaagctttcacataaatgaagctacagctatcatgatttagtgcccccaaaaggaagaacttcagtggacaagaaaggacatttctgggggtagtagaatgcttgaggcctggaatttaaacctgagccactatctgaaggtaattttttttaactaattgaaagtaacaac

SEQ ID NO: 25291 - DNA, 2300 bp, Homo sapien
gaacctttcagattgttatccttatcttgggaattttaagttttcctcccctaccagctatttgtcccaacttcagtttcttagccacaaaactaatgtattagaactacccttggggaaagtttcctctttgtttatgctcagctcttctttttttgatcttttggagttggggggaggggagggcggtcactggagtggggaatgggctttgattgttggcacttcttgtagcagagcctggacacaaaataaagattttattttcggtcaactttctgttttttgttttgtatgttttgtagcaagacagttttttttacagtatctatttgccatattgacactaatgggaggctctttttattttgaaactccttctaaataattttattctcaaataatataggtataatatataaaattcaaaaaccatccagaaagttataaaataaaattgcttttacttctatagcccaaggtaactacaggctttttggaatttttgcaattgattttttacttgattaggatataagtgataatttaaaatcttaaaaacgagaagcaattaaaagatattttgtagccatatattaaaaatggactgattttgtagctttacaaaattgccccaattgagaactactgtagtagacctaagtggctcggagttattggtatatatttcttcattttcttttttaaaatatatcttccttttcaaagcttgtcaaactaatgttaagtgggatgcttgtctattaatggtaaaaattgtatatatataatctctgtctacaccaggatatctattttaaaattatatactgctacaatagggcatacccaactcataaagttgaaaaactttatgtgcattaaatctctggtaatatgagaattttagaagtatttgaaagggtataccagtaccttgtcacataaaagcaatcttaaaaagccagtacagaagtgtagttaaagataggatgagggaactatataacactaatttttgccctgcattgaatgtattctggtgccttggcaagtcattttaaaaagtgttaattttttaatctatagaatggaattgattttacctaaattatatagggtaccacagtagtgaatatgagagatttgtttaagataaaacagtccacaaaaatactaagtgctttagttgatcagctatttaaactctttcagctattaaataatagaagaaaatggaattgaatatgatgtcagcatggaacaatctaatgattcattaagagtcaaccataatgacggtgaagagtcaaaaaccagtgctcaagtatttgaggtatggattcagctgggaacctttttccatcctagggtaaaacagcatgccatttaacagctctttatgctcaagggatagctgttatatttagtgtattcaagaattttgagctgggcgtggtggctgacacctgtgatcccagcactttgggaggctgaggcgggcgtatcacctgaggtcaggagttcaagaccagcctggccaacatggtgaaaccctgtctctactaaaaatacaaaaattagctgggcgtggtggtgggtgcctgtaatcccagctactcaggaggctgaggcaggagaatggcgtgaacccaggaggcagagcttgcagtgagctgagatcacgccactgcactcctgcctgggcaacagagagagactccgtctcaaaaaaaaaaaaagaattttaatatttaattatacacatattttatgatatatttaatattataatacagaacttaatgctaagatatattcataaaaattttatatacagagaaaaatctataggttgaattatgttatttcaggttccattcctgtggacaattttggtaaaattaagatagtaagtataataatcaacaattttacttaagaaatactttctgtgtatagcaatttgtgtgaattgacaactcttacaaaaaagtaaaaacaactgaaaaatggatgtcttttcatttttattatacacatctttaaaaaaaatggtgatagactgaagtgattttttttttccttacaaaagcatctaatctgtatggactccagggattcttcctttggacaaaatgattctcctacagttttgcccatcactactcgtgaagcaaataattcactcatatcacagaatataccagggcccctgactcagacacagactctttctgcagagcaattccatctagtggaccaaaatgggcaggctattcaatatgaacttcagtcat

SEQ ID NO: 25292 - DNA, 2300 bp, Homo sapien
gtaaggtaagaaaggccagaatagttagagaagtcagagaggaaaatgttggaggaaaatgaagtaggtccttgcaggccttttaaagtggaatgggaagccattggaggctttttagcagagaagtgacatcttacttccatgttaaaagatctctgtgtttgctatgttgagaataatccacggatttggggtagagtcacgggcagagtcagggaaacaagttggaaggctattacaataaactagaaagtattttgtataacttaaaccattttaaagacagtagccacggctaggtgcaatggctgacgcctggagtcccagcacttcagaaggccgaggcaggaggctcccttgagccaaggagttcgagaccagcctgggcgacatacgaagcccctgcctctaatttaaaaaaaaaaaagggaaaagaaataaagatagtggttactactactataccaccatccatttaaggaagaaagtgtggagagatggttaggtatattttggagatatagctgaaaagattagattggaagtgaagtacatgaggaagacagcaagcacacttcctaggttcttgtactgagcaagtacaagaatagagttgctaagtactaaaatagggtatcccaaaggaaaagcatattttccccccaaaattttgacatataaatttcacatgcctaatggacaaccaaggagaaatgctgaatgtaaaatgtaatttcaggataaaaaattgaaggtgtaatttgcaagcaactactctcaattctgccatggtagagtgaaagcagctataggcaatactaaaggaatgggcatggttgtgttccactaaaattttaggacactgaaacttgaatttgaatttcgtctaattttcacatctcaaaatattgttcttttgattttcgttaagcaagttgcaaccagaatggactgcaaagcctataacatttattgtctggctctttttattttatttttattttttgagacagtgtctcgctctgtcgcccaggctggagtacagtggcgccatcggagctcactgcaaccttcactcccaggttcaagcgattctcccaccttagcttctaagtagctggaactacaggcgtgcaccaccacgccaagctaattaaaatttcttttgcagagacagggtctcattctgttgcccaggctgatctcctgggttcaagggattcgcccgcctagacctcccaaaattctggaattacaggcgatagccactgcgcctcgtctctggctcttcacaggcaatttgtggatccttgttacaaatgaaacaagatgggacattagttgatcatttttgaagttgggtgacggtatacagggtttcgttatactagtttactttagaatatacttgaaatctttcacaataaaaagttgtggaaatgtttaacaaaggtgagttatcttacgcgtttttctttccttatacaaaaaccaaatctctctgaaagttgtctatagttagtaaagccttttgcttcttttctgaaaaagaaaaaccctttcgaagtctttagtggtggtaaaataagccctttggatatgacactcggtgacgacgaaagcaggcacaaaaggaaaagaggagtttttggggggtgtctgtgtgtgttttgtctttttacattactctaaattcccagaaccaatcccggttctacaaataagtgaaacaaaatcccctttaacaccgtagggtctcacgccctcagatgactcacggaaatgacgccatcagcgaaaagcggggcgggcgtagacgtcagcacgtcagccctcctccatgtccagctgagggaaggctcgtttcagtgccgcggccggcgcccgccaagggatgggcagccagagcctgtcgactgcggctgcgcaggtatgctggggcggggcttcaggtcaccccgcccatccccagcctacgcgaccattgaacagctgccgcccaacggctgggtaaatcctcagcggccgaaatgattagcccagggggcagccccgccccctgctcctcccggcctctcgccccgcccccatgtcccgcccgctcgtctgcctggctgcggggtgacacggggcttcgccttgggaaggggtcgagggaagcagttagacggctgccgggcggcggctgccgcgcggcacacaatgtgagcccggtgatggggagcgggccgttgggaagagggggcggcatggcaagaaatgggagggccccggtgcttggtggtggaggggctgcagag

SEQ ID NO: 25293 - DNA, 2300 bp, Homo sapien
ttgggctcaagcgatcctcctgccttagcctccaagtagctgggaccacagacatataccactatacctggttaatttttttttttccagtggagatgaagtcttgctatgttgcccagccaattttctatttcttagctgatttggcataggtttcaaccaggtatagacctcaggccagaaacaggtttataagaaatactgcatttttttcattatctgtgactcaacatgccttgattctaagcccacatctttcaggctggtaagatatccatgctttgagctgggcacggtggcttactttggagggccaaggtgggtggatcacgaggtcaggagattgagaccatcctggccaacatggtgaaaccccgtctctacgaaaaatacaaaaattaggtgggtgtggtggcacgtgcctgtaatcccagctactcgggagcctgaggcatgagaatcccttgaatctaggaggcggaggttgcagtgagctgagatcgcgccactgcactccagcctggcaacacagcgagactccatctcaaaaaaaaaaaaaaaaaaaatccatgctttgttatgccttggattttctgccatccccagagatgatagggttttatttaagccactgatttttgatggggagggagggaggtattctctggttttggttgtgtgaccacaggagtgaccttccatacatctcttgtgctcatctgcgtagcccacttaaaaccatctcctctcggaacacagatttattatttcatgaggttgggtacttcagcgtccatagggaacttcaaaggttaaatgatcagctctatgttacagaggtgagatttagtacccatgtctttagacgttgaatccaggtatgggtttttattatgaaagaaacaccagaggaaccactcatgtctgatgttggcatttgcccttaaagaaccatatagtcttacatagaaaccatttgtcacaaaatgttgatatattactttttaaagtcttctgttgatgcccatgctcagagctctacatttcctttttttttttttttaatacccttttatctctcttctttccttttactggttatcttttctccctcttctgatcacatggcttggggagtctatactaaaacaatgatgtttagtaaagcagttgacaaattttttttttttgagacagagtctcactctgtcacccaggctggagtacagtggcacaatcttggctcactgcaacctctgcctcccgggttcaagcgattcttctgcctcagcctcctgagtagctgggacgaatttataaatgtgggaaatgtgataacctataggataattacacttcatttggtaaaatgatacaatgaaaccagctaattttttgtatttttagtagagatggggttcaccatgttgaccaggctggtctcgagctcctaacctcgtgatccacccacctcggcctccaaaagtgctgggattacaggcgtgagccactgcacctggccaacagttgacatattaaactagttatgtagatacttcatttttactttacagttattgtttcttttagaaatggtatgcacactgctatacacagtatttagtatacatagtatttttaagtggaacataatttattctaagtattttcattaaaaatagtacaattgaagatatcaaatagtctgtctctctctttagtaagcctcttctgaaataagaaaaaccactctgctctaataatcttctagttactaatcttctagttacttctagttactaatctagttactaatcatcatgtgctacatctgtgttgcagacgagaaggcacagagtatctggaataaataaaagagcttctttaggatttgggctgaaaatgaagttcatttaaatgccagagattttcttcttgtatttcaacaggcttcttatttttttccctttctgttgtagggtagatgatatgcctccaggaatatctctgcttcctgataatattctgcaggttctgaggatccagcttctacagtgtgttcagaaaatggcagatgggttagaggaacaacagcaagccttgtcaattttgcttgtcaagttcttcattattctttgcaggtatctagtagaaaaaataagctagttttcactcataggtgggagttgaacaatgagaacacatggagatgaggaggggaacatcacacactgggcctattggtgggtagggtgctaggagagggataacattaggagaaatacctaatgtagatgatg

SEQ ID NO: 25294 - DNA, 2300 bp, Homo sapien
tgcttccttgcttttcttttttttattttacctcatgattttgtcacagttcttgatatatatatatatatatgtgtgtgtgagaataagagatctctatatatagagtttatatatatatacacatatatacacacacatatataatttatttgtttaactgacagaaaagaaaaatatatatatttgttgtataatatatatgtataatttccttttctctttaatggaaatgcatagtgtttcattgtatggctatttaataaagtattatctggttccttattgatagacatttaggttgtttcctgcttttccatgttataaactgctgttatgaatgtctttttatgttttccaatttgtggtaatacatctgtaggacatactccatgaaatagaattgctgtttcaaagggtattaacgttttacattttgatggatttttccacattgtccttcaaaataactgtaccagtttacatttatacaaacagtgtgtgtgacagtgattatttccctatgtacttagctctgagtatttggagcaggtcatataaattgatcctttccttttcacgtataattagaaacagctctcagtgcagcttggttttatctattatttatgtataaaatagatataaaataagtcatattttatggaaactttaaagtcagcatgaaaagtttctttgccaagtaaagcttaatctggaagaaaaaaattgttattctgcacctataaagtaacagttgctcactgattgatattgtattaataaagaaagaatcttcacgtcattgtgactccttgccttctgtatcaacatgtattagtactagtaatattgaagtccttaccaacattgttcatctcttgctctgaaaattgtcagagctaaaacttctgttaagagagatactcaaaaccctggaagctagagttcttttcatctacatagaagtttattgactttgtgataaaattgtcttaaaagatcttaactgaatgtctaaagctttttaagaacttgtttttatctaaaaattttaatcaattggatagtagagatcatacgtattctcatgtcactgtttactattctagctaagcagtggcatccatcttgctgaaattcattttctggaattaaagtttagtttttgttctgtttgtataatatagacttactaagcaatgtagactttagtgtagacatactgaacaaaaaagtttttgcaaaagcaaccatggctcatgcctgtaatcccagcactttgggaagccgaggcaggcagatcacaggaggtcaggagttcgagaccagcctggccaacatggtgaaaccctgtctgtactaaaaatacaaaaattagccaggagtggtgctgtgtgcctgtagtcccagctactcgggaggctgaggcaggagagttgcatgaacctaggagccggaggttgtagtgagtcaagatcgcaccactgcactggtgcgacagagcaagaccctgtctcaaaaaaaaaaaaaaaacttaactttccctgaaaaaaacgagacagaaaaacatccttggtatactcagtttctatcaaaatgtcttatgtgtcctattcactcccctaatgctagtgcctaaaactgtgcctagcacatagtaggtgtgcaataatatttcctgaacaaatgtagggggctcatggaaagtatttagttgagaggatattactctattatttaacatataccatcatcctattcattttaatttttcttttttatcttccagcagatattttagtgtactcttactctgtacaatgagtaatatggagattagttggaaacacagtgccagtcttccaaatagtttataatctaattaagaatataatcttttgaaagtatattcttctatagtttctcattaaattaccttatcattaaaataactgaaaatattatttttgatataaagtactatgtactttttgaagaattttgtattctaaatctttttacaggttttgcaaattttgcagttccagccagatgcagcacatcaaatatcacagcaagtgggttggcaagacaccttagttaggctttttttaaaagcaaaatttgaaaacggaaatactcttcataagcacagtagagctgttttaatgaaagacaatgataaaaatatgtcaactgaagataccaagaagaactctgatgaaaaaacagatgaggaaaaaatcacctcttttgcctcagctaatgtgtcttcggatcagtggagtttggaggat

SEQ ID NO: 25295 - DNA, 2300 bp, Homo sapien
tggatatttaactttttatgtaaatagtattttcttaaacacataccaaaaaaaagcccataatattacattggtatttcctggatgtagggattgtatgacttttttttctttaatttattggactcttggaattcagttcctttagtcggattcaaaaactaaaaggtgggaagagggatgggttgggggaaaatatgagcagggtagagaagtcagagctttgagtcatgttagagatcgtttcctccaatgctgtttacattgctaagatttacatggaaagagtacctgaagtctcttgttgccttatcctgcaaagacctgtgtgtacagcgcagaccagcttttggcacaaatacattcttgaagtggtttcaggttctaatactttttaattttattttgcttttatttatttgggaagtaatatagatccaagtgaggatatagggttaagggagaaggagtcacaatatgtcatttttcctgctttaattttaagacttagatctttctgtagccaaggaaaaaggaaacccctagtgatctaatttacctttcctcactggggattaaggccaaagcttagtagtagtatacagtatttctttgtctgggcttgtgccctgactatgtatattactcgggaattttaagggtagttcggtttctgatcaaggacttggactcctgtatacctgttctttatgtatcaaaatattttgatttcaaataacagaaacatcaagccaaattgacttagttaagaagatttttttgctcatatagtttagaatttcatagttaaggtgagtttaagcaggattcagtcagggctccagttccatttatttgctgtcctcacagcaccactctccatcatctgtcagcttgtgttaagctggcttcccttatggacacagaacagctgccaatagcaattagggctgtatgctacttctttcatatccagagaaagagagtgctttttcctacagccattgttggtagacagttctccatgggtctcttgtgtttctatatatcttgaatagtgactctggctgcctttgttatgaactagatttttgaggttgttcatatgagcaactttggaagatagaggttatgtcttcctccagagaaaagggaagatttgtttactatccaatataataaagataatgtctccctccatagcaaaatcagacaagtttgctgcccggtataaaagatttgggttccctttgctggacacggtggctcacacctgtaatcccaggacgttgggaggccaaggcaggtggatcacgaggtcaggagttcaagaccagcctggccaacatagtgaaaccctgtctctactaaaaatacaaaaaattagccggacatggtggcaggcgcctgtaatcccagctacttgggaggctgaggcaggagaatcgcttgaacccaggaggtggaggttgccgtgagccgagatcaagccattgcaccccaacccgggcaacagtgtgagactccatctcaaaaaaaaaaaaaaaaaaaaaagatttgggttctctttatactggtggtttctctcctaaaatgtgtctacatgtgcagacatcatctagtcctcttcatctctcactgtgggaattgcactttgagaaaacaatgcaaatgctgatactctggctactgctattgctgtagatcttggtctctgactcaggagtcttgtgtcttctgccaatacctgtgaaactgtagcagctaaccctttagcttggaggcaaagtaacatctgagacctttcacagttcttgacagttatgtaaaaattctgaatccacagagccaggcagaacttgtgctttcactaaatgtttgctttagtctgctctttctcatctaaactgttttcctccaggtttgtgcaatggcatcagctaagctaaatacccttcttcagaccaaagtgattgaaaatcaggatgaagcatgttacattttagggaagctggaacatgttctaagtcaatcaatcaaggaacagactgaaatctactcatttctgattccccttgttcgtaccctggtttccaaaatttatgagcttctcttcatgaacttgcacctaccttctttaccttttaccaatggtagctcctcattttttgaagattttcaagaatattgtaattcaaatgaatggcaagtttacattgaaaaatatgtaagttttatcttttttgatcaagatttttctgctaatttaccatttttatagaggtgaagtcatatattaa

SEQ ID NO: 25296 - DNA, 2300 bp, Homo sapien
gtgatgatagttgcacaattatgaatatactgaattaaacctttgaatcatccacttaaaacgagcaatttatatgttaattttatctcaaaactatgcctcttcttgaatatactatatactgaaatgttttagatggtcagatgtctataattaaattataattaaattcaaaattctgttaagatcagctctgcttcaaaccaagattaaataggtgtaaaacacaagagacaaattggtcattaatgtcactttttttctttgtagcatagccttaccttagactcaaggccattaaatacttaataaatccaggaaaacaatatcaaatgaaataaaacagaagggatttatactgttgttttattagggaaagcataatacaattgcagcatatccatttgagcttcattcagctactatagacgcagtgcccatgattaaatttaaataaataaaattaagccgggagcagtggcctgggcctcttagtcccagctacttggaaggctgaggtgggagaatctcttgaggccaggagtttgacactgtagcacattatgatggtgcctgtgaatagccactgcactccagtctgggcaacatagtgagaccctcatctctaaaataagtaaatacataaaattaattaattgaaaattaaataatattaaaataagacaatagattatgcaagtaaaacataaaagctttagccacagagttatttccctaactcactctctggttttaagaggaagagtttgtaaaaatatttatatatcagtgattaaatcagcagcgttcctatagatctattaaccaagtatattgatactataatgtttataatcatatttatactctgattttcaaatattgaaataacattcactttctataataaattttattcagcaaaaatgccttttttttttgagacagagtcttgctctgtcggccaggctggagtgcagtggcacaatctcccaggaatctctgcctcccgggctcaagcagttctcctggctcagcctcccaagtagctgggattacaggtgtgtgccaccacgcctggctaatttttgtatttttagtagcaacgaggtttcaccatgttggccaggctggtcttgaactcctgacctgaggtaatccacccacctcagcctcccaaagtgctggaattataggcgtgagccactgtacccagccctaaaaagactcttaagattatatttaatttatttgaaatttttctccagtgtgatttggttttcaactaattcaactaaggtgctactggtgattaaaattagagtatttagttcctgacaacacaatatgaaagatagagattatcataataaggagagtaaattgtacatgtaggcattaaagaggagattcagaaaacagtacctctaatcattaggaaccctgaagggagtttaaaagttttgtttcatgtcttgttgttgatttcattcaatatttacttctcttttaatttctacatgcaggtttgactgtgcagatcgacagttccattctattcctgctacctggcaagctcttatggataatccatatgatgttaaagaacttattcctgaattcttctatttcccagagtttttggaaaatcaaaatcgtaagaaatagaggattaaaaatttgactagcaggtcccaatggaggagcctcaaaaatgtctttcaggacatttttgtaatatcctgtagattatttaagattcattctgtctgtggattacttagtgacagggctgaactaatgctatgagtcttaccttccagggaagtgctatagggaactaagccaaaggagtcaaatttgaatcagtaagagaatttatcagactacagtgtttactagggaagcaaaaatgaccatatgctatttcagctatatataccacttaggttaaaagtgtttgagttagataaggtgaggatttagactaaccatcagctgactacaggtctgttaaccaactccatgggcaaactcatgtctttatatatacagtttcactgaatacagccagtcaattttttttttttttttttttttgagacagggtctcgcttttcccttaggctggaatgcagtgctgtgatcactactcactgcagccttgacctcctgggctcaagtaatcctctcagctcagcctcctgagtagctaggactacaggtctgcaccaccatgcctgcaatttttttttttgtagagatggggtctcactttgttgtccaggctggtctcgaac

SEQ ID NO: 25297 - DNA, 2300 bp, Homo sapien
caagataaaaattttagatgtcaatacaaaaaatgtgtgaaaagatatatatgtgtgtatgtgtatatatatattatatatatattatttatatatgcttttagggagtatctgggcaaaacgttttaggaacacaggaagaggaggtagatgtctagtttagagactcacactataaaatatggtgccctgacaatttctggaatttttgtctcttttttacagccctcaaagttcagagagtctcaggatgtaggtcaatttaggactaaaagagaattctagatatcttgaaggattggtacctaagattacggtacctaagattacggttatatggctaccttatgcagttaaaactcttatgtttggccgggcggggtggttcacgcttgtaatctcagcactttgggaggcccagaggggcgaatcacgaggtcaggagttaaagaccagcctggccaacatggtgaaacccatctctactaaaaatacaaaaattagctgggcatggtggcgcgtgcctgtaatcccagctactcgggagggtgaggcaggagaattgcttgaacctgggaggcggaggttgcagtgagccgagatcccgtcactgcactctagcctgggctacagagggagactacgtctcaaaaacaaacaaacaaaacaaacaaacaaaaaactcttacatttactgttttgaaaacctattgggaacatcagtttgacaagaaatatctttaaaattctgaacaagagacttaaaaatgaactttgaacatacgacagtttaaagcacatttatatgcagagaaagacttaaaaatacaatttctgccaagtgaaatattaaacagcatgtttcattatatttgctatagatgccaaaagagttgccattttcaatgaggtatgtttcctgcttatgtaacagtcatttatcatagaagctgtaaaatgcaatctggaatttctcttgccaaattgctgcctgttcttgacattttatattattaaagctataaaatctataaatacttttagcacactttcactaaaagcagcactagtaagtagcaggccttgtcttgtatttcagtagccacgtcaaaacttctgagccaggcgaaatagaaagaggggtcctagggtattttatgcccagggcaacaaacgccaaatgctgacgtagatagcacttattcggttttgccaggagctgtgctaagtgattttcataaaatatgtaatttaacctacaggcaactccatgtggtattattttcacttttttacatagaaggaaatggaagcttagaaaactgaagcaatttaccgaaagtcagagttaacagagcaaggaaacctgaacagtgtgcagcctccgctcaccagaaagtgtcaaagaatcacatttactagtacttcagacagaaattctgcgaaacaaggcgtatctactcttgttttactcccagacacttccctgtcccgcttagatcagtggtggttttcactcaaatttaagtgtgtaacagtgtccccgggagggctctgttcaaacagattgttgtacgcgccccctacccctgcccaccccgagtgtttgattcagtaggtctagtttgggatcgagaatctttttattttgttttccttttgttttgttttgttttgtttttgagacagggtctcgccctgtcgcccaggctggagtgcagtcgtgccatctcggctcactgtagcctctgcctccccggctaaagtgatcctccagcctcagcctccggagcagctggggccacaggcaagcgccaccactgtaggctaattttttttttttttttttttttttttttgtagagactggggtctcactatgttgcccacgctggtctcaaactcctgggctcaagcgatcctcccgcttcagcctcccaaggtgctgggattacaggtggagccaccgcgcccggcatcgataatctgaatctctaacgagctcccgggcgacgttgatgcagctggtaccgggaccactcttcgaaaatcatcggtttagaggttttaattctgaatccattgcgaaaactgttgggcggacagagcactactaactcctaacttttctcagaaagctgggctctgctttcgccagcaacccggtccgaagtcgcgggcatattctgtctgaaatcgtgtgcaccgaaatccccgccttgcggtggaggctggcgctaggcggcctcagcctcggcctgctgcgctcaggaacccgcgccccggctcctcggcgatcc

SEQ ID NO: 25298 - DNA, 2300 bp, Homo sapien
gtgggcagatcacttgaggtcaggagttcgaaaccagcctggccaacacggtgaaatcttgtctctactaaaaataaaaaaattagctgtgtgtggtgatgtgtgcctgcagtcccagctacttgggaggctgaggcagaagaatcgcttgaacctgggaggcagaggctgcagtgagcagagatcatgccactgcactccagcctgggcgacagagcgagactttgtatcaaaaaataaaaaataaaaaatttaaaaattagccaggtgtggtggcatgagcatgtagtcccagcaacttgagaggctaaggtgcgaggatcgcctggggccaggagtttgaggttacaatgagctatgatggtaccactgcactgtagcctgggcaagagtgagactctgtctcttaaatgaaacaaaacaaaaaataaagattaccaatgttatcaaattattaggccttaacttaaaatatctgcagcatttgacttagctgattatcctcttctgcttaaaacatctggcttccttctatttgtgtggctgctccttctcagtctcctttgctggctcttctttctctcctcaaccattaacattggagaatccagggaatggtccctgggacctcttctctcctgtatctaaattgtctgggagatagcaaccagttctcctcgctttaaataccatctatacattgatagctcccaaatgtgtatcttcagcctggacttttcccataaactcaagacatatattcagttactcctcaacatctccacttgaatgtctaacaggcatctcaaacctagcccacccaaaaccaactcctaatctctataaatccccactacctcccaccaaaacaaaactaaagaacaaccaccaccagcaaaacccctgatcttccctggaattaatctatccttccagataccaggctaaaaataactggtgttttccttgatgcctctctttcacatttcacatccaatccactgggaaatcccattggcactatcttcacaattgactagttctcattatctgtgccactactaccatgatccaagctgaaatgataatatcctcctaattacttggcttgcttccatccttacctggagacccatgtcaattcatgacttagcaaccacaatgattcttttaaaatttatctaataaaattaaatttgaattctatccaatttcaaatggcattcatctgctgaaatcctccagtggcacacagcaaaagtccattaaaaaagccttacaagtcatttaaaatttgtccttcactcccatctttctgactttctctcctctggtatcttcctcatttactacactctaaccacactggtccccttgctttccaggaacacaccaggcgtgtctccctctgaaggtttgcatttgctgctccctcgacccagaatgctctttctcagaatggcttgcaccttcaccttcttcgcgtttctactcaaatgtctccgtatctcctggccatcctactttaaaataacaatctacctatccccaactttatttctacccacaatcctatgttatttgtttctattgtctgttccccttctctaggaaataaattccaagagtcaggaattttctgtccggtttgtttcacggctggattcccagcacgtggaaccatatctggcacatagctagtgctaagaataaacagtgtgcttctatgagctgatcaaagaagagtatcattttaaaatcaccaaaaattcaagaaccactaaaattgtttagtttctcagaaaataagatttcaggaagtccctgattgtgtagttgcaagattctagtctaatccatttacctgctcggaaaagaacatttaagaaggtgtatggtcaattccagcagttcagctacttttcaactttcactgtaaaaccaccaccttgctttgtagaacaggtgttttttgtttgtttgtttgtttgttttgagataagagtctggctctgtcgccaggctgcagtgcagtggtgcgatcttggctcactgcaagctccgcctcccaggttcaagcgattctcctgcctcagcctcctgagtagctgggattacaggcgcccgccaccacagccagctaatgtttgtatttttagtagagacggtgtgtcaccatgttggccaggatggtctcgatatcctgacctcgtgatccgcccgcctcagcctcccaaagtgtgtagaacaggttttaaagacggtcctcagtcatcaacacttttgttttcagaccctcc

SEQ ID NO: 25299 - DNA, 2300 bp, Homo sapien
aaaaatggccgggcacagtggctcatgcctgtaatcccagcacttcaggaggccaaggggtgtgaatcacctgaggttaggagttcaagaccagcctggccaacatggtgaaaccctgtctctactaaaaaaaaatacaaaaattagctgagtgtagtggcacatacccgtagtctcagctactcaggaggctgaggcaggagaattgcttgaacctgggaggcaggggttgcagtgagccaagatcgtgccaccacactccagcctgggtgacacagcgagactccatctcaaaataaataaataaataaaaagaaagggaccgagcgcggtggctcatgcttgtaatcccagcactctgggaggctgagttgggcagatcacaaggtcaagagttcaggaccagcctgaccaacacggtaaaaccccatctctactaaaaatacaaaaatgagctgggtgtgatggcacgcgcctgtaaccccagttactcaaaaggctgaggcaagagaatcgcttgaacctgggaggcagaggttgcagtgagccgagatcacgccactgcattccagcctggtgacagtgagactctgtcacacacacacaaaaaagataaagaatgacaaaaatctgtgcctacattcagagtgacaagaatactaatgttctgcttgtagaaaagactattggttcagaatatgttaaatgcaaataatattttgtataatatatataaattacatatgcataaaaagagtatctatattagaatcttttgagacagggtcttgctctgtcaaccatgagggagtgcagtggcactaccacagctcactgtagccttgacttcctgagctcaagccatcctctcgcctcagcctcctgaatagttgggactgcaggtggtgccaccaaggctggctaagtttttatatttttttatagaaacaagcttttgccacgttgcccaggctggtctcaaacttctaaaagctcaagcaatctggccgccttgaactcccaaagtgcttgagttataggcatgagtcactgtgcccggcctacattagaatcttaacagtggggctgggcatggtgccccatgcctgtaatcccagcactttgggaggtcaaggtgggcagactacttgaggttgaggagttcgaggccagcctggccaacatggtgaaaccccatctgtactaaaaacacaaaaattagccaggtgtggtggcacatgtttgcaatcccagctacttgggaggctgaggcgggaggatcacttgaacctgggaagcagaggttgcagtgagccgagatggtgccatggcactccagcctgggcaatagacagcgggactcagtctcaaaacaaaaaaaaaaaaaaaaaaaaaagaatcttaacagtggttaacttcaaatagtgaaactatgactgttaactgagtttgacatttttgtgttttcctagatttttctacaataaacattattatttcataataaagcagtaaagactttttatacaaactattttaagataaacaaattttgacataggggttataagttaggtagaatctatttatataaaaaatggaactgtacttttgtgggccaaataagcactatgtaagtttttttaattttcccaaacacatgcacagaattaatattgccttaaattttgttagcacaagtttgagagagctctttagttcataaaaaaatgttttatggaccaggtgccgtggctcacacctgcaatctcaacactttgggaggcccaggtgggaggatcgcttgagcctaggagtttgagacaagactgggcgacgcagggagaccctgtctcaaaaaaacaaaaccaaaaacaagcaaacaaaaaaacagctgggcatggtggcatgcatatgtagtcccagctattctagaggctgaggtgagatcgctggagcccaggaggtggaggctacagtaagctgtgatcatgccaatgcactccagcttggtcaacaaagcaagactgtgcctcaaaaaaaaaaaagaaaagaaaagaaagaaagaaaagaaaaagaaaaaaagttatgtacgtatggtttttttttttttttggatagagtttcactcttcttgcccaggctggagtgcaatggtgcaatcttggctcaccacaaccttcccctactgggttcaagcgattctcctgtttcagcctccccagtagctgggattaaaggcatgtgccaccacgcccggctaattttgtatttttagtagagatgaagtttctccatgt

SEQ ID NO: 25300 - DNA, 2300 bp, Homo sapien
aagtaatgataggggaagagtctgtctaccatttaactcacctgatgagcttcttcaacattattttttgatctattgaagtttagtctgaaagaaaagtttgcttcatctaacatttgttttattcacttgattattcatatgtcgtattcactgaagcaagttgatgtgtcatttaaataactactcatttccatcactcatgctctcaaactaatgaatcttagtgtgtgtgaccctgcagctttcatttttaacaagctcctcacactgaagtttgagaaccactactacagaagatggttaaagtgcttaagaataaaactagttggactagaccaacattttcaatatcctttaatttaggttccacagtgaaaactcatacattctgctaatgtatgtatcatgaagccaatataacattagggtttgctccagatatttgtaatgatatggtattaaagtgattttttttttttttgagacggagtctcgctctgtcgcccaggctggagtgcagtggcacgatctccgctcactgcaagctcttctcccaggatgacgccattcttctgcctcagcttcccgagtagctgggactacaggcgcccgccaccatgcccagctaatttttttatttttatttttagtagagacgggttttcactgtgttagccaggatggtctcgatctcctgacctcgtgatccgcccgcctcggcctcccaaagtgctgggattacaggcgtgaaccaccgcgcccgtcctaaagtgatttttttttgaaagtataagtttcctcatcatctgaatgaaaaaaattcactgtaggagggccaagagatcaccagattaagaaaagtgttgaaacaatggatcttgttctaactacacaagtctaagatggtactgcctggaatcaactttgattttccacagcacaaataaaggtcatggcttcatatctcagcaatggtcaggagttttagtttttccagattacattgtgtggggtagtctgatttaggaaaacaagacacagtatctggagaataaaaacagaattataactctgcaagaggaaaattatctgccttgaatttttgtagcacttaatgttttttcaaggtattttcacaataaacgttgattttatctatgtaacagccctgtgaagaaggcaattactactagcaaaatcgttttcaaaattttaaatactgaatccatgaataggaaaaaggacagcgaagttgatagcattagagaaatgacagaaaaggttatgagtgaggaagcgaatcatagaaatggcaaacataaaaagctgaggcccacggcaccgcaaaccaggagagaaaggggctaatctggcaggggagaacagcgttagtggggaagtgcaaagaggcaggggcgcaggaaagctggggttaggaaactgcaattcactgcaacaaagaggatgaggtcaaatctgagaaaaatgaagtcaggtggcattgaaagctgcgtggaagttttattcctgccctgttgaggtgtgatctttcacagaggagggtcccaagagtggaggctgtgccctccttcggcctcccgtcagcagcagagggagaaaagcctcgagaagttccctaggccgatgacctccatggggacggagccgagatgagtcccggagggagccggcaggaagccagctgagcagggtggtgtgttcccgccgggctaacaaaggccgccgggaggtgggggcttctccagccgctccagcggcgggcgggcggcggaagggttaactgcaccaccaactcccgcgcgcatcccggcccctacccccgccgtcgctaggagacgccggaagtgggggaggggccggcggcgcgggcgagggtgggaatctttttcgggctcccgggggcggagggaagggagcgcgcgtgcgcgcgcccggccggccgtcgccgcggtgaccgtcctcggagtccgtcggctcgcgccccgcccccgtcgccccctcccctgtcgcgcgctggggctgtttctcgctccttccgagttaccgccgccgtcgccgccgctcctcctctcccggtcctgggtttccttggcgctgcggccgccgctccctctgcgacctgtatgaggaggaggaggaggaggatgtgaagatggcggagctgcagatgctgctggaagaggaaatcccggggggccgccgggccctcttcgacagctacacaaatctggaacgggtggccgattactgcgagaacaactacatacaggtgcgaa

SEQ ID NO: 25301 - DNA, 2300 bp, Homo sapien
tttgttatgtagtgtagcatattatttcccaaaagtgccactttatttcactgcatacaagttgagttttccttaaaattttttaggtgagtacccagaacatgaagatgggtgggctgccgcgtacaacacctccaactcagaagccccctagtccccctatgtcagggaaagggacacttgggtgagtatataagtagtaattgaaaaccatttcatgtagtattgtttaaaaatgaagcacaacatatttaaattattttttgaatatttgaagagagaacattttctttgtaggattgttgtttgtgtgtataacttcctcttctcttgggaaacacatttttatacttcagaaagatttgtttagaaattgtttttctagtgaattttaaatttgaggtaaaatcctagcccaagttcatagtttattgtaaattgcagtctaattttaattccttttctttcagaaaatgtatatagtcttttatattacagtttaactccaactatcctttttaagctgtgtagattataaaattctataaaacttataagaatattgagcttcaggccaggtgtgttggctcatgcctgtaattcccaaagtggggattttgagagaccaaagcgggcagatcacttgagcccaggagtttaagaccagcctgggcaacatggtgaaaccctgtctctacgaaaaatacaaaaataagctgggtgtggtggcatgcacctgtagtcccagctacttgcgaggctgagacaggaggatcacctgagcccaggaggttgaggctgcagtgagccgtgatcatgccactgtgctgcagcctcagtggcagagtgagcccctgtctcaaaaaaaaaaaaaaaaaagaagaatatggagctttattttggtcctagagttgggctctagatttgacttttggcaaaaatggccaattaatggaaaagcttgacttttttcttctagagcatcgtattataaacttgacttactgtgattgagatttacgattaggttggcattagtatagcccagaagccaggtgattaaaattctgtttcagctgtgctgttactttataattcctacatagtcagctgccaagaattcagttttttcatctgtaaaaggggggtaatatttgtcctctataaatttttcaaggtcactgtaccacaaattggatttttaaaaatgtgtaagacaaagacaaaatgttttgacaaccattggctttatgatatatgctaaacaagtttttaattgacagtcttgtttttggcttcctcagcaccaccaccatcaccaccaccaccaccaccaccaccaccaccaccaccaccaacaacaacaacaacaacaacaacaacaaaacaaccacaaaccttcaaaaaaccgaaacccaatcaagcactgaatcaggataggaccaaatgatttgagatgtagtggaggatagtgctggaagagagataataggacagtaggagaccaaagaataaaaataaattccaaccaggaataggatgactttattaggagtggacaaaataattctgcttagagagagagaaaatctagtggatcaaacaagatttaaacttcaaggtagaatgtagatggcatagtagtgtataatggtgccaggggtcggggtagagagatgaagaggaactctgtttttattttcctatgtaaacatttacatttatatcatgtgtagtgccttatggattttgttgggttttaagtcaagattgttagtaagataagctacttagtccccagaaagtccctagaagaatgaaactttgtgttgttttcaagttttgaagatttgctcatataccaatgtttgttttccttgtatattagcaatggttctgcaagatccttggggaccagagttgctgaggcccactctgctagttgatggctataacctgtttttccacatagtctttgcctagtcaccacattttgttcctttgctccttttttttttaaaaaaaatcttatttgtgtcattgccttcactctgtagttctcaattatcaaataatttttacttggatgcaacagaacttatttttttgagacagagtctcactggagtgcggttgtacaatattggctcactgcaacctctgccttctgtgcccaggcaattctcttgcctccaggcgattctcctgcttcagcctcctgagtagctgggattacaggtgtgcgccaccattcccagctaatttttgtatttttagtagagatggggttttgccatgtt

SEQ ID NO: 25302 - DNA, 2300 bp, Homo sapien
ggccctggggattccactccagtaaagtagaatgaaggatacaaatgataaaaattacacttttttttttggtttattccccagtattaaaaacaaagcaagctgagtctgaacaaatggatctttctgccatcatttgtacaatgctgagctgtctggattgaaataaaatgaccatttttatgtatgtcaaaggtataacagcataactgtgtagccaaaacaaaatcagattaagactgattcagaaaaatctgggatctttctcaggaatactgtatacccttgggatttctcctcctgcagaatctgtggcattggatgttcttcattgcctgtgctaaggggttaacctcatggcccagtgggtaccctagccccttcttttcttccacttgtatgaagaggagggaaccaacatttaaataccacacttaaccatttttacaattatttcagatggcttttttcctctgtgacactgtaaattctgcattctctcagcacttgagtgcaccaaacgagtgaatgctgaactcacttgcatcccttcatgtttctgtttgtggattataaggatgatgaaatgtgaaagtctcccaacactctgagggtggtgaacgattgccacccgtttgattttaatgtgctgctgcatgagactgcattgttgctaatggccagtgtacccagatgtgaagtgtggtaggctggttcatatgtggaggtgggtgtgtgaagctagacacgaaggtccctaaggttctgaagagacttgaactgtggaaatgctcttagcaggcatcccgaacccctgcttcggtgctgttttgaggagtaggatcttggagttcagaccaactatgactatcatttccttcactatctagaaaaacgctattctactttggaagagaatagtagttattttcaagtctcctgacagtcactgggagtacaaggtttgctaatgtgctctctggacgttattaatggccagtattagttgctgctgtattactgactcgcttagctgtagaaagggtaatactctcctgattttgtatgattggactcttaagtagctgctgttagtcagaattaaaacccatctcagactaagaatataatgaataagattaataggccaaaatatgtatctaatcacattgataaaaattaatataactgacacaataaaacacatttcccccatctgtacaataaatacagcttcaaattcagtggagtctgtagggcagataactttaatcatcactactgtagtcagtataagaaatgctgaaaaaaatccaggagggcttgtctctttgtgggtggtcactgtgatgttgggccagctcctgttcaggtccagagctgctaacgtgggttctactcagtcccagtgacttggccagaatagagctttgccaggtaactgccctgtgctaggtgaaaggggaaaagcagtagctggatatatttcaaatgaggttttgaacaagttcagaaagtggaacttgattgaaaagtgaacaagtgtagtagtgtgtgagaaaattcagatggtgtcggatgcagaagttaatattccacttaatgttatctgagcattaaaaatcatcagcatttaactgagaccccactatagagtttccttatcaagactttttggttttaaagttgtttttaatgcattgcaagttacaatagctattttgcttttagatttttcccagcactttgtatttattagctttcattaacttgcctccagtatacattccacttcgtgcttttcttaggtcatttctacatcccttattccttgttttcctgcagtgtaatggccctgaatgtcctctgagccttcagctccattatggacccaaactagactatacttggataagttaagctcttcttcgtgtactggtctataattagaaaaactgttttaaattagatgttcccattatttatttaaacagctttttgctgagaaagcttagtggattaatgaggcagagggtgttttgaaatccaataaatagttcccacaggctgggtgtggtggcttatgcctgtaatcccagcactttcggaggccgaggtgggtggatcatgaggtcaataaattgagaccatcctggccaacatggtgaaaccccatctctactaaaaacacaaaaattagctgggcgtggtggcgcacacctgtagtcccagctacttgggaggctgaggcaggagaatcactggaacctgggaggcagaggttgcagtgagccgagatt

SEQ ID NO: 25303 - DNA, 2300 bp, Homo sapien
aatgacaataggattcattaagtttggcacccaggtgtgtctaatgtcaacaaacttggtcacaagggaaatgaggtgaaagactagatacatttgtataaaattatcacttatgaaaaattttaaagcatttattaatttataaatacttattgtgcaagatactatgctagatattgtgggagatacaaggatgaataaagtgttgtattatattcacttttggaggataacttcttgaaataattaggtggcaaatgatgattcccacaagaaaggaagagaagtctaaaagaagttggtcagcaggatcatcttcatttataagagatagtattattcttttattatttttattttttattatactttaagttctagggtacatgtgcacaacgtgcagctttgttacatatgtatacatgtgccatgttggtgtgctgcacccattaactcatcatttacattaggtatatctcctaatgctatccctcccccctctccatccccccaacaggcccctgtgtgatatattccctgctttgtgtccaagtgttctcattgttcaagtcccacctatgagtgagatcatgtggtgtttggttttctgtccttgcgatagtttgctgagaatgatggtttccagcttcatccatgtccctacaaaggacattaactcaaccttttttatggctgcatagtattccgtggtgtatatgtgccacattttcttaatccagtcaagagatagtattattctatacaagaatattgacatacctactgaacttaaaatacaaaagggcagttatgtttcaaaagtacagatatctcaagtgtgaaaggcagccagtatctgtattgtatggttctaaataccaatttgaaacagattgtgtaccagtttggaacagattgtacaaaaaagactgaaaccacttgaaagtcctcaagaatatcaggaagtaagaatgtaattaaccaaaccaggatttggccccaggacagagaaatgaacactctcattcttagagagggagctaggatttcaggaatgtacagtcaatgctttgtgaaaatttaaataaattcttagcaagcagatgggaagacatgaaaaagcaatgttcattgcaaccaatttcaggtcacactcccaatttctcaattgttttaatgctgtcaacaaacttgctttgcatgtagccaagcaaacataacttagttccatttgttcctttctttgatcaactttaggtgaaggtcaaaataaggacatacttaaaatctaaaagtctgccgaagtcaagcctgcatctaaagaggcagcagctgagcttagcgataaggaaaaatgccgacaccttactactacacaattccgatggggtggggggacagaaattaaggaggcaggattaacagatttcgaagtttaaaaagtaaaggtcatcgaaatgtcccgttcctaagtttcccaatacattccatgaaactgcagagactttttggccaaaatgggatttcctaaagaagggcctcacagatctcaacgacaatggtcctgtaagtgaccgagccaaccccggatgcgtttctggagtctctgaatacacggacagcgtataaaggtggatgcgtacagctccctgacagaactgctggaggctgctgtgcctcccagggcgctaggacagaggctgctgggccggcttcctatgaaaggcgagcagggggtggggcagcactgggattttcctccccactcattcattctctgattcactcgttcctgtaggcggctcacagggacttgcggaggaaaggcgaggcacgagcggagccgcggttgagtgcggccgggcgcggccgggcgcctgaagggagggcggagggccggcgcggggcgcgggctagggaagggcggcgggcgcggcggcctgcgccggaagtgagtggttggcggcgggcgggggcggcgcgcggtcccgcgcgagtcggccctacagtcggcagtccggccctcaaccccgccttctgcgtctcggctggacgcgagcacactcggctccgccgccgccgccgccgccgcggggcgctgcggccgccccgcccccgctcccgccgccgcccgccagtcagtcagtcagtcagtcagtcagtcagtcagtcagtcactgagcgcgcggcgcgggagctgctggcagtcgctgcgtctctggcgagggagcgccgcgcctggggaggaggcggaggcagcggctggaggagcgcgagcggcggtttccttgcccggggcc

SEQ ID NO: 25304 - DNA, 2300 bp, Homo sapien
ctggggaaggcatgggttcccctaactggatagaggatcagagccaggaagactgtgtcaaattctagaagtgaatcttctccaggactcagggcatagctttgtcacttacctatagttcagaagtgtgagtgaatcatttccaaggacaaatttctccaaaggaccaaaagatgtgttagtaagaggggttcacaaagactgtgtttgtgggaaaattgaagtgtgaacaaagaaggtctaccaggacaggaaatacttttgatctgtcatttatcagatcaggagggagggacatgaagcctgcctcctcttacagctaggtcatcaaagagtttgactgtagcattttaaaatagcgaagaaaaaaaggtaacaacactaggggtttgttaaacaatttatgatataattagagaatggaatattatgcatcaattacaaataatgtttataaagatacttaaatgacatgggaaaatgttcaagatataacaaataatagtacatatctgatgaaaactataagtaaaacatgatattaaacatgtaaaaatcttaacagaccaacaggtggaaggcagtggaccagaatattagcagtgtttatattagggtggtaagaatgtggatgaatcttgttttaatgcttataatttttctaaacattctcaatgaaatatgccttacttttatagtcagaataaaaagcaatacaagttatcttttaaaacaacccacatacacaaaacccccaactagagtaattgcacaaagcttagattatcaaaaagaagaaaaaaattactggaaaagttttgaagaagtcattgagtacaagatactgacgtaggtgccggaagaagagagcagttggccgtgctggtggaataaccctctctgcaaagggcctgggagttgaagaagggtgcagtcgggtggtggttatgaatctcagaaatcctgccacggagcctccttttgtgccctattacttaaccttgagggacatagagagcatgagacaccaaggggcttttggttgccttactgtcccactaagaacatagaatgttgttttgactttccctttgcttagggaacctcccccagatactcagctggctggctgcttgcacgtagaatgggttttgcaaagttcctagaagtgagttggaggaggcttgacataaatcaagcactgtgtgctaaatgctccagagggctaccttatgtcctacacaaatgttacatttctaatatttgtaactcctttaaacgtttatgcagatgtttcccaattcctcagtagaattcttaccattatctttttgacacaacctgtccccatcctatgaaaatctctcctctgctagagactttattctttctttctctctctcccccttccttccttccctccctccctctttctttctttccatctttctttctttctttctttctttctttctttctttctttctttctttctttctttctctttctttctttcttttctttctttctttctttctctttctctctctttctttcttcctttcttttttctctctccccttccttccttctttccttcttttcttttcttttcttttcttttctttctctctttctttctgtctttcttttctcattctgttgccctggctggagtgcagtggcatgatctcggctcatagcagcctccacctcctgggttcaagcgattctcctgccttagcctccctagtagctgggattacaggtacccaccatgatgcctggctaattttttgtattttcaatggagacggggtttcaccatgttggccaggctcgtcttgacctcctggcctcaaatgatccacccactttggcctcccaaattgctggcattacaggcgtgagccactgcacccggcctgttccttcttaagaacactttgtctcccctttaatctctgctggatttcaagcaccccttttacacaactcttgatatccatcaataaagaataattcccataagcccatcatgtagtgaccgactatttttcagtgacaaaaaaaaagtctttaaaaatagaagtaaaagtctaaagtcatcaaaacaacgttatatcctgtgtgaaatgctgcagtcaggatgccttgtggtttgagtgccttgatcatgtgccctaaggggatggtggcggtggtggtggccgtggatgacggagactctcaggccttggcaggtgcgtctttcagttcccctcacacttcgggttcctcggggaggaggggctggaacc

SEQ ID NO: 25305 - DNA, 2300 bp, Homo sapien
tgcatcagaaataatttataagattatttgatgtgatcatactgtctgtaagccttatctgggatccatctatgaccttcaggaaatcttcaaaattgtaagcaaaatgttttgtatatgtgcattagaggcaaaaaatttggaaatgtatttttttctagatatgagcatgaaataaattcagtcttgctgaatgaacaaagttgtttttctgtccatttatgatttaaaacattactcctagatgtctaaataaataaattacatcttagctcttccattatttgtgtgaccttgtttgaaaagtcatttacttcttctctttttttccccccaatagcctcttctttaaaataaggaattggcatagatcatctccaagttcccttccagttgagtgtggttttttgcaggataagactctaataaaatagtggggaaaatgaaatgtattttgttctggtcctcttcccattccattcactcccctacttaatggtaatctcctccctaaccctcactccagacatctggtaccatcctccctatcaagtccaactttgagaggatctagaaccaatcactgcaattgtgttgaaattttgatgcaacatggcagaaggaaatgaacaatagattagaagtcataagttatgagcttaaatttcaaggatcacttatgtttcctgtaaccttggacaactcatctacctctttgacctcagtttccccatgtgtaagatgggcataaagatgactgtcctgcctatttacttcacagttgaatatagagttcagatgagataagagacagcattttatagccctgtgaatgtaagccatagatactaaattaagccaatgtgtttcccatattgcattttgggcttcattttctttggaaatctaagcattaactgagctggtgggagggtccttttaaggtcagggttctttgatgctgggagccacaccttagaggtggttaccaccccacctatgcagagggttgacctcattactaaatatggtaattgacccgtttataataggtgtaaacggcaagagttgtttttttttgtaaccaagcttccccaccacccactgccattctcatggaagttcaagcaactttcaattttcctgaagtcggctgtttcacaagattcacagattatctgtgggaaatcttttagctctcagtaccttgctcacaagcagcagataagtaccttctcacctccaatctcactcttcatgttgcctgttgttaagcaggagctgtgagggaaagaggtttgaggttagtgcttcctgtctccacacctttagctggtttagctgctaggaaaggctttgaaaagcaaagcactaaattcaccttcaaaacaacttgtcaattcagttagagaaatgtcagtcagaccaatcttttgataacgtaagcaaagaaaatggatgggttgacaatgtttcttttaacctagtaggtttgacctaggtagaccttacctgaacactcacaagaagtaaaatcaaatattcacagggaaagggctgggtctcctgatacccaagtagcctaagaagaatgccttccactcctagcatgaactggaaagcaaaaagaaatcaaacacaagttaggacgagggagctacatatttgggtttcttctgagtctagatatgtccttacatttgtaatatgtccttacattatttgaagtactgtggattttcagaaactcagagaccgaaaatacatatcaaagccaaatgtcatctgatattctgattatcagctactttgatttctccatgtttttacttcatagagcaaggggtgtgcatttttacacatgccccattttaaaagaaaataagagaaatcagaattattgtgtttactcaaagtcacaatgatcacacatattcagtatcacttagagtcactggttatctttttctagcaccaaaagtaaatttctctcatttactgtcttgcaaagcatatagagattttgaggtcctgtgagatagtttcctatttaggcttctctgaattattgacatgaaccaaggtgggaccaaatgctatgaggatataaatattgagaaacgagattttatcagccaaccttgaactcagcttgaactctaaactaggaggctgttagctacatgttaacacatagtaagcaaacgatttcaagcacagtatctgtgtttgagagccagctaatttaaaaatgatctatgttgacaaagaagagggaggaaagtaaacatgagcaataa

SEQ ID NO: 25306 - DNA, 2300 bp, Homo sapien
tatatggcttctttcattctaaaatgacagagttgagtagtggcaacagagaccccaccgtttgcaaatcataacatatttactattttgcccccttcagaaagctttccaaatcctggtgcctggcgtattccaatagtcttcttcccagtcttcctggttacatttctccctgaacccatcctccccatccctaaaatttcccccaaatgtgaactcagtcataccagtttgctccttatgtttcattggcccttgctgctaagagcatccgcttgcaccttctgctcatccccagacaagctttgtcctgtgaccataatgaactcttcatgccgtttccaactttagcccatgttattcttcttgtctgaatatccacccttttctctgttctcaataataagttcaggcttttcgtcttctgagaagccctttctgacttccacaggctgaaccactggcttctgctcctctacataatacttcaattccagcattgatctcactctatcatgatcatgggtttagctgtctgtccctgccactgctgtgtgttcctcttgagggcaggaacatttgtttttcactttttaaaaaacctctgttgcccagtctggcattaggaagtgcccattaggttgttattgcttgttggcgcttgagctggggcttgaaggtttctataatgtgtagcagtgtatagaaaacaggcaggtcagaaaaggcttctgtgcatcacaccaacatggcacatgtatacatatgtaacaaatctgcatgttgtgcacatgtaccctaaaacttaaagtataataataataaaattttaaaaaaaaaaagaagaggcttcctggaggagatgacagctgagctaagtcctggaggatgagaaggagtataaaataagataataggagaaaaaaggcagtaggaacagcatgggtaaaggtgatgaggcctgaaagaggcacgtggaaggaaagacaaatgcaggaagggggaatgggagggaatgctggggtacaggccaaagagggaggcatttggtgagtattctgcagagtctcctctgctgtgctgaggtgtggacaatgggaaaccatggacggactggagtaggcaaatgtcatattccctgttacaactgtctgtttgcatgtcagccttctagaagccccttaaggtatcaactatgtttttgttttgtcatcattcaatcctaagtgcacagaattccgggcatattacaggttccccatgaatgtttctttctttattaaaatgtatgaaaactctccagatttaaggaaggtcctcaatgtttcaaattctttttgttagatcattggtcctgtctacagctgtcacaaatttaaggactctggttatatttaatcttcacttttgaattttctgcttgaaaaatttgtattagaaaaaaaagtctatccttttatggacggctctaatctcttgaatcatttgggttggcttttctttggaccttcttcaactctgttttgtctctgttgagttaaggcttttaagaacacctgaattctttccttctgcaaaaccagaggcagcttcttttccgcctattttcagtttatttcttgtgattttagtttttttctcttaaccaaatgctaaatggatttaggagaaataaacttatttgtaaagctgtcaagggaccattagaaggatggtgcttcacagatagaatacagtttttattaatgatgcctagacaaatcctgccattagcccaagggctcagaaagttagcagcctagtagttttggagttgtcaatgaaatgaattggactggatggttaaggatgcccagaagattgaataaaattgggatttaggaggacccttgtactccaggaaattctccaagtctccacttagttatccagatcctcaaagtgaacatgaagcttcagtttcaaattgaatacattttccatccatggattggcttgttttgttcagttgagtgcttgaggttgtcttttcgacgtaacagctaaacccacggcttcctttctcgtaaaaccaaaacaaaaaggctttctattcaagtgccttctgtgtgtgcacatgtgtaatacatatctgggatcaaagctatctatataaagtccttgattctgtgtgggttcaaacacatttcaaagcttcaggatcctgaaaggttttgctctacttcctgaagacctgaacaccgctcccataaagccatggcttgccttggatttcagcggcacaaggctcagctgaacct

SEQ ID NO: 25307 - DNA, 2300 bp, Homo sapien
cattcaaattatcttggaatttcctctaggacctaagtatccttccaccatgaaaataggagaccaaaaaaagtaatgcttccagtaatttctagccaaataaatgaggataagtgtgtgagtgtggtggggtagttaagagtttggaatccagagtttcactgtctggatttgaacaggctccgttgctcatcagctctgtgactccgggcaaatgactgaatctctctaactctcagttttctcatctatgaaatgagaataagtaacagactctccctcgctgagttgtttgagaacgggatcagacaatgcacgtggagccccgtgtctggcacacactatgtcctcattgcatatttattattaggtttctgctttgtatttttctctgtgcaacagccctgagctctagaacttatgacagcttttctcaagtgaagttaaagttccccatactcagttccagagctaggcctcacctaggttggaagaagtcaattgttctccactgcctgcctgtgtgctgggaaaggactctagcacagtgccggtggggctggaagcctttcctcatgatgctacggggagtacagtgaaaagggaggagattggggtagcaaggtcccaggggtcctggcagcccaggctctacttctcaggctagctcagtccctcaaacagcttccttcacacccactgctgagacccaggagccctacagaaggtagctaggggaagcttcagcagctagggggatccctgcaggatcagcctcctccttaccttgcagaccccttggctgtggtctggcattcctagtggctggcctaaagccccaaacctggaatctgtttcagagcctggaccttttggactcacaccttggtttccctggccagctgatttcagcttctcatctaaatgtcatttctgcaggctaagggaagtccagcctggatctagcatcttggaagcgcgttcagacttctggatggagggatcagcaggccttggtattggtggttctacctgcttcggttaagagtgaggactctggagccagactctctaaatcatagcactgacacttactatatgacttgggccaggttcgttacctgtctgtgcctcagttttcctcatctgtaaaatgggagattagtggtcaccattgggatgattaagaagattaaatgagttaatgtatgtataaactatagttataatgtaaatatatatacaaacagtaaccatttacatgcatataaaacataatataaatgtaatattagctatattcatatataaaaataggtatattttatatataaaatatattacatttaattttttacattttgcattaagatatattatttcatataaaacatttaagtacatatacatataattatctatgtaattattattgttattgttgttattgtctactttacctccctgcagggatggggagaccacggcaggcttttaaacattcttggtctcactgagccgtaggtgaggaatccctggttcctacagactctgctgtaatatgaggagcagggtttaagttagtttaaaactgaccccatcatttgaaacattgcaatctacaatgaatgccacataaatatcatttctcagattcctatgatgctcttctttcagatcttttcacttcaatttctataataattttgtttgtttcttgtcctatttcaaaggctttcttatctctggagcacctagcataagatagaaatgtgtcaaaatatatgttttattcatcatgtgagtatttttaggtcctgttaacccccataactattgattcagagaagtagggtggttctgaaaaatacaggcataatctctttaacttgttttataggaaccagaataagggtaatgttttcctctgtcttcaaaatcatcaataatccatgcattgtttaactcatgtcataagcaataatgcctttcatatagccattggcatcaaagaagaaacacccccttgatttgatggtaagcgtgacactacataaactcccagaaaacccacttcctttccagcaaatagaaaacaaccgagagcctgaattcactgtcagctttgaacactgaacgcgaggactgttaactgtttctggcaaacatgaagtcaggcctctggtatttctttctcttctgcttgcgcattaaagttttaacaggtaagtggtgtattgaatatttcttattaagttataattcaagtaaacattaagaaaaagcaaaggtagaaaaat

SEQ ID NO: 25308 - DNA, 2300 bp, Homo sapien
aaatgagtctggagcaactgtaaagcaaaaagccacgatgcaggaaggatggcaacatgcaaagttatttcatcagtggaaaatctttgctctgtaccattctataggtccatgaaataccgaatattaaaagtgagggccacacattaatgcacggcatcagtatctatttgtttgtttgattcactcattggtacttctcatgtaagaaacagcacagcagttacgatgaagactctggaatcagatgacctgggttttaagccagcctctgctactttctaagaatgagattttaactaaatcatttaacttcctttggcctcagctcctcatctctaaaaagaggataaagtgtctcctttgaagagagctggcctgagaatggagaccacactgaggaacagatagagctaagagctggacagagctagctggcccctgaggacatagtttgagttcctgctttcaaccttgcctcaatggagtgccctctggatcttctgattttatgaggtgatcaattctgtctttggtttatttaaatgtaaattagtttgtattggatttacaaccaaattacaatggacttggtttacgtgatcctcttggtttgccactgactttctatacatagaagacaaccaatatatacttactgaatgtatgaatgagctaaaatttatttttttaaaaaacctcttgaaacccatgaatttaatctcctctgcattatcataccatcctaggcaattcacgttcaatttaagtgtgtccacataggagcacatccttctgtagagaaacacatgatgcagccctgagggtcttgctggatgaactggatggctaagaaaactgcagggagagaccagagattgagctcagaagacctgagttcttttcaacagaactaacaccatggtctgctcagtctcttgacctctccgagcaccattcttgatgcacaagatgcgaagaataatatctacctaccgggtagttgttaagctcaaaggagctcatttacatgagagctaagaatgaaactaacgtaatttgttggtttcccccacatattcccatttcaattggtgatggatacacacctgccaaatcatgagcctaagggtgttaacttttttttttcctaataaaatgcacaacggtagtcgcattccagaaggctatgtgtcaacacacgcgatcatatctgggtcttgggtgtgacctttggccaaatactcagtgtcctcgagggtctgtaaaaggaaaagtttccactggcgcgttctctccaaggttcgcttcagctctgctatcccagggctcctgatggcagcggcacgggctgtgcttaaggcgagttcctaacaggccctcggggcactcctgcatctccgcacccggcagcctcgccccttgggtgtttttggtgggcgtgactagaagcacctgctcctgggctccttttgcatcttgctgcagtcccctcctgtgaagggcgcagctctgcagtctcctcgctcttccctcgggtgttctttctgagatccggtttcaatcctcgagcgtgtagccctcaggtccccttacaactccccagagctccgtgtgcatgcgtgcgagagggagagagccagggagagacccaggtgacgagacgaggctcccgggctccagttactggcccgcagggccggggcacgtcgtcgcccagcgtgcggcggggcccgggagcgccgcggcccctttaagagccgggcccaggccgtcgccgggaccgcaggagcccagagcgcgggcgccgcagaggagttgggagccggcgcaaaagtttcctcccaactctggccccgtgcgccgccgccgccgccgcccactccagcccccggcttggggccggccctgccaacgccgccagggccagggccagggccaggaccagcgacagggcagggccggcagtttcgctttggtgggcgcggagcagccgcctgggccgggcaggagtaggagcgggaggaggaggaggaggagccggtgccgcggagctgccgcgtcccgggccgccgggcacctgggaggtaacccctttccgcggccgcccctccccgattcccgccacctgccgcctggccaggtggaaggggcgctgccgcgagcctccgggcctcagggtgttccggggagcggcgccccgggtctctgggcccacccgccccgggcgtcctccgagagtgggggctgcgcccgcggggtcagacacctgttcggcccggcccggcgtggtcgccggg

SEQ ID NO: 25309 - DNA, 2300 bp, Homo sapien
ttggctacttaaaaatgtttggctttcttaagtgaatgtaaaaacacattattaatgattactaaagagtaggtatcagtatgatacatataatttattatgtcttatagaagggattttgagtgggagtaaagaaatatttgtgaaatagaaaagaacatgagaattcataaaaggtattctaaaaattcttaagctgaaaagttaaagtctgtaacagactaaacacattccaaatgcctctagatattacatatggatgctatctctcagcatgtggatacttgatacatttaataggaaagatttgtgttgtgctttcagtgcaaaactataaaaatatgttacaaaggtaagggtaataattttcagtgactaagcaaagcttgaatctctgtttataaaagtctttaaaagcagtattttaaagctagaatgcaaatgctttgggtttagtcttccacaaatgcctaaaaatgcactataaattctgttagtatataaaacgtattgcttttttgtctcttgaaagccatacaactttctctgtcaaccaagcattttatattcagaccttataatgcatatctatatataacagtccatatacatatgagtgttcatatcctcaaatatatagaatcatttaatactatattatcactctaagatttgttttgtttttagcttttattccaagcctctgacataagctgcttgactgaacaagttttatatatatcagcaatatctgggcaaaactcacttgaaatttattaccagatttgaaatttcatcatattccacaaatgctgaaaactgatgtgctcctttttgcatttcttaatgataataggcttgcaaagaaaacacattaaaaatcaacctaatccactgatgagaatatatttaatgtatttattttagattgctgataatttagagaatacttcgtgcagagtgaattcatcatgcattttgcttaatgctgttctcaactttccagcaagaagtcaaaatttcaccattttcaatttggagcagaaagcatttgtagcagctgtagctcttaatttgacatctagtttcaggtcattttcatgtaaatagggaacaatggagaccggcttacaatttccataacgtggatgtttccttcaactttattattttcttatgacaattatattttctctgtgggattaacggagccagtaattgttcacagttattatttataatctttatgaaaacttggtagttctactctttagtactcaaaagctcccagtgccttctatatttcagtcatacacacaatccattaatgtttctagctgatcctttccttaatcaggggtaggttaggcaggtcaggctttctatttctttctataatacattttcttcaggctttgcaacctctttttctacctttacaaaagtataggaggtgaaaatttggaattgttctgttgaatagaactgatgccctattgaaaagcaagtttgagttttgatttatattgctttgaacatgcccatatgtattaccaactgtggcttcacagccattataacacgtaattctgtgctttttctaataaatattttatttcatttttcctctgttccagagaagaagcctactttatgctgaagcatcgatgtgctttcttctgtgttttttatgatctgtacagcaattttcaagtgtgttttaatggggaaaattttaatttttgtgtacctcttttaaaatatgttgatttatgcagattaagttaagtaggaagttatttttgtaggtagtcatttccatttgttcctcttctaggagtaaaagtaagaaatcagatagacttttaaacattttgttttctggatcatctgaacataccaataaattatgtactcttttgactttgaagttgtattagttgatataatcctgagcaggggtgtgtgtgtgtgtgtgtgtgtgtgtgtgtattttagatgtgctccctctgttttttagcagacactcatttgtgctcttgtttttttctgccccagtgatatgacaagaacagtggagatttctggggaaggaggcccattgggaatacatgtagtgcccttcttttcatctctgagtggaaggtaagatgtttttctcattccagaagctcatgctaatgaaaaccctgatttgagctccttttcccaaatatttttcacaaggagattaaatgtgaattctattattcaaatggatacctcaagacatacttctgttggccacttaagtgttggaa

SEQ ID NO: 25310 - DNA, 2300 bp, Homo sapien
attttttacagaaaccattttaagtacttctatatttcactggcaagctatctagttatttatctaaccaatgccttacagttatacaggacccaatatatcactgcaatagatagaacttgaggggaaaaaatcaatgtacatgaattttttccacatctttgatcatcagtttaggacagattacttgaagtctagttactaggtctaagggtatacatttttaataaggcttttgaactcatctttctcaagatgtctatcccagccctcaagaataggttaaatacccttgttctatgttatcatggcactctgcattttcccttcataatcttcatcgccattttgaatacttggctatctttttatttcctgttagactgtaaacttcattaaagtaggtccacaaattattttgctgactgtgttttgcctagggcttcgcacgtagcacatattcaatatatattttattgaattagttgcatactgttgaatagttgcttattgctaaaggtgtttgaatctgtgccccggaatcactgtttacatatacccactggctgtatcaatgttttaaaaatgcgataccccaaatggggtaaaataccctgagtgtgattcaattttggttatgaatgaagcctgtgatttagaactcgtttctcagctataatgagttcattgagtgtattaagctcggcattaaaaattcagtgagactgagatctgaacattaccaactctcggggcagaaaatgtccttcttggcgggcaatgaccagcgatgctgtctccccctgcttggtgctcctgagcatggccacaagctcttcctgggttcgtccggtgacatctctcccatttacctaatgaataaaagcatatgaacagccacaatcacaatacttgttatctccttctacactagatagtttttgaaaacaagaagcaaatgggctcccatacttgaggaagctctgaaaagatgataactaaatacatgggcaaaacccaacaatatttcccataatgcatcatcatgatgctggatgaactcagagtcggtaattaatatcagcagtttttcctaagacatcacattcttatgtgggggaaactggactgacagataccagaaaatgattccgcttaaggtagaaagcagattgcaaaggcttacttagcgccattttctgcctaattcaacaagcagagtgaaccatgatcacaaggcaaatttctctgcaaatacgaacctagcaatagaatcctgcaggttttaaacatatttagaaaattatagtcaccagattatcatagattaagggaaattctaatttggagctacagtagtcatttggtgcatcttctttcatgatctagaacaacatgaaaagctaaagtgttgcttttaatgaagatgtttgcttcaaaggtaaatggacaatatataattatcaagacgataatgtcctcagacaaaaataaatgaaaacaaacagccaccctcttgcttttggtatcccaaatatatctctctgcaaaatcccttccagctgttttcattgctatcctagcacagatgatagggatatggacaaagcatagaatgacctgagatactctggcttgtcctggccaagtttgaaaagactattacaaagactttttaactttttagccctaactgaatatatgttgaattcttagattcaatccaaatttcacagggactctaagaggtagaaataagagagggaagatcagaaatggttttcactatcatttggccccatatcactgaccttattggggatttacaaagttagactcctcattaaccagttctatagttaaagttcttatcttgtctataagtaataatttttaatatatattaggttcaaaataaaaatattaatatatttacatatatttcaatgcaattaaatggcattatttaaatgccaagaaatattttcatacaactattaattccaattcttacctccaaaattctgtcccctgattgtaggcggccatcttttattgctgctccctttggtaaaatgttttttacaaaaatgggaccgggaccatgtatggaagagtctctggtaaccacagtgaaaccaagtccttcagggcctagtgtataagaacaggaaaatgtatagtcatcttaagcatgagtaatattatattcagtcttacagtaagatctacctaatttagactaatatagaatcagtaaaatatttacattctgggacattttaaatatgcttcagtta

SEQ ID NO: 25311 - DNA, 2300 bp, Homo sapien
tgagtaagtgaataaatgacttaataaccaaatactgcagagtggaaaagaagaatgaagtctaagacaacgtcatacttttgactgaaaggagattaccgttgatgattaagagagcagttctaataaagaagtgagaacagaggcctaaaacacacgggactaggaaggaagacgtgaaaagaagatggaagttactagttcataccatgtaatgaagatttacagcagcgaggagcaatataaacttttttctctccccaattcacaaaggaatggctttgcagaaaagggaaggaaagaaatccgtggagactttgaagccaaaaagacagttgctaaatcccaggtgatctctgaaccacctctctcccttgaaggtttctcatctgagtgcttctctctagcctcccctgcacagatgctcagtacctctgactgcagttgccctaaaaggtatccaaagagtcctggcttccaggggatatcaaacctcttccattcacccaatccatgttatacacacacaaaaaacccaggtttcattctgtgtattacctgcgaaaaccctgcaataagattgactatctaccaaatgaagtctgcataccttattcttgcactctgggctttatcatctggctgatcagctccaccttgtacaattcaatttactctcccgtctctatgctgtttcttctgctgctcttccctcccgaaatgccctttcttcctgggctcatctcatgtccacctgctattcatgagttagggttcagctcaaatgacacttttaccatagtattttccctgattcctttatctggaggcattctcctctgcctcagatgctcagagcattttatctataccttctggtaaatatcacttggaacccttgtgttccagtcgtcccatgagcctacctgtcagcctaccagcttcctgaagacagggtttatatctgattcagctttgcaccatcccaaacattttgcacatatatacaggataaacagtaaggtagaacaaatgaaattatgttttaaatggctttttttatgccaccaaattgtcattttcaattcagaatcgaggcaggcaatggaaatgaatggacaaaattaaataggtccacattttcttttatgaaacccctagagacattgatctagaatattattatgattatcaatctagttcacgaaactgtagttagcaagataactgacttcaaaagtataagaatcagagatagctaaatataggtgagcttccacctaatacagttagctatactctaaggcatgctgctttatttttagcagactgtattaaaaaacataataggaatgacactagcattgctgcaagaaaaatgaagaaatttcacaggattatcatgggacacagaatggaataaaatacacagtttctaacagccatagtaaatatagaaaatagcaaagggacaatttaatgatttttaaaactcatcagaagaacaaaatctatgaattccccttgtcaaatagtatgtatgcttagtaaatctctctcattcttgtgtgattctaaaaattattgatttttttagtttctattacagaatggatataatattgggtaccctcttcaatattttagattatatatggtgttgctttaatttttagattccattaactttcttggaacatctatttttaaaatacctctagggtttgccaattactaataaaaacccataagcttcctattttctcagttttgttttataccttcccatgtcacttttctttgagctccatggctctagtttttaaatttgtaaatgaaagttcaaccattttcttaaatattttaataatttaaggtgaatcttaacaaataccaggaagcaaaatatgcccaatctaagctattagctatgagaaactttcactgaagctttcgctggaaaggaattatagatactataagatttccattccagaaagaaatagagttaaaataagtttgctgaataaggttgctgtgttctcccagaaaaacaataacaaggagcatttacgatacatcattttatcaatacctgtggctgtaatcttcgaggcccaatcccagagcagaatgtggtgttggagaaggtggaacttcactctcggcccatccgtcattgggcagcaatagacctataaacaaagaacaaatgaagctgtataaagtggaagcagaaccattcgatgcctggtttggtttcagtatctctctcagacgcagttttagccaacacataa

SEQ ID NO: 25312 - DNA, 2300 bp, Homo sapien
ccccatgcatgacagcattcttgggagagtctgatgtgtgcttctggagtgaggaggcccagagctggtgtgggatgtgctggagaagtctgaagatgcaaggctggttggaacatctctatggtggggtgaggaggagcggtacagtgggaacaagctgtacttgcatcatttggagggtgggagatcaggaactctaataagccaggtagatgctgtggctgtaagttaagctagagctgtctcaaactggcactgtccaagaagtctaccagccggggtaaggagactcaggggtatatgtctgaggtcagaggcttagggaaataggtcagtgggaaaatcacctacattagtgactggtatagtaaggagcactctaaaaaatccacaaaagtagccacaaagattccttgatggccagattataccagataatgccagttaagtaaaatcctatcctattgaatcttgtctttgtctcctggttccaaagactgagaaataggagaaggtggaatcctgcctcccaccataccataggatgctccttgtggttcaggtccaacaggcagaaaggaagaaagctttcatttatattggattgcatattttagcccccgacaaacaagttgcttttttttttacccaaaagtgaccagaaagctatcagccagaaagctgagatgtcagggtgtggaagaggcagcctcaacagtttatacttgaaggggagagaagaaacaaagctgttttctgactgtgccatgttgagccccgtctagtcaatgaatgtatagcatatgaaatcatatctcacaactgtgctgggtcagtagagcaagtatgctggcctcattttaaaagtaaggaaagtaaggctcagggaagctaagcaatgtgtgtgaagccccattgctcatgtgtggggagtcatggatccagacttgggcatcagagcccagacccagtgacatctcccctgtaccacagtgcctctggaggtgacaagtgatgtgcccagaggcccggccactgcacacctagagtcacagagggatgaggttcatctaccctgactcccctgcttcaaaagaggtattccagaggtaacacatagggcttccccacttcccactttccctgtggtgtcagaggaagtatttattttcataacactttggtacaaaggactgcaggcattgtccatgcctctactaagtattggcctttcttttatggtgtaatcatagctcactgcagccttgaactactgggatcaagccatgctctggcctcagcctcctgagtacttgggattacaggtatgcaccactgtgcctggctaattttttttttcttagaaatagggtctcctgcctgaaaccccagcactttgggaggccaaggcagacaaggcagatcacttgaggtcaggagttcaagactcctggcccacatggcgaaactccactctactaaaaatacaaaaatgagctgggcgttgtggtgcatgcctatagtctcagctactagggaggctaaggcagaagaatcgcttgaacccaggaggcggaggttgcagtgagccgagatcacgccactgcactccagcctgggcgacaaagcgcgactgtctcaaaaaaaaaaaaaaaaaaaaaaagaaaagaaaaaagaaaaaaagaatagggtctccctaccttgcccaggctggtcttgaactcttgggctcaagcaatcctcccagcctcccaaagtactgagattacaggcatgagccaccgtgcctggcatagtgttgacctttctttgacaacaaacttaagacagtgtcctgtcatcactgtaactttccccaaaaagctcctctgcctctgcagaaagagaacgagcacagaattgagagccgtatgcatttggctgaagacgaggaaaagcgtgcgcttttttctgagtacagacaaaggagtgattttaccaggagagacaaaatgagaaccaactttgccttcaaagcaggcccatacctcagcatggcgccgaagcccttcttctttattttcctttctggatcttcattctcctctttgcgctttttctccttgactttcaatttgcccttttcctttttcttctccttctctttcgtttttttgactttcctggctttattttccatgtcctctagctccgaattcccctgaggggcagactcacaattcagagctccttggccagagtgagagctcttatcagacagaccgtctgtacagagaaaaaataatcaatacccatggtca

SEQ ID NO: 25313 - DNA, 2300 bp, Homo sapien
ctgactatcccacagtggccattccaaccctttctactcccgttaagttctacgaagatgactaaactccccaagcccagtctctggaggtgatctcacttcctttgctttatgaccttgaggcattcaacgttagcccctcaacttctgctcctgcagctcagagtcctgcatcttagctcacacacgcttcccaaggggatgcactgagggcctgagctcggagtcaggccatgattatagccccagtttcatcacttaccacctgtgtggccttgggcagtgatggaattgcttcaggctctgttttctaatctgcaaattggggatgatattagagcctcggtaatagtgccggtatgagtattaaatacaataatacaagcaaaaccctcagcgaagagcctgtgtagtgcattgaaggattttttattgttagctctttttttattttatctcaggggaagaaatgtgccttcctgtaatgaggcaaacccacacaccagagctcattttccctggcttcttggggaccttgagccaccaactaccctctctcggcagcatctttaatccttttggcgttgctttcctccccctgcctactatcatagatgcacaacttcaggggcacagtttgccaggatcccccactgtgtggagaagaggaagcagcacctgcatggggatatgctgggggaactcactgaagctgaaggattcgccgactcaggaaagaccagtggtctggatggtcaagtgcaagagaacatagcaatctactgtgatctgagtgataagctgagctaatggacatgatagtagacagcagtgctatggagagggggtttataacagatacagcatgctgacttggctctaggcaagaggccagggctcctgtccagcaagacttgggtgcaggagtaggcattgctccagtggtagaggccatacccagggcgagttaaccaggaaggtggagcatgatgctctagctcccagggcagacatggcatgacagcagcaccctattcgcaggtgggagagatccagagatactgctaagatactcctattatctcaggaccgggcagtgctgaacatgcaactaccagacttatacctgagcaggactcgtgtggcaggtctaccccattaaattgactcttgtatgtcagagaaaaacaaagacccttggctcaaccctccttttcccacatttcctaagaaaaagtgggctatacctgttggttctatttccactcaacccactcacactatagcctcttgccccaggcttctgcccacaccactgatacttccaccagactctgcttcccgccttttgctccacatggattctctctgtgccgtctcctccattcctgccaattcaatgcccgtctctatgatgattccaaaagtacctgcctaacattcatgtcccactcttgtgaccccgtttgatatactcctccttctgcctccaagacgcctccaagtccccctgccaaaacccatgccatcttcctttgctcttcttcttttaaacttccatagcatttacttagcaccttcccagtgccctaaaaacaccctgaattggattattctccactgcccctttccaccccattgaaatataaattccttgaaataagagactttgttttatacccatcatttgttacacccagaacctaacataaggccatgtatacagtagagtcttaatacattgctatacagatgagaatagtttttttggtttttgttttgtttcctctacccaggtggaggcctaagtatgggctccaccactggagcaatacctactcctgcacccaagtgttgctggatggtctgatctcatctgttgcccacgttggagtacagtggtacaatctcagctcactgcaacgtctgcctcccaggctcaagcattttccatcctcagcctccagagtagctgggactacaggcacgcaccacgatgcccagctaaattttgcatttttttgtaaagacaaggttttgccaagttgcccaggctggtctcgaactcctgagcttaaacaatcagcttgcctcagcctcccaaagtgccgggattataggcatgagccactatacctagccaagaatagattttctttatatacaaggaagttatgggaaagaaatcccccaaagcttttttgacagttggttttagattgctgttttgcaatataagaaatgatttttcatgaggatgtatcttttctctgaaatcaatagaagtccagacttttttt

SEQ ID NO: 25314 - DNA, 2300 bp, Homo sapien
tgtggactcacaaaatactgaaaagcacggtgcctacctagctctttaccactatacctctggtggaaaccagaccaactgcagtcaaaccctgagatcccagtctagagggaaacaagactggcaggtctgagccagtcccagtgtgaagaatttccctaaagatttgttttccatgtggcacatgtgagatttgtgtttagttcccaagagtccttggaagtcttaggttaaaacaattctaagccctctctgggccggtggggtcttgttcagagtaggctggggagagatcggcctcactctgaatcttccctggtctgataaagcactttgaactccttggaattaaaagcaccaccagaagtgtgaccctgggtggtgttaccattatttattgagtgctgccccctagaggattgaaaaatggtctggccgcttgagtccccagggatggaaacctgagactcactctctgtccaactgcaggaaatgaggccttcactcaaggggagtgggaagtcttgcagccctggtacagaggactcccaggaagtaagtgagcgtcccctgtaggacaccgctgaaaaatgaaaagttacagtgtaggcaaccaggccaggaacaaaactgattcttacttttctctactctggaagcagcctgatggggaccttcatccctgagaccccaagaccagaagtccagggttgtcattcttatggttctccagtgggcttaggtttaccttttctctcttctttccccctttcacagtgcccttcacctaaaccctggctacattattctcacaaacaggagtctcccacattgggcactggcaaaaatggtttggcatgcctggtgagtggtggggagaggtgatattaaatggccctctctattcagggactgtcactacagatagcgttctttgtccttagattagcatcttggcaatgacataaaccgggatctctgcttaaggttaataatccaaactgctcttttactttgttaaatatttaaggcttggagtcattctttacaattgagctttaaagaggagaaatgtaaatctggagtttttaataatgtggatgtgctctcaagcctagaaaggaaggaagaaggaaggaaaggagggaggaagaggaaggagggaggcaaagagggaatgaaaggtagcatttaggctagccaagagacatgctccctggaagaactcagaggcctctgtgctgtgcctttcccaaccaggcatctgagattaacagtgtgatactcagcctgtggatttccactctaaaatcccgcgccaccccccaacacagcttggctcaactatttgcaaatcacttctgattcaattttgttttggttatctcagtgtaaataacagttaagtgggagttacagatttttcaaacactaaaagtgataaagctaatgggcaagtccagataaggagggaaaccacccagaagaatccacaagtacaagccaagaagaaaatgggtagtcaggtgtgtgtttctcgtcaccgaaactgtatttttcttaatctacagaaaattttactttcttaatttaaaaaaaatcttaatctgtaaatatttttctgaattttcttatttttcatatacctcttttgtggcagaaaaggtgtacatgtgcagggtgtaatttaggctgtttctgttgcagtctttatgataatgtagtaataggtgtctggtgaagcaagacagtttggaatccacaaagccatcctcagaaacaaagatacaagtgtttccccaactgttagcttgcagttccctctaaacagttttcacgcctccatttaaaaatagttggcataatgatgttttctttctctaggctttgtgaccacgtttccatgggggaaaatgtgaatagacgtagttacagtagcatttggatgagacgccttcaagcacctatactttttcgggggaacttgatggaatccaatttaattacctgaagaaattatttgctgaagaaagtctttcctctttttagggtagttacagttaaaggcgcaggggtaacgaaatcctaacccagagaggagcagagcatgtttgggacataacaaaggatctgagtagtaaacgcagcgagtgtttggggttttattcagaccgggctgacggtgtgtgtcgccgccacgcaccgctgcctgttcgaacgcatggctgagctgccgaccggctcgctaccccaaacaccgtacgccacccaactcctcttgtaacgccatcgcgcgtggc

SEQ ID NO: 25315 - DNA, 2300 bp, Homo sapien
aatgaaaagttacagtgtaggcaaccaggccaggaacaaaactgattcttacttttctctactctggaagcagcctgatggggaccttcatccctgagaccccaagaccagaagtccagggttgtcattcttatggttctccagtgggcttaggtttaccttttctctcttctttccccctttcacagtgcccttcacctaaaccctggctacattattctcacaaacaggagtctcccacattgggcactggcaaaaatggtttggcatgcctggtgagtggtggggagaggtgatattaaatggccctctctattcagggactgtcactacagatagcgttctttgtccttagattagcatcttggcaatgacataaaccgggatctctgcttaaggttaataatccaaactgctcttttactttgttaaatatttaaggcttggagtcattctttacaattgagctttaaagaggagaaatgtaaatctggagtttttaataatgtggatgtgctctcaagcctagaaaggaaggaagaaggaaggaaaggagggaggaagaggaaggagggaggcaaagagggaatgaaaggtagcatttaggctagccaagagacatgctccctggaagaactcagaggcctctgtgctgtgcctttcccaaccaggcatctgagattaacagtgtgatactcagcctgtggatttccactctaaaatcccgcgccaccccccaacacagcttggctcaactatttgcaaatcacttctgattcaattttgttttggttatctcagtgtaaataacagttaagtgggagttacagatttttcaaacactaaaagtgataaagctaatgggcaagtccagataaggagggaaaccacccagaagaatccacaagtacaagccaagaagaaaatgggtagtcaggtgtgtgtttctcgtcaccgaaactgtatttttcttaatctacagaaaattttactttcttaatttaaaaaaaatcttaatctgtaaatatttttctgaattttcttatttttcatatacctcttttgtggcagaaaaggtgtacatgtgcagggtgtaatttaggctgtttctgttgcagtctttatgataatgtagtaataggtgtctggtgaagcaagacagtttggaatccacaaagccatcctcagaaacaaagatacaagtgtttccccaactgttagcttgcagttccctctaaacagttttcacgcctccatttaaaaatagttggcataatgatgttttctttctctaggctttgtgaccacgtttccatgggggaaaatgtgaatagacgtagttacagtagcatttggatgagacgccttcaagcacctatactttttcgggggaacttgatggaatccaatttaattacctgaagaaattatttgctgaagaaagtctttcctctttttagggtagttacagttaaaggcgcaggggtaacgaaatcctaacccagagaggagcagagcatgtttgggacataacaaaggatctgagtagtaaacgcagcgagtgtttggggttttattcagaccgggctgacggtgtgtgtcgccgccacgcaccgctgcctgttcgaacgcatggctgagctgccgaccggctcgctaccccaaacaccgtacgccacccaactcctcttgtaacgccatcgcgcgtggcattgtgttgggttctgcgtgtgtggcatcggagtcgtggaatttagggggaacaaggcttttccccccgtccccccggggtctcccttgggtgggggcgacacggccaaggcggcgcgccctgggggtgcccgggggcgcttcttccccagggcgttacgcaccggcggcccggcgcggaggtgcgcgggggcgatcgggagatgcggggcgggcgaggggtggtgggatgggcgccgccttaacttcgatcctgcggcggcccgagagaagccgtcgccgccccgcccgagctgggtgccgcggcactctgctctgcgccgcgcgtctccgcggctgcctctttaatcaggaacacagaaggggcgggccctgagccggcgcgtaatcggatagctctgccgcggctctgacatccacatgctgctcggcctgaaaaggcagtggggagccggaggggaggcagagatcgcgagcgaggcaccagcctgcagccggcccccagcacatcctcagccgcacagacactcggcgaggtggaggtgagggcgggcgccagcgaactcggagaggggctcgctcactcccag

SEQ ID NO: 25316 - DNA, 2300 bp, Homo sapien
gtgctactgtaagcagagattagggggttcacccagagcctgtggccacatgtatccatgggaagactgaccccctccctcagctcatacatgcgagtgcgtgcagcccatgcccatgtgagccacactcatgcacacaccgccatcccaaagacagtccaaatacacaatcatttactcattgaggaaagaaaaggtctcttagcgttgcctgccaaggctgagaaatgcaggggtcggataagataaaattggatattaacaacacataagacatgctgtgtttctaaacggtaccagcgtggtgtgtatgctgtggattagcggcagtgttaaagttcagatccactcaactttccaattatgcattcacgtgacaagtaaagcttttttcacccaatgtgaactccttagcgtctcctgatggcgaccacacacacagtccccatcaccatcttcagagagcaagccagtggaggcccccctgctgctgctcacaacacccatccgaaataagcaaagtgctgcatttgcttcttcctttccaaaacaaaacaaagcaaagcaaaacaaaacaaaacagaaagcctctgcctcatgctgaattctcagagaactgatgaatctcttttctttggatccagttccccatccctttcctgagagctgtggagccctttttcagtacgaaggaagtagggtcagtcaccactccccttgggccttctccagggtgtctggccctaaccttctttccttccctttgcttggcttttctccttccctcgctaacttggtcttctcactccttctcatccacaatcgctatacaggaagcagcaaaatcaaacctgggagagaggcatgactaacaagttctttcccggtgctccctgctgtcaaccttaggacccgggtgggaggacttcccaggggaggagagggagcagcaggctgggtgcgcagggggcacccccagatttggtggacttcgcaccagatcaatggtttaaactgaatatggtggaccagcgaaaatctgcttccctgtttgtcttcagccagccacttcccttcatttacttgcaaaaggtatggtgtcttcagtggtgtgttattaaatggctctaacttttaaccttagcaagcaggaaatagggctgttaaatgatggagttcacagttcatggggaagaaaggactgtgttgtcaattggctgtagacttctgtgctgctctttgccattactcaaagccattctaaggtgggattataaactcacactggaaacacatcactggacagtgactctacctccattcagcccatgcctggagactttaagggccccatgactcccagccaccagcataaacactgcaaatgtgttagaagaaactacaagcttaaaacctaaaaacttggcaaggatgttggatccagacaggcatctctgagcctcagtttccttatccaatgaagtggagataagaatatctaccttctggggtactatagatataattgtttatactcaaagatattttgttgcatctggctgaaaagtcttcaaatataccagtttccccagttctcttgtcccagccctgttggtgcccccaaacacttggcatggtctgaatatcaggagccgaaacatctagttctcctaagcaggagaagtcgctgatggttgcagagttggctgtaagtagatttacagagtcccttggttgttacagctatgacagaaatgatttagaagtgatggttggttagttggtttttccctctacccttattcaggaaaaccaagggaaactcacatatactttgctctagttacttttttttttttttttttttgagcagagagcacaaaaaagcataaggtccatatggcagttattgatctgggccatctggaaagccaggacttgctcccaccatgtaggatcagaagctgttccaaaaagccttccctcccataagagatgtattggtcagatggggacagggatggatttcattacagggcaggactacagtgagaggaagctggagcaggactctgaaggactgtctgcaaccctgaccctgccacaaagatcagagagaaccaagaaagtgttgattgacacagggccattgtaggtagagggtgcccctcatcatcttgtccgctcatgggtgggatggcatcaagtaactaacaaaaacaaccgtgaagcactttgcaattagaaaatgctctgcaaatattcctaggtgcctgcaacatgaggaagagggagtgtca

SEQ ID NO: 25317 - DNA, 2300 bp, Homo sapien
tggcatggggccttctgctgaactaatggcctccacctctcccaagcagcaactccctcagttcagcgcagcctttggccaccagctgagttctcacagtggcattcctaaggacctgcagcccagccacagctctatagcccctcctacaggcttcacagtaacaggtgccacagctacaagtaccaataatgcatcttctccctttccctcccctaactgagggtgtctgtgtgtttgcaggcaggtggggaacccagtgttttctatctttgtttcctctttagcacccctctccccttttcctaaagaagatataacagatggggatcagaggggcaccccccttcccagttcaatgagtggccctgcagtggacctcgctacagtgttcacatgtgctccttagcactggtgctcattccctcctggcaggcccactccgccccagtggtttccttagtggttcagcacagtgactggataggattgatttttagcagcaagtcctagaagtggaagatacctcagaataccagtgccctttactatttcctagtattcagatcagtgctttccattctgttgccaggtttttacataggtggttctagatagaatgatcttattaattgagttcctgtataagagacagcaaatggtgtgtggcaggtcaagattctgacctagcaccaactgctaaacaccacagtgaggccaggattccattcgtaattgtgatcatgtttaactaaaagaaaaaaatgtgtcttttgactgcctgtgagtatgcgtgtgcccacgcgtgtgtttttgtgcagtgcaggaagcagctgtcccattagtttgatttttttttgttctccccttccccctacttaatgagtataaaactcttacttttctcctgtcctacatctcacagtcctaataaggttggtccttcttttcctcaagtttcctgaatagggagggtggtggactggtcgtgtgagtagcacaacctttttctgctaaaagttagcccaagaagaaacagaacatagaaagcttggattcccgtcagtgaggtagggatgtcctaaaaagcttgcctgggatgactgcaggctgccggggttctggggcctgatggtcactttgtcttttcagacatttgtttgtttctaaatccctctctcatggaatacatttgcaagatgtaattaaagaaaatattttgatgtgaaaaagcaggataggtcagatagatttgaaaagatgggatctgtcaactccttgatccatcttttgcttttgaatttttcatgtttacagtagtgattctttggtaagatttgtaaaatgttaagacacttgtagaatcagtgtaccagttgtgaagtgatgtgtaatatctgaaggatacacattttaaagtttctttcaaagcagaatatggaaattagatataaattttattcgccctttggtccttttaaaataattcaagtacttgggtttaagtaaatttgaaaatagctttgggaaatgtttttaaaatgccaggattttaggggttaaagatcatatggggtagtttaggaagtttgtgactatgagatgaatttgtgaggtttcttgcctaccttttttcccccccagagaagggtggaactagattttaaaggcatctctactctgcttttgctgagtagtttcactgtcccttgagataccattggctatttatacctgagtctagtctaattcacatatatatatattttaaaagttgagagaacatacctattgatgtggttcaataattcatttgtcagggaatatttgatcttaattcctttctaataggtagtgattggatgtattttcctacttcctgtatgtaatctctttatgccatgctagttctaaccagtcccttcttttgaaagcttttctttctctgctttttaaaggaatgatggtgatcagcaggcattatgcagataccacgtgcctgaggttatggaggggaaatgtcacatgactgtatgaaatcattatatgccctattttgtatttattgatgtttctttttgtgggccaaaaatatgtttgtaatatatttagtttttttaaaatcatggtaattgattggaagatttatttttaatagctttgccttttttgcagagtgcaaaatttctaaattataacttatgtcataaagcaaaattatatttggtatcaccataaatttctattctgaatggtgagaacagataatttgaatatttctcacctgtgagtctatatta

SEQ ID NO: 25318 - DNA, 2300 bp, Homo sapien
ctcccaaagtgctgggattacagacatgagccaccacatttggccctgggtttcattttcaaataactttgggaaacactgccagatgggtacagtttcctcttggaacttcataatgcatgttacacaaagtgctttgagtagttgcacatcagtaacaaaaaacaacaaaatcattctttaattttgtttaagccagcattttccaaatttatttaagcatggagtactgtttttttttgttgtttgttttttgagacgagtcttgctctgtctctcaggctggaatgcagtggtgcagtctcagctcactgcaacctctgcccccgggttcaagcgattcttgtacctcagcctcctgagtagctgggattacaggcatctaccatcatatctggctgatttttgtatttttagtagagatggggtttcaccatgttggccaagctggtctcgaactcctggcctcaggtgatccacctgtcttggcctcccaaagtgctgggattacaggcgtgagccactgcgcccggcccttttataggttttttttttttttttttttttttgagacagagtctggcactctcacctgggctggagtgcagtggcaccatctcggctcactgcaagctctgcctccggggttcgcgccattctcctgcctcagcctcccgagtagctgggactacaggctcctgccaccacgcccggctaattttttgtatttttaatagagacggggtttcaccggattagccaggatagtctcgatctcctgaccttgtggtccgccgcctcagcctcccaaagtgctgggattacaggcatgagccattgtgcccggcctttataggtttttaaaatagcatgaagagtgtgaagacaacaataaatacctaacttttcaatgcccacacagacgaaaattcacaagcttcaagaccatccaggaaaacatgacatcaacaaatgaaatacataaggcaccaaggaccagttctggaaaaacagagatatgtgatctttcagacagagaattcaaaatagcagttttgaatttaattttgctctttttttttttttttaaactttccacaggaaaagtccatgtcagatggcatcactggtgaattctataaagcatttttaaaattattagtttttattattttattttaaagttattgaggtacaggtggtatttggctacatgagcaagttctttagtggtgatttgtgagatcctggtgcaaccatcacccaagcagtatacttgcttattgttgaagactaatgagagtcttcatgagctttgattttagttggtcttagctctgactctttccagctggaaagagtctcaggcaagttcatcaatttctgtaaagcttagtttcctcatctgcattaagggaattattttagcgcctactgcaggtaggtactacaggagataattcatgtacttacatctggctattgaaaaaggcatttcacctataaccccacgaaccatcttttactttcttatttcattctctctctctttctctgtctctctctgtatatgtgtctaaagcacagtagacacttgacattcttgagggttttatgtcataagagctttgtgaatctccgaatactttaatggcattagaaaatatatatattttttctcataagagaattttaagtgatcttttagactcttgatgagttactttgtatgctatgaatagagaataacaaagccatgtgagaagcagtagctgagcagttatccagggccactcagtaactgaatgacttgcttctgtctggccacccctgtgcatgtacagttcacatatttgcctcatcaaaattacactgactttgaggactgcttgaaagtagtagaggtttgcatgttaagttgctggctgccaagagtcactatagtgacgcaatttttaacattaggattctcatgtagttttatgttctacttttaaaaaatatgtatcatgactgttttcccatgtatgtgtgtattttaaaggtactgcaacagccacttgcaggtacttggctttatcccgaaaaaagagaggaagaaaaagaatgatcctatagatgaggtgaaggtcaggcaccagatggataccatggcctttagcctgacagtgcccacgttggccttgaagatgcccaacggactggatggaatgtccctctctccacctggggcaagggtccctctccactacctggaaaccgaattggaagacccatttgctttcaatgaggaagatgat

SEQ ID NO: 25319 - DNA, 2300 bp, Homo sapien
catgcatgaccatgcctagctgatttttgtattttttagtagagacagggtttcaccttgttagtcaggctggtctcgagctcctgacctcatgatccgcctgcctcggcctcccaaagtgctgggattacaggcatgagccaccgtgcccaccctgtacttttcagatcttaactcataaaccctttccccacatcagtgtcccctgtgttttcttctaatagttttatagtttcaagtcttacaattaggtctttgatccattttaagttgattttcgtatggggtgaaaggtgggggtctagtttcattcttctgcatgtggatatccagtttcttagcacctaaatttaaatttctagtccaacttttttttcttacattctcataaggtgaaaagagaaagctcttattttttacattaatgtgtgattaatttacttagtaatgaatgtgattttttttccctccagaagagaaaatatgatttttattaactaagttaatattttgagtttttttttttcctactacagtaagtgaagtatgtcttgagaagactacaaattctctactttcattactggcaggtggaatgtagtcttgtattacaagaatgaacacttgtgaatagtaatttgtttctctagtatttaccatatactagggatgatacttagtatgttggatgctttgtatcatttgatcattccagtatcctgataacatagctactattattatccctgttttacagatgagaaaactgacattcaaataggttaaatgatttgttcaaggtaacacagcaagtggcagattttggacttgaacaaccgtgtcttctgacacctccagcatttatgtatcttgtcatttactggtaaaacagagagtatttctggactttttcagtagctgatatctgagctgttccatcagccatcttgatggctggaagtgtggaagaggatgggtgagactccatcagctcactaagatcctgacttggcaaaatagattcagtttcatgatagactagatggtgttgtaatatataaatcctaccactgggccttttgcgtgtagattggtagtgagtattgtgtaattccctccttccattttctcactgactctgaaaagactcataagccacgattattttactatttagtgtgactggaagcaccatgtggtgcagaactttgaaatgaatgatataagtgtggtcagctgactagtctttgggcctgagaagtttattgtgattggatgggataggtgtggggaaatattataagggaaagaacattttttaatgacagaaatttaaatacaaaatttattttgtatttcatagaaaaatttataaattgccaaatattttaccatcatatcaaaagaagtagaatttctgagagaagttttaggtctaccatttattctgctggcattgtaaagggatgtgggttctgaaaatgagtatagcatgcaaacatcagtaatgaaaaagagacctgctacctgtgacattcatttggtggaagagttttgctgctttgaggtatttatagaacttaaccagagcaaatgttatttagttcaatttggggggataaggtaacttactttttttttgttttgtttttgagacagatcttcactctcacccaggctggagtccagaggtgtgatctcggctcactgcaacctctgtcttccgggttcaagtgattctcctgcctcagcctcccaagtggctgggattacaggtgcccgccaccatgcctggctcagttttgtatttttaatagagacggggtttcgccattttggccaggctggtctcaaactcctgacctcaagtaatccacccgcctccaaggtgctgggattacaggcgtgagccacggcgcccagccaacttaatgttttataatgtctcttattttcttatttaacctcgttattgggatgttgatttacagtgaagaatccattgcattagtaagggtgatatcttagtattttgcttcctgggtgagctagctttgcttatttctgtttgttaactaggccttttgatatttttatagacaatctgcttcatcctgattctgcggcattccaaactgtggtatccttgggggttctcttaacattgctatggtgcagaagatttaaaatcaggtatggctgtggggccagaagtccctcagtgaaattctcaacttaaatctgccttatactctctgatttatcatttgggtttctttttttgtggtggccttttagct

SEQ ID NO: 25320 - DNA, 2300 bp, Homo sapien
atacaatctcaaatatcaagattttcttaagctcaatgctaaatgaccggatatctatcattgtggagaaacagagtttgatcttaggcagacgaaaggaaaagaaaggcacacacctagaagaatcacatgagtctcatttcgaagcctcacggaagtcagcactgaaagtcgtgggtgacccattgccctgcaagtggtagcttttcactaacaacagtgctgggggtactgagtgggcagaatgtgggacatctcctgccagcaactccagcctgctaccaagcaggacaccgcacataaacacaacactctgccctaagctcaccaaaaaaaaaaaaaaaaaggaaaaaaccaacaattaaacgatgcaaaataacctctccaaacacgcccacactggggactggcagtggggggtggcagggtctattaacatttcaatgtcaacactcaagaacaacaaggaggtaagcatagccacgggaaacatcctgtccctgaaaagcagaaaatcgagatttggaaatttatgtttatcactttttttttttttaacgttcagagctcagggcaccaaaatatagctaaaattgaatccatttaaacagaaaacatacgtgtgtgtgtatgaatatatatgtgtttatatatgcatataaaatatatacatacacatatatttttttttcgtttaaatgttatacatacacacacacacacacacacacacacacacacaccccaaaaccaaagtagttttgctaggttccgagggctcttccacagacccttctgagttgtagcaataacaagtttaggtttccttaaaatctccattactctatttctaggtcgaatacaagaatgtcacataaaactaaacagtgattatcagaataaatgaactactgatccttaaactgtagaccttgtttcgggagctgccctgcccacttcctctccctcctcccaatcccggaggcttccaagccatctgacaaccacgtctcccccttgggatctgttccggtgttggttttaccggacagtgaccaaaaaggaggggaaactcctacatctggggactgctccagaaaccctgcctgatcctgcccctctcactgacagtctcctcgctgctccctacatcttcctctccgccggagctgtccagaagggggattttggacccaaaggaatcgggatgaaagggggtgggtactcaagctgaaaataacacccccagttggtggggtaagggctaaaaaaggcaatagggaaagattgtccggcagaaacaccacctgagtttacctcctccttcccaccccaaaaacccagtcactaactaataaagctaagaaaagccccttgcaaacttttccaaaccggaagagaaggccctctccccaacctggggggctctagggggaaggggctggagttagcagccccgaatgggctcgcggggagttgggtggggcgcgggcgaggggtgcaggggcggagtaccttcttcaatggacaggaactggcaaagagtttcaaaatagccgagtgcgctcccccacgccctggggggtcccgggcgctaggaccagggctccccggagagacagcggcccccagttcgggcctaaaaggaaactttctgggccgcggctgcacctgactcctcaccgcccctccacccgaccccacgcccgccaggccgcccgccccgccccgccccggcctggccgtccggagcgcggaggagggggataaataaattcaactcttaccggaatctgggggccgtctgcgagagacccgggggaaggggagccgggcgcccattccccactccccactcctaggccctgacgcccctgtcccggcagcccgggcctgccgccccgcgggaaagcctccgggccggcgcgggattcggcccagcagcgccgccgtcccacccggagaccccgggggactcgagggggcgcgcggaggcccggggtgcgggggcagggcgcggctgccgtggggcctaccggcccgaggcctaccggcgcccccccctcccgccgcacacccccacctggcccgcgcaggccgctccgctcgccccactccggctccggctggacccctgcccgcccgccgtcgccgcccgcgggcgccccggaggccctcaggcccccggcctccaccacccgggcgccggccccactcaccctttcattctccgcccggggcctggcgtgggccggcgaatccccggcctcacgtaagcgcgctcgccgcccgcccagcct

SEQ ID NO: 25321 - DNA, 2300 bp, Homo sapien
tatataaagaaaaataagttgttagaaaacatgtttttcaatttcgccagaggtctagttaagggattttccttgtgataactaatgtgtttgatgtctaaatgtttaaaaaaaatattgtaaatagaacatagcttcacaattgaggtttccaagatgatgagaatcagttaattttacttaactttttccaccaaacaaagaggaagaaaaccacagaagaaaatccagaataggccgggcgcggtggctcacacctgtaatcccagcactttgggaggccgaggcgggcggatcacgaggtcaggagatccagaccatcctagctaacacagtgaaaccccgtctctactaaaaatagaaaaaattagccgggcgtggtggcgggcgcctgtagtcccagctactcgggaggctgaggcaggagaatggcgtgaacccaggaggcggagcttgcagtgagctgagatcgggccactgcactccagcctgggcgaaagagcaagactccgtctcaaaaaaaaaaaaaaaaaaaaaaagaaaatccagaatatttaggtaagtactatattcaaagttatatgataaagataaggttcagctagaaactaataaatatccgatatatgcattacatgaactcacttttaaatcaggacaatttctaaatttggaagttatttctaaatgttgtgtaataaattttacaaagaaattaaatattctactgattcagggcactaatataacaaattcattcctgccaggttagtcaacatgtgttagaaaaataacttttaatacaagatttaaatcatcatccccagtagaacatacaaagatagtcggttctttttctattatttttctctttcttcacaaaaatagaaaaatgtctctgcaatttatcctccaataagcgttctattggaatcgatgtaaatgggtaccctttgtccctctcacctctgtgctaacagcattgtttaactctgatcccatttatctagtaagctttgctcatttaaaaaagtaaattcatgacatccactgcaatatacaaaaagtctatcatacaggctggcagcacattggaagttctgaactaacataactaacaaaaatagccacatttctcaattctgtgacacaaaaagcagatagcaacatgtgtaatgcaccaaagatctagctagagtttaaagaatctaaataaataaaaaaattaaatgcccggatataattcttaataagctattttacctcaagaaaaatctaaggctgtctttaaaatctctttccagttttactgtatcctttctgtatgggcagcataacagaatttccagaaacaggggccgtttttaaatccccagtgatagctgcctttatctgcactgtggaaaatgacacactgtatcatgcctttctggacagtccataggttttatttacattgctttgagaaacagacgaaagacatgtttttttacaattgtcttacagcaatctgttctgagagtaacatgtaacacaaatttttatatgcaatatatgaaaacataaatatttatatatacaataacataaccagacaaataaatgaagttactattaagtctctttaagtataaatttacaaactgaccaccagccacagaacttagccctgtaatggagaaaaattattactggcttaaaaaaatattaaaatatcactgtcactaacatgaaaaaaattaaaaacagaaaataaaaaacaataaccaccggaaaacctgtgtcttgtaaagatttctttccatcagaagatgcagaaacatttttccccctggagcaaatgaaaacgtttctcatgcaccccccgtttcttccctgctttctcccccaggcgcgggtgtagacggccggtgtggacttttttccagagatgagaagtaaaaatttgtactttatcgggagcgggtgcacttttccccctggcccccctttgctctgcctccaagatggtaggaaagttgtcgtttcggagggcagaggagcagctctctggtgttatgtcctcgcagtgcctgtagtggtgctgtaggaggctgctgcctcttcttgtacagccccggcagccctgccttcttggctggagagtatattcagggatttccccttaataatcaccgaccctgggagcactttttagtttccaaaataaaaatatgatcctcacccctcttgcttgacagggaaaggctctcgccggagcccaggggggagcagtagcagcggcagccgagcttcctagt

SEQ ID NO: 25322 - DNA, 2300 bp, Homo sapien
aagccgagatcacaccattgcactgcagcctgggtgaagaaacaagcctccctctcaaaaaataaataaataaataaataatacctcctctgggataagtagtgctccgtctgtctcatgggcacatattagtgtcgtaatgccaaatactaaggttattgtaagcataaacattgaagataattgctagagaaaaatagactgaaaaagatgtaagaaaaatacacgtagatgagagtaacctgtctggtggaatcatgacattctaagcagtgaaggaatcaccaatgagaaaatctacaaaggctcaagatcaagtctctttaggtgaataaggcaatctagaaagaccttggaataataataccatttcctgaggaccttctaaataagtgccattaaagctttaaatacattaagactattcttcacaaaatctctgctaatagtaggtattaattgagactcaagaaatatcaaataacttatttatggctacacagctagatactaatggcaggagtgtttaattagaagtacttttactatcccaggttgcctcaaatgaaaacattttggacagcaatgtaaggtgaatagctgagcatgatggcacaagctatagccccagctacttgggaggctgaggcacaaggattgcttgagcaaatgagttgagtccagcatggacaactgtattcctgcagcctgcttgtattcctctcctcaaagtgctttttccttctctgccacatgactagtctgtgaattttccaaacttctacgctctgcttcccttttaaatatgttccaactttaagttatttctttgcttccatatctgattgtaggctgctagcatcagccaggccacatcttgaatgctttgctgcttagaaatttcttctgccagataccctgataccctaagtcatcactcttaagttcaaacttccacagattcctagggcctggacacaatgcacccaagctatttgctaaagcatgacatagatgtacctttattcctgttcccaataacttcctcatttccatctgagacctcatcactctggacttcaccatatgtctatcagcattttggtcacaaccacttaactagtctctaagttccaaactttccctcatctttctgtcttctgagccctccagattcttccaacctctgcctgttacccagttccaaagctgtttctacattttccaatatgtatagcagtgccccactgtcagtactaatctgttttaatctgtttgcattactgtaaaggaatatctgagattgggtaattcttgcaaaagagagatttaattggcttacagtttctgcaggctgtacacaaagcatggcaccagcagctgcttctgatgagggcctcaggaagcttacaatcatggtagaaggcaaaatgggagcgagcatatcacatggtgagagagggagcaagagagaggaggaggtcccagactctaaacaaccaaatttcacatgaactaagatctcactcatcaccaaggtgatggtgccaagccattcatgaaggatttgccccatgattctatacctcccacgaggccctacctccagcattgggggttacatttcaacatgagatttggaagtgacagccatccaaaccatatcagcaacataacaagacccccaactcttaaaaaaaaaagttgaatatatatccaaaaatatcttgaattccatatggaaagcctcccccctcaaatttgtagtaaattgtattataatgaatacattaattaaaaatatacttggcctggcacagtagctcaagcctgtaatcccagcactttgggaggccgaggcaggcggatcacctgaggtcaggagttttcgagaccagcctgtccgacatggtgaaactctgtctctactaaaaatacaaaattagccagccatggtggcatatgcctgtaatcccagctactcactcaggaggctgaggcaggagaatcacttaaacccaggagacggaggttgcagtgagtcaagattgcaccgttgcactccagcctgggtgacagagtgagactctgtctgaaaaaaagtaaaaattaaaaaatatatttgacaatacccagtaccaatttattgtttgttgttgacattaacattttctttaagagtatttcttcatctgtaaaatgaggataaaaattgtaaaattgtacctacttccagcctcatagaattgttttgatgattacatcagaaagcttgtaaaaaccttaggcctgtttcctga

SEQ ID NO: 25323 - DNA, 2300 bp, Homo sapien
tctactaaaaatacaaaattagccgggcatggtggcgcatgcctgtaatcccagctacttgggaggctgaggcagaagaatcgcttgaacctgggaagcgaaggttgtggtgagccaagatcatgccactgtactccagcctgggcaacaagagcaacactccatctcaaaaaaaagaaatttagtttttttggtttctgagatctcagtttcgggtcactgtatcctctgcctcctgggttcaagcaattctcctgcctcagctgcctgagtagctgggaatacaggcatatgccaccacgtccagctagtttttgtgttaggggtcttgctctgccacacaggctaaggtatattagcatgatcacacctcactgcagccttgacctcctgggctcaaatgatgctcccaccacaacctcctgagtagctgggactgcaggcatgcaccaccatgcccagctaattttttaaaataccttttgtagagacaggatctccctatgttgcccaggctggtcttgaactcctgagctcaagtgttcctcctgccttggcctctgaaagtgctgggagtaatagacataagccactgcatccagccagaaatttagttttgatacaatattatttcataagcctacgtttatatttaaatttcattgattttttttttcataatttcttttatagcaatttttttgtttcctcaggatccattctggagtcatacattacaattagtttcatgactcttctggtcccttttttgacttttttttttttttttttttaagaacacaagccagttattttctagcatgctttctgtcttttaaatttacatcttagagatttataaagagggtaaccatatagtttattgtctaaactacgggagtgaaagagggaattaataattacatcaggataacagggaaaaaaaaaagcattatctcagacaaaccagactatatagtcattgcacttatgactttttggaggaactggagccatagttccctgctgtggagaataaatgtcaataacatggtatattttcatgaattatgaaaatgtttaaatatccttaatggataattaagagataattgaccctgtcatgtaaatactgcaaaataaaaattacagattaattctaaaattaaaatttttttaggccgggcacagtggctcatgcttataatcccagcactctgggaggctgaggcgggtggatcacctgaggtcaggagttcaagaccagtctggccaacatggtgaaagcctgccttctactaaaaatacaaaaattagctgggcgtagaggcaggtgcctgtaatcccagctactccggagggtgaggcaggaaaattgctggaacccgggaggtggagcttgcagtgagtcgagattgcgccacagcactccagcctgggtgacagagtgagactctctctcaaaaataaataaattaataaataaataacttttatagctggcttactagcatttctttcttttttttttttttaaattttttattttgaggtggagttttgctcttgttacccaggctggagtgcagtggcccgatctcagctcgctgcaacctctacctcctgggttcaagcgattctcctgcctcagcctcccaagtagctgggactacaggcatgcgctaccatgtccagctaatactgtatttttagaagagatggggtttcaccatgttggtcaggctggtttcaaactcctgacctcaattaatccacctgccttagcctcctaaagtgttgggatttacaggtgtgagccactgcgcctggtctggatagcatttctacacagcaaattaaatcactgaattgccttggcatgcctttttgcaacactgttttgaaaggtacgtagtaaatcatatctgttaaatgtattgtctgtgcttttaacattttgtaatagtaaatagatgtatcacttaggattgatgagaccagtaactgcttagcttagttatttacttcttaaaatgttgtttttatttcagctggctgcataatgacttaaaagtggcccttataggcagtccagtggacctcacttacacatatgaccacctgggagactcccccaaaattcttcaagacattgcttcgggaagccatccatttagccaggtgctctcaacttatgtgtatctactcttgttgatttttaattattattatttaaacttaactgtttttgtaataatcctatgtaagtgttaaaacttacaccaggttgggcgcggtgg

SEQ ID NO: 25324 - DNA, 2300 bp, Homo sapien
aaaactactgatggcataaatataaacctaaacttactccattagagcactgacagatttgaaatcaacaatcagtatttcatacaattttaaaactttaatacttttttatctccaatgcaatataaaaatagtactcactttggataggaaatcaactagaactagactgttgacatccagcaacaaagcatagcccaacataagaaatacagatttgcaacacttcgatatgtgctttgaacattgatatgccaagtagcaatagaaataattatctctttggatggaaaatgttaatgactaatcatttcttaaactagactggatacttttccatatagggactatgctattccacgttctccaacatggatccatccatttacttcttgccttccaaggtaccaccctatcccaatccaccatcactccttgcctggagtatttcaatagcttttttttttttttttttgagacagagtctcgctctgtcgcccaggctggagtgcagcggagcgatctcggctcactgcaagccccgccacccgggttcacgccagcctcctgcctcagcctcccaagtagctggactacaggcgcccgccaccacgcccagctaattttttgtatttttagtagagacagggtttcaccgtgttagccaggatggtctcgatctcctggcctcgtgatccgcccgcctcggcctcccaaagtggtgggattacaggagtgagccaccgcctccggccttcaatagcttaacaggtcaccaagcttccacactattcccacacagcctctcccctcttgccaccggctgtgacctcagactgaaatgctcttccctggcccctccttatccttcaaatcttggcttaaaagccttttctcagtttcattgaccaggctatctaacatttacgattcccccagcatatcatccattttattcttctttacggactcatttctggctcgtagtaaatgttcaataacggttaagtgaactgaatctctaatttctggtcgttaatttgtagagaccactttcccggatttaaaaagtgcaggtgctctggcagccttaagtcggtgaaaacaagaatattccgcaaaacaaaaataacttgtttattcatcaaaaacagttaacgttacacttctataccgtcaattcgtgtgtgaacagagttgtgtctgatccaagaccttacagttcaagcactggatcccaataacctgtaaacaacgttttgttatttgcaatgcaatcctgggctaacttttcaaaagtcgtttttctcaatttcccgttagttaaaggaataaaaaaatgctgtccaacgtggtcaatggaccaaacaaacaaggacaacaaacagaagcgtgagccattgctaacacaacagcgaccaaacaatcatgcactgtatcaggcgtgtaaaaatctggggggaaaggcttagtcttaaggcctaagtcatcggacactggtcctctcccggggaataaaacggcctcctcctctgagagggaaatgtcctgaattttccctgcagagggaaggtcacctgcaagcctacattcgtgacagcgttcccgaggaccccctgatcctcatcttcttttctgcttcatcagaccagagaccgtggctaaaagccccccatctgccggctctcaggggcttccgaggcggcggggcgggaggcggcgcccagtcaaggacaacagaagactacgtcgcgtgggccaaaggaaacagtcccgtcaataaataagcctctggccgacgcacctcacccttcccatccatacaagacctcaccttctccccggagccgcggaggctgttctgctaaactgtctggaccacgacgaccccctaggaggccgggtcgcttattcaatatggcggcctcggctaactctgtcagccgggcctggagaacggaaagcccggagggactagaatccttgcattcgacaagtttgtcggcaatttccgtcagccgaccagagggcggagctgaggtcggcccagcccggaggcgggaaggacaacttggacccgcagttccgccggaagtggccccagcctcgaggccgggcgtcttcggtcatctccggcgcttctagggctggttcccgtcatcttcgggagccgtggaggtacgaacttaagacatgcctattttattaatttacttccaaacgcaacgaaaggtccatggacaatttgtgggccatttaattcagggcccccaattcgtacgtggagaagtgggaatgca

SEQ ID NO: 25325 - DNA, 2300 bp, Homo sapien
tgatccacccgcctcagcctcccaacatgctgggattacaggcatgagccactgcgcctggccgatatgttctttatagaagacgccatacctcctcatcatcagatccaaagaggtcaatgtcatcatcatctttactatctgtagctccacttcctgtagtgtcttccacatcggcaggaccatatttgcccaaagctttcttcactcctggcaggcttgaaaaacatttaaattcaaccactattgagctagtataacatccttttccagaaaatacaaaataacttgttttaatcactacttatcactagatcccttttgcaatcataatttaccctttcacatgcgcccaggtaaacactgtcatatgttcaactcctcacccgacaagcattagtaccatgtgagacattattttcaatactcactatgatttactctttcagtatgaacatttctgtttgagatttcattaagtatgctcagttccattcttagtgaactggagtccacttccccaaacttccacccttgttggcagtttcagaagaatggccaaggactgaatgaatgagccaccctctcaccccagaggtgggccccccaggtcaaggtcgaggcacattggcagggcagtgtggggaaaagttgaattgctgctgtccatgttctacctgttctgtgaaaaaatggagggcttcagtctcttggccttctaaggttacagaaaaatttagcttacaatatcccaacaaaactaaagtagcctgggtccagttttgtcatgtgaacatcctgataaacttcgagagcagtcttattcttcagctctatacaaagatgattttacctggccttttccttttcgtaagacttgatgtgattataccaacgtagggcatgacacaagtcggcaggcggtgggctggacacggcttcaaatactgccacatctgcttgtgatggcacatacctgccaaggacacagaaacattcacacacacctttgaaaaacaaacgccagcgaataaataataaataccgtatgcatcacattaattagtgggcactaaccccagcagggttgctttaatgcttttcttttcttattagctccttcaaatcaaaccatatgtttgggtcaccgcgctatcctgagaaatgtctgccactaagtagacctcaaatactgcaatgtctggcgttgctctatctacagcttaacatgtattaactgggcagcgatgcggaaacacctggctgaattaagtgtaaataaagcacattttaacctttccttgctcgtgaaccgctccccggaggccgggctcgccccacacgagggccttgggagacggcaacggggcgctttcccctccctctcgaaagggccccgggcccggcctccctccctcccgcggcagccgacacgctgcgccacgtggccccggccccgggcggagaaacctccccgccaccccgactcagcccgtccgctcacccctcgatgtagctcttgtccgccaggtaatcgttgagcacctggaggccggcagggcttttcaggtctccgaaacccatggtgtcggctgtatccgagagctggggagcagcagaaagagagcgcgcaaattgtgggcgccccacgctgaagagaggaaaaaggacccgaagagaccggaaaattccttatatagagacggaggcgtttccctccaccgcgccggaccgaaggttaaaggtcaaagtacttttgcattcccacttctccacgtacgaattgggggccctgaattaaatggcccacaaattgtccatggacctttcgttgcgtttggaagtaaattaataaaataggcatgtcttaagttcgtacctccacggctcccgaagatgacgggaaccagccctagaagcgccggagatgaccgaagacgcccggcctcgaggctggggccacttccggcggaactgcgggtccaagttgtccttcccgcctccgggctgggccgacctcagctccgccctctggtcggctgacggaaattgccgacaaacttgtcgaatgcaaggattctagtccctccgggctttccgttctccaggcccggctgacagagttagccgaggccgccatattgaataagcgacccggcctcctagggggtcgtcgtggtccagacagtttagcagaacagcctccgcggctccggggagaaggtgaggtcttgtatggatgggaagggtgaggtgcgtcggccagaggcttatttattgacgggactgtttcctttggc

SEQ ID NO: 25326 - DNA, 2300 bp, Homo sapien
actgtgcttaaactatgcgtggcacataggacaatccttgatcaatgtcatttctcttgtcgcttttcatattctttgctactcaatggttcctgctctatagccaaaaataaactcatgtaaagtaaccaaaacttcctgagattctcctcaataatggcttttacagatgaaattgtgattttgtggattacagaacatagtatagactatagtaaatactaatactgctaacgcaaaggaatggaaactagcagagctctactaagtacccccttcactgacgacatctattcatccggtctcacaaaacactgaaaaatatgccaagattgaatcaagggattgcgggtaggtgtggaagcctatacattcttatagggcagagggatatttgtagtttgaaaaagtgcaccccctacccccgacctccaccgtgagaattcctgctttagatttcctagacttggtctttaacagcggaaaaaaacaaaatcctgtgcttctctggcagctgacctttcatggcctaacaatgtgcaatttcaggtatcacatggttgagctgaagttagaccatacaaaaataaagatagcggccaggtgtggtggctcacacctgtaatcccagcactttgggaggccgaggcgggcggatcacgaggtcaggagatcgagaccatcctggctaacatggtgaaaccccgtctctactaaaatacaaaaaaaaattagccgggcgtggtggcgggcgcctgcagtcccagctactcgggaggctaaggcaggagaatggcgttaacccagaaggcggagcttgcagtgagccgagatcgtgccactgcactccatcctgggcaacagagcgagactccgtctcaaaaaaaaataataataaaaaataaaattaaaaaaataaagatagctagccgtcagaggtaagctcaccacatcaaggcatgcctaccttcaagctccatgcttctcatcccttgaatttatgaattctgagtcctgcctcaggtacacagatgtgcccacatctgccaggcccacaaatggtgaccagggataaaaatcaaacctttaggccgggcactttgggagaccgaggtgggtcagaaattcgagaccagcctggccaatgtggtgaaaccccgtctctaataaaaatacagaaaaattagctgggcatggtggcgcatgcctgtaatcccagctacttgggaggctgacgcaggataattccttgaacacgggaggcggaggttgcagtgaaccgtgatcacaccactgcactccagcctgggcaacagcgagactccgtctcaaaaaaaaaaaaaaaaaaaaaaaaaatcaagtctttaaggccaggcgtggtggttcatgcctgtaatcccagcactttgggagactgaggcgggtggatcacctgaggtcaggaattcaagactagccgggccaacgtggtgaaaccccgtatctactaaaaatacaaaaattaaccgggcgtggtggtaggtgcctgtagtctcagctactccagaggctgaggcaggagaatcacttgaacctgggaggcggaggttgcagtgagccgagattgtgccattgcactccagcctgggcgacagagcgagactccgactcaaaaaaaataaataaaaataaataaacgttaaaattcacacttaaccaatatgtgattccatctcttcactatcaggacacactgaatcacagaaagtaaaatctcctgatgagccttataccatgcattcgaagaacattccatctctgctaatttaacttgccttttcataagcaaaagcctacccagacaaaggagggctgggtgacccccatccattaccgattttcagtctgcagcagaacagctagtagcagtggtttccattcaaaaaacaaacttcttacacaaacataggctggtcgaaagaattaatttgtacagtatgttcattgcttacttttctccaggattgcatgatgaatttttatggaggggggtgggggaagggaagaaccacattcaaaacccaacatcattcttctctacactgtcatttcaaaagccagataaaagtggaatgaggaatgcagccgttctgaacaccaccctccatttcattctggaaccgggaaggtacacccaggcatgacaatagcttctctcctcacagaaatttaactggtaagtgctttcctgtttgttttcctcaaactgacacatttacagtggacctgatgaggattcctgcagatgatttatttacaaa

SEQ ID NO: 25327 - DNA, 2300 bp, Homo sapien
ttttgtagagacagtctcactatgttgtccagtctggtcttgaactattgggctcaagtgatcctcctgcctcagctcccaaagtgatcatttttttaaaataacttttaggccaggcatcatggctcatgcctgtaatcctagcactttgagaggccgaggcaggtgaatcatctgagatcaggagttcaagaccagcctggccaacatggcaagaccctgtctctactaaaaatacaaaaattagctgggcgtggtgatgcatccctgtaatcccagctaccggggaggctgaggcaggagaatcacttgaacccgggaggcggaagttgcagtgagccgagagcatgccactgcactccagtctgggtgacagagtgagactccgtctcaaaaaaaaaaaaaattaatgtaaaaaatatccaaattcagccaaaaatttcatctatggactaaaatttacaattgccaaaggaaaaaaaaatagtacaccttgaagcactttttgtttcactgtttaaaattttaaaaaactaaaaattccaagagagaatatggaataaagaagttgaaatgacaagttctgcttctttattttgccatggttgtgctatcattatgtattttaaatctgttgtttgaatgcaggcacatgtagatcacaatgggaaaatgcaagctgtgccagtgttttggagccattatcaacttaatctcaagagaaagcatatctgaatcaacacatggcatcggggcatctttataattgggagttttttcagttatcttcaatgtaaaatacattgtctattaaagagaagtaacaaaaattaaaataagaatacttagcttttatgtaaaatacattgtctatttaaaagtagattatacatattcataaaactacagctcattataatcacagtaattgttcacaactgaaaccaaaaccaacaagaggtctcttgaggggaggagtatttcatcattgacttgagaattgctggcacatggtgccaacaaaaagcagaagggctttagttggttttattatcgtttttaaattccctacagacagtagtccctttattgcctatacctaggtggactgctccctactacacggcctttcgtcatacttccattccatagttaagctcagcaaggttggttttgttaattccataatgctttataatgcattcaggttttactagggaaacactggggattcattttcttttaatgaacaaatctaaagctccttatgcagtaaaaataagcacccagtgacttattctgcatattcaattttcctaaatggaagaaactcaataggaaaagaattagaaaaagatacaaaaattgaaagtgtaaattgctggaggatccagacagtgtccatgagtgaggaggacagaggagaaaggtgtggagctgggatgcaatgccctgccaaaagcgggcaggtggtgctgggagtaagccactacgcagacacctcgaacagtatccctgttgggacatgggcccagtgtacccagatctgctaattttttcatgaggagccgataatctagatggctaagatttctgacttctaaatgttggaaattaattcaaactctagaaaacactgcttcacaaacaaaacacattcacagctgcagtgagcccccaggctaccaatttcctaatgaaaaatgcaaaagtagcagctgaacaagtttaaagaggttgagaaaatatgctgtcttatctgatccttttcctttcctaaaatgtggcattttggaaaaatccagatacacttacatcatagccacaattatctgcagtttaatgagaaaagtagcataattagagtaggtaattgggagtgacctgaatgtccacagcagccctttctcttaaatcagggccaacaatggtgtcacccagatgctgttgactaactgatgtacaacagatttacttaaccactggcaaaccacatttccttttccagggcaataacttaaaatattatgtatttccctttgttgcaaagagaggaaatacttcttcctagactcagggcagctgtgacccgtcctcccagagaaatcattaaaccacaaggattcagacagagcccagagccctgaaaactttggccacgcactttcccgcagcagccacaggcaccggcaacttcagagaggtgagtgcttgctttgccccccaaagcttcacaccccgcgcatgccttgtgtctgagccagtatattgtagttaagaaaaccaacctaaaaatgctt

SEQ ID NO: 25328 - DNA, 2300 bp, Homo sapien
gcctcagtcttttcgtcttggatctttttttttttttttttgagacggagtttcgttcttgttgcccgggttggagtgcaatggcgcgatctcggctcactgcaacttccgcctcctgggatcaagcgactcttcagcctcagccttccgcgtagctgggattacaggcgcatgccaccatgcccggctaatttttgcatttttagtagagacagggtttcatcatattggtcaggctggtctcaaattcctgacttcaggtgatccgcccgcctcggcctcccaaagtgctggaattacaggcgtgagccaccgcgcccggcctgtcttgggatctttagtggtgccggatgccctaggttttcatcttgggattctttggaggccatacgcccgagttattttgttttggaatcatttgggagaccgtatgctccgggttttttttgttttgtttttttgtttttgtttttgtttttgtttttttttgagacggggtttcgctctcgccaggctggagtgcagtggcgcgatctcggttcaccgcaacctccgcctcccgggttcaagcgattctcctgcctcagcttcccgagtagctgggattacaggcacgcgccactatgcccggctgatttttgtatttttagtagagatggggtttcaccatgttggccaggatggtttccatctcctgacctcatgatccgcccgcctcggcctcccaaagtgctgggattacaggcgtgagccacggcgctcgactgtcccggtctgtttgtcttgcaattgtttgcagtagcgtactccctgatttttcgtcttgaaattctctggggaactgcactcccaatcttttcatcttggaatcctttagcggaccgtattgccctagtgcttttgtcttggcactgtttgcagtgctgtacaccccaatcttttcgtcttgaaaacctttgggatactgtacccttggtcttttagtcctggaattctttgcgggatcgtatgcacccgtttttcatcttggaatcttttgggagaccgtatgccccagtctttttgttgtgggattatttgggatactgtattcaccagtctttccatcttggaatgttttgggagattgtatgctccagtttttatggcttggaatcgcttgcaatgccctatgccctagttatttcaccttggaatattttgggatatcaaatgccccagtcttttgtcttggagtcatttgcagtgttgtatgcgctagtctttttatcttggaattatttggtggactgtacaccccaatgttttcatcatgaaatcttttgggaaacgctatgttccagtcttttcatcttggaatcttttgtagtgccatacgacccagactttttgtcttggaatctttaggggcagcttatgccccagtcttttcattttggaattctttggcgactgtattcaccagttttttcatctcggaatcttttgtgagattgtatatcccaatctttttgtcttggaatcgtttgcagtgccatctggcccaatcttttcattttggaactctttggggggactatacaccccagtcttttaatctacgaatcttttgggagtccgtatgccccaatctttttgtcttacaattctttgtgacattgtacaccccagtcttttcatcttggaatcttttgggagacagtatgccccagtctttctgtcttagaatcatttgcagtgtcatacaccccagtcttttaattttggaatcgtttgcagtgcggtatttcctagttttttttctcttggaattatttgggggactatataccacagtcttttcatcttggaatttttcagggaaccgtatactccagtctttttatcttggaatcatttgcagtgttttactccctagtctttttttttttttttttttttttaatggagtctggctctgtcgcccaggctggagtgcagtggcgtgatctcggctcactgcaacctccgcctcccgggttcaagcgattcttctgcctcagcctcctgagtagctagaactacaggcaactgctaccatgcccggctaattttgtgtatttttagtagagatggggtttcatcgtgttagccaggatggtctccatctcctgacctcgtgttccgcccgcctaggcctcccaaagtcctgggattacaggcgtgagccactgtgcctagccattccctagccttttcgtcttggaatcatttgtagtgtcatacgccccagttctttcatcttggaattctttagggga

SEQ ID NO: 25329 - DNA, 2300 bp, Homo sapien
gagcttgggaggtcaaggctgcagtgagccgtgtttgcgccactgaactccagcctgggtgacagaaggagaccctgtctcaaaacaaaaacaaaaacaaaaacaaaaaacagagagggagagaaaggaaggaagaatgctgcactattgtatgcaggattttcttccaagcagctgatcttattctgcaagttttgatgctggcaccttcttgatctcacctgaatatgtcaattttgtgttttcacgcaaaacattcaggacttgttttcctccttcaatggtgttattgaataaaagctgtaggggttgtaactgactaatcaggctatcaagaataatatcgaagttatttcatttttggggggtgcaagtaggcttagtatttaactgttcatatatgggttcccaaaatccatcaagaatgaatgtacttggtaagtaactcagggctcccagaagactactagttcttagccagtcccatctctttcttttctaaatgctggggaaatctctttttggtcctaggaaaatcttctccaggcaaatcttccctctttccctaggaaaatctctctccaagtttgagtgacttttgtctgttaattcccttcctcctagggttatgggttttattaaacaatgcacttatctcagttgaaatgaggacaacctgcacagcaacatccacgttgtaatacgtggaggtaatgacaaccaggtctgtactgccacccggtcaacgagagtttataagatgcatcttgatttcacagatgttaaaatgtggggaaaaacatggcttagcatctgtgaaatacataatgtcatggtgcttcgatcaatgtatagtggattttctataattccaaagttgggatgtggaaaaaacttgccttaaaagaaatccgtactttttggtatgttaaatctaagggaggttataaatcgaacagttgcaggagcccaactttaaagtgagagaaagatgtagtgggggaagaaggagctgagaaatacagaaagaataaaaacaatggacgcaaaagcaataggcaagtttttttgttgttgttctttaaagggacaaaatcacaagcttactaaaaagggtaacgacaattacagctacagccaaagagcaaagtagctcattttaagattatttttacattagacataagctttgcaacagggcctctctccattttagtaaaattggtttaggtgtttcagaaccttcttatcgcagattataatttcatattcagtagtgtgattcatttaggtttgtgatctccgttacacttaaactgtttttgctcacaactatattcgtaatggggtagcgcagtgaatataattgcatgacctaatgttgtttgttaatatttgtaaccctttaatgtgcaggatagatctttgaatacctaacttccttaagcctcagttttctcaatttgtcaaagggggacaataataggattcattcagagttactctgaaatgaaatgcaataatgtatagaaaccttaaacggtgcctagcacagagcaagcgctcattgaacagcagcttttgtgagatgcacctcactatgaaataggcatggaaacggaaacgactagctctcttagccccgttttcttttctacattcatacgttgctttgaattggcaagcagtttttatttggaccctcaaacgctaaaaccttggtctctacttcgcgtcccaactgtgcttatgagtctagtcatttttgttggaacgcgatagatttcccaagctccggagtggggccctgaccagggaggaagtgtccgctttaagagcttctggaggggaggaaggggctcctccgcccgggtgggagagtgagtgagtgggtgggcgggcagggggcggtcccgccgctcctgcgtcagaaggggtctggttttcgcaccttccctgacgtcaaacctccatcagggttgcaacgccacgttgccttggatgcctgcgtgagtggagtcgcgactcggggcccgcgtcctgagagacgcgctcccgcgccgcttctcgcctccggaccgcaggggccgaagtcgcctatttctggctccgcgggcagcggggccgtggcgctcggacggtctgggattcgggcgccgccgcggaaccggaataagaagggagagcgcccggctcggtcctcggtctccaccgcggcccggaaggaatccgggcagcctccgcggaggtgagtgccgcggcgggggcggggcgcggccggggcgacgcccgcgggcggg

SEQ ID NO: 25330 - DNA, 2300 bp, Homo sapien
tgagatcgcactactgcattccagcctgggtgacacagcaagacaccatctcaaaaaaaaaaaaaaaaaaagaaaaaaagaaactatattgaatcctcattccataccccaagtgcatgaaatgatgtgttgtaactggtgggtgggtttggtcagtccaggttggctgataggtttatttatcagaacagactttaagaggttgtcactgaattgcaagagatgcctttcaagtaacttgcatctgggtgctttgcacctttcatttccctctcccttctcattgcttgtacatctcctttctggcttgctttctctcaggccctttttcaggatgcatattgtgtcaaatataaatttggaaaacctagccagagaatacttgacttgagggagacaaccctaagaacattgacctgcagtgggcactccggtggggctagagtgttcactagcctgccccaagtgtgacttctgcttgtgtgtatcacccatttctttattcatttagtacatattttccaagcgatttctctgtgcctcagacactgtgtgaggtcctagggacacaatggtgtgcagaagggaaaactgttgttgccctcacatgggggaggtagcaacaattacaaatttacaggaataaatatgtgataataatatcctagctcaacatagaaaggaagttatctcagtatttacctaacagttttgtaatgtgtgtgtgcgcgcgcgtatatgtcttcttcttttctctttgttaagtgtgagtggagaagatgatggctaacactgagttctgtcatggccatggcacttttatacccacattctttcttttaatcatggaattctccaccccagccctcaccccgtggatgtcggagtaagacaacattgttatcactcagattgtcattgggagggtgaataaatgaatgcttgcattatgagagtttgggggcagaaatatgccacagactcttatctgaagccatcagatttagtggctgcgaacccaccgaagtcagggatttacattttttacagcaacgagagaaaacttcccctttcctctgcagaagtcaggactggatctcaaaaatagaaatgtgtcctcctaaatgtgtgcccatccccgtggttgacaaacaacggatttcccaagatagctgccacacacttggtttctaatctctgtattgcttccccgccagaatgtcgaagtccttcccgaatatgcccagtcatactttctgaacttttgagcaaacaccgtccggcttcttgtgctttcctcaaagaccccaggcaccggcagggaggacacaggccggggcagagcgcccctgcgcgggggattcctgccactccgcgccagcctgcggcgcaaacgctcttctcagccgcagtcccacccgctgctggcaatctgaatgaggagccgcgctatttttacctccccggctgcaatcctttatatttacatgcaggaagcaaatatataagggattaagaaggagatgcgtggccttagtttatccagagcaggaagaggttggaataggagagggtatgtgaagtctggggtggtggaaaaggcaggtggacttcggctggttgttttctcccgatcatccctgtctctggcctggaaacccccgtactctctttcttctggcttatccgtgactgccggctccccctccaccgcccccatcttttgaggtaccacccgtcacctccgatgctgcttgggctgctgcatcactctgctgctttacccccttccccgccccccaacaaagcatgcgcagtgcgttccgggccaggcaacagcagcagcacagcatccagcaacagcatcagcacccgaagccccgctcgggcgcgctctcggggggcggggcgcacgcccgctccgcgcgtccccgcgccgctcgctcccgcgcgtccccgcgccgctcgctcccgcgcgccgcctcagcatcctcaggcccggcggcagcccccgcagtcgctgaagcggccgcgcccgccgggggagggagtagccgctggggaggctccaagttggcggagcggcgaggacccctggactcctctgcgtcccgccccgggagtggctgcgaggctaggcgagccgggaaagggggcgccgcccagccccgagccccgcgccccgtgccccgagcccggagccccctgcccgccgcggcaccatgcgcgccgagccggcgtgaccggctccgcccgcggccgccccgcagctagcccggcgctctcgccggccacacgga

SEQ ID NO: 25331 - DNA, 2300 bp, Homo sapien
tgcctgaagtctcatttaagtttaaaaaaatacagtgattcaaggccaggcacgatggtgcatgcctgtaatcccagctactcaggaggctgaagcacaagaattgcttgaacctgggaggtagaggttgcagtgagctgagatcatgccactgcactccagcctgggcgacagagtgagactgtctttaaaaaagaaaagaaaagaaaagcagcccttcactgtacacacacacacacacacacacacacacacacacacacacacacacacacacagttgtccttgaactgcacgggtccacttatatgtagacttttttcaaccaaacacagtatttgtgggatgcaaaacctgtgcatatagagggctgactttccatatatgtggtttccacagggccgactgtgagacttgagtatgtgcagatttgggaaatatgtaggagttctagaaccaatccctgactttataaatatatatttatctctgttttctcccgataacccacctaaataacagttaggggataaaaaaggatatgaacccaccaatacaaagacaggagaagagaaaacaagcaggtgagatgtagccataaaatttcaggagatggaaagtggatgaggagtgactcttagctttgagcttttcatgctctgctaagttcgtatggggggaaaccaagaagaaacaagtcaacttatgtcacttatcccagaaaggcagaaataaaagcatctgaaaaaagaaaaattggttgaaagtagatgtagagcggttaagtccccaattcactgcctgccctgtggagccagataagcagataggaagtcggggacttccctagtctggtaggagctcatgtatggaaaaaaatggataggagagaattctcagctatattttataaataataaaaattattatttttattattataaaattcttttataaatattatttataaatattatttttataataataaaaatttattattatttattttaaaaagctgcccagaactgaagtgcatagttttcttgattaaaaggtgtcacagcaggaggctgaggcaggagaatctcttgaacccaggaggcggaggttgtagtgagctgagatcacgccattgcactccagcctgggcagcagggtaagaccccgtctccaagaaaaaaataaaaataaaagtgtcacagagtacccagtacaacaaaggagcaaaaattctaaaaataaataaataaataaaaatggagcaagaatgaaaatacaataattatagtggcagagctgtgaacaatatttgtgtacacataaacaatgaatatagatttaactaaaactggtgatatgaattagaatgtactgggggtgagagaggttttcgagatcctatattaggtagataatttctaaaatggaattagtcagaacataaaaagtataaacattcaaaaatatatagccaaacaccagaagaaacagcttaaaacattaaaaatggttgccttggaggtggaggggaaagagggacaaaggaaactgctgtgtttttttaaaaataaaacttgtagttattatttgactttgaaaactacattcatatattgcttctaaaatgtttttaaagttaatttttaaaggtaagaaaacaaataagatattgtataattttccattaaaaatgattataaacaaacttttggagtctctcttcagtcaagtggaagtccttattctataacaacatctgaaaagtacctgtactcctacaatacatacttaagaaatgtatgttttattaattaccttggtgtcattgttttttaaagccttttctccttcattcaatttaacacacacatgcttgttataaaaaagttgaaaaattgcctagtcttatttgcaactttatataggaggagtttctagggttattaatacagtgcacatatatgcccatccttgcatttctttttgctttatggaagcacccaaagaattaatcataatgcataaaatacaaccaatcaatgaaacctgctttccagggtggagagcactgttactaccatggaagcatcagaggcgtcaaagactccaaggtggctctgtcaacctgcaatggacttcagtaagtgggaatctcattggcattttattcattgaccctttccagtttcccttttatggatatatatattttagtgactcttccgtgccagtgctgtgttagggactgcatgtggagtggtgcacaaggagggcaatgtccctgtcctcttgaacac

SEQ ID NO: 25332 - DNA, 2300 bp, Homo sapien
gcatctagataaggagatctgagctggaaatatagattgctacttgaagccaagggaatgaagcagattggccaaaaagaatatgtaagttataaagacaagatgcttctcagaatgataccttttaatgggttgataaaggaatggaaacctacaaaggatagaaaggagtgaccatagaataggagaactgggagaatgcccccactatagcagtgtttcaaaagcctggaagggggcagtggtggcaaatgctgccaagggtcaacaagaaaaggatcggaaagtatctgctggatttagtggcatggaagtcttcagtgaccttcaagagaattgtggggtctgctacattgcagtgggtgagaaataaatggaagtgaagaactgaggatggcaaatatagggaactctttcaagatattttgatcaaaaaggacatacgaaaggcaatagctagagggggagatgagttttttgtctcttaggacaggagaaacataatgtaatgagtatatttaaatatgacagaaagggactattagaaacagatacaagactctagaaagagaggataattaactaagcaaggttcctatgaaggcagatgaggatgggattcagagcataagtggtgggattagattagacaggaggtaggactcctcttccattgaaatgaagaaaggaggaaaggatgagtccaagtacagacaggcatgtagatgtgatggacgaggttggagattttccaaactaatgccattttgttttgtttgggttggtttttgtaaagtaaaaagcaaagttgtctgttgtgttctgataatgcagaggaatgttggggagaaggaaaagatttggaggaagaggaaaaagactggaatagtaatgaggagaacagaagagagtgctgataagggaaacagagggatctccacgcagggttgagggccaattaaagctggtgaccatgaattttaaaggtgccctccgcttggttctacaatgtttctgtagtggtggctagcaggtaggacccagctacagaaaaggcaagtaattgagttcatccaggataaggggcttttatcaggctcatttcccaaaaggatagtggagaaagataatttaagacatggaccagaaagtggtttgaagagatgaaccatagatttgaactagacagggtggctgatagacaggggtagcttcagacaggttggtaacttaggagttaagttatcttaactgaggaagaatgctacagagagggctctgcatttttccccatccctcctgctctatcagatgcccaattccatctgttgtagtggctttaacttcctgggtgttgatggctacaaattgtgtgtctgaaacccttacatggcacctgcaccccatatatatgtatacatatacatatacatgtacatatacatatacatatatatccagctacttgctgatcatatccacttagacacactacaagtatctccaactgcacttgactaaagttaaatttctcattcatgatttttctctagttaaggtcagcatcatctgcccaagccggaaaatagaagttatcccagattcttctttcccacccccacaacttcctgacacacatcaaatccaaaagtgactttaccaccactcctcacttcaaactttaccttttggtggccattagtgagtagttcattatcagtactaattcatgctgaattagtagtagttagcagcctcctagaggaagtgaggtctagcatattactagaaaagaataaatattcagtagggttttttttctttccacattttgttacttaagattctgacctcctatgaagtttattttatttgtattaatctaataaacatcagaagtttatgtaatagcagtttatactgcaactttatgttatcaaattatatcataactatgactaattctgtaattacatagcaaatacttagaactacataataatttctgcatgatgaaagaaaacattgctaatttgaactcttttaggtagagcagattgtccatattatgctaaaacagaacttgtggcagactatttacaaaagaatcttcctgattttcggatacataaaatcacacaacgtcctgaggtttgggaggtaagaagcctttatagtttgttgaactcactcatgcacaaaatgtgttttaatttgattaaatattaactggtgtattagactggcttctaggaatgactgttcatgtgctagtgatatttgaatactagtaaaacaag

SEQ ID NO: 25333 - DNA, 2300 bp, Homo sapien
tcttggtatccagtctttttgtcccacactatagccgtaacattcagataaaattcagatttgattaggccctcctccccttctaaaaacctttcatgtactctggataaagtctaaactactgaatgtggctcaaaagaatctacattatctaactctagcctcaccttatgaaattctcttccttgtactatttgcttcagtcctaataaacttatttcaattttatacttattttatattctcaattgtcaccaaactagttctccttgctctaaccccactcccagttacccatgcctaaattgctcccctcctttctacctcttctctgttaggtaattcattatcatctttcaggtatctgcttaaaatctctccctctgggaaacccttacctgattaagtaaggtccctgctatcgttcctatagaaccctgccctgtcagtgtcatacatgcaacattctctgtgtgttttccactgacttcccaccatgtggttagtcagtgttcaaaaatattcttctgggccaggtgtggtggtgcatgcctgtaatcttggcactttgggaggtcaaggtgggcaaatcacttgagcgtaggagttcaagaccagcgtgggcaacatgacaaaaccccatctctacaaaaatacaaaaattagctgggcatgctggtgtatgcctgtagtcccagctacttgggaggctgaggtgggaggatcgcttgagcccaggaggtcaaagctgctgtgagccacgattgcaccactgcaatccagcctgggtgacaaagtgagagcctgtctcaaaaaaaaaaaaaaatctcctgtggatggtagatgtcaattgtgttcaatgcatcaaagagatcaaataagtcaaagactaaacagcttctataaaagtcagtggtgactttggtgacagcagtttctgtcaggaagcagaagtagaagccttcttccaagactgattggaaggcagaactggagatggaagagcagtctactcttttaagaaactttacgaggagaggaggtaggtaccatggattgttgtaataaaagccttctcagttgagtccttgctgtcaaccagcactttcaatcattctctccgttgctgccaagacaggcttcctaaaatgcaaactcattaagactactctcctgcttaaaatttttctataattcctcattgctttcaggatacagttcaaacacctttgcttgacctacatgaaatgcaaggacctggctcctgctcctgttgtagccccaggtcctgtcacgccccacatatccagatcttctgttaggccaggaagcttcctgcctctctgcttttatttggaatagcctcctcagctcacaccttcacaactcagctcctgtaataccttccccagccagttccttgtgtccacctctccctcatcccccaaacccagattaggagtctacgctcccagaggcctgtgcaggtctccttcatcgcgttaatcacaccgtatcaaaagtacatgttctgtgccccatgagactgaaagctcctctaaggcagggatatgtttccctccattgcatccccagtgtcccacaatgcttggcgcaccgtcacggtccagtaaaaaactttgaataaatctatagcaaagcatggagcggtccgtatagaggctgccaagccgagcggccatgggaggtgagctgttgtcggcgttttgagcaatctgcgggcggacgcggggatcactcacccgcgatgacgaatttggccatggtcgagagagactcagaggcagggaccgcggcttcgcggtttcctggcaaccacgcagccaagggcaaggcgcaggcgcactacaaagtctggcgcccagcagaggttaggtgtttaaagttaggacctgaatgggttacgttgcgatacacgatcaaacatcgcccttataagctctgtggtatccccgagccccactcctgtatgcagggaaattagtcattctccttggtaaactttcttcaagtaagtccttcagctacagccgcgaacatatgctttttgacctttgagggaatccgtaagatctcgtgagaagcgcagcttctcggggaagctgtcatggctgctcctgtacgtagtcacggtcttgtgctctaaggtgagtggaggacgagcttgggcttagcggcagcccgtatcacatcctagactttttacttcgaggagaagagtctcacgagttgtcctggaagtaagtttaaaggaggtgggttaatgctgggcggcccag

SEQ ID NO: 25334 - DNA, 2300 bp, Homo sapien
attgttgtaataaaagccttctcagttgagtccttgctgtcaaccagcactttcaatcattctctccgttgctgccaagacaggcttcctaaaatgcaaactcattaagactactctcctgcttaaaatttttctataattcctcattgctttcaggatacagttcaaacacctttgcttgacctacatgaaatgcaaggacctggctcctgctcctgttgtagccccaggtcctgtcacgccccacatatccagatcttctgttaggccaggaagcttcctgcctctctgcttttatttggaatagcctcctcagctcacaccttcacaactcagctcctgtaataccttccccagccagttccttgtgtccacctctccctcatcccccaaacccagattaggagtctacgctcccagaggcctgtgcaggtctccttcatcgcgttaatcacaccgtatcaaaagtacatgttctgtgccccatgagactgaaagctcctctaaggcagggatatgtttccctccattgcatccccagtgtcccacaatgcttggcgcaccgtcacggtccagtaaaaaactttgaataaatctatagcaaagcatggagcggtccgtatagaggctgccaagccgagcggccatgggaggtgagctgttgtcggcgttttgagcaatctgcgggcggacgcggggatcactcacccgcgatgacgaatttggccatggtcgagagagactcagaggcagggaccgcggcttcgcggtttcctggcaaccacgcagccaagggcaaggcgcaggcgcactacaaagtctggcgcccagcagaggttaggtgtttaaagttaggacctgaatgggttacgttgcgatacacgatcaaacatcgcccttataagctctgtggtatccccgagccccactcctgtatgcagggaaattagtcattctccttggtaaactttcttcaagtaagtccttcagctacagccgcgaacatatgctttttgacctttgagggaatccgtaagatctcgtgagaagcgcagcttctcggggaagctgtcatggctgctcctgtacgtagtcacggtcttgtgctctaaggtgagtggaggacgagcttgggcttagcggcagcccgtatcacatcctagactttttacttcgaggagaagagtctcacgagttgtcctggaagtaagtttaaaggaggtgggttaatgctgggcggcccagctgcggaaggacaggctcttgaagttggttctggggtctggtgaggctggctggttgtataagatcttcctcttaagcgcaggccacgtgcagacatcgctttcgttttctgcttcttccactgagccgttctacctgcccaggtccctattcttgatggtctgggttcggccgttgctaaatcgtcatgttgaaaatgatctatcagccgggcgcggtgactcacgccttgggaggccgaggcgggtggattacctgaggtcaggagttcaggaccagcctggccaacatggtgaaactccgtctttacaaaaaatacaaaaattagccgggcgtggtggcatacgcctgtaatcccagctacttgggaggctgagacaggagaattgcttgaacctgggaggtggaggttgcagtgagccaagatcgcgccactgcactctagcctgggggacatagcaagactttgtctcaaaaaaaaaaaaaaaaaaaaaaaaaacagagaagagaaaagaaaatgatctatcaatgctaatcccctaattttcaccgaggacatttccataacaatgccaacaaaagtctctcctacagagaaagctttatggaacgcttttgcaccagaaaaatctcattaatacaatgactacttccaaagtgacctggcttctttgaaactggacacattgtggtagattggagggagcccacattggtaaaaaaaacttttactgttttatgtaaatgtttaatggctccataggttccccattttctcttctgttaaatgcatttcatttctttaagtaaaagttttgttttaatttttattcttttcattacttcttcccctacaggaaaacgacagcacgtgttctttttcactagtagaagtgacgttggtttcatgttgacaactttgaagccatttggaagtgtttcagtggagagcaaaatgaataacaaagcgggctcctttttctggaaccttagacaattcagtacattagtttcaacaagcagaactatgaggctatgttgtttgggactttgca

SEQ ID NO: 25335 - DNA, 2300 bp, Homo sapien
tgaagactgaacagtaggtacttatactgcatgatcttggcttctctcatcatatgttcacagagctgattaaatgcagggtggctaaacatcagtcgtttttcaaagcgcttctggtcatcagacagtcttttggcaattgtccacattgctgtgaaatagttgctactaggaaatgtgggcgcttttgaaaatgcatctaacacatcactcagggaattacattcctcagacagttttctactgctgatacggtttggttttgtttccttggtaagaacatcttcattggagacttcatgattaaggtttactttcttcaattcatcatcagatttatcaacagggacaagagactgctttgagtcaaaaaacagtcttttagcataaagtagtctttcaattctaagggctgttagagtgcttatgccctttgtttgaaagccaacatctgatttaaaaatgaatgcatcctgaaagagatatctaatgatatcagttgattgcattctgttatgaaagttatttaaaatgttccagtttgaatgaactatttttggtttgcaaagtcccaaacaacatagcctcatagttctgcttgttgaaactaatgtactgaattgtctaaggttccagaaaaaggagcccgctttgttattcattttgctctccactgaaacacttccaaatggcttcaaagttgtcaacatgaaaccaacgtcacttctactagtgaaaaagaacacgtgctgtcgttttcctgtaggggaagaagtaatgaaaagaataaaaattaaaacaaaacttttacttaaagaaatgaaatgcatttaacagaagagaaaatggggaacctatggagccattaaacatttacataaaacagtaaaagttttttttaccaatgtgggctccctccaatctaccacaatgtgtccagtttcaaagaagccaggtcactttggaagtagtcattgtattaatgagatttttctggtgcaaaagcgttccataaagctttctctgtaggagagacttttgttggcattgttatggaaatgtcctcggtgaaaattaggggattagcattgatagatcattttcttttctcttctctgttttttttttttttttttttttttttgagacaaagtcttgctatgtcccccaggctagagtgcagtggcgcgatcttggctcactgcaacctccacctcccaggttcaagcaattctcctgtctcagcctcccaagtagctgggattacaggcgtatgccaccacgcccggctaatttttgtattttttgtaaagacggagtttcaccatgttggccaggctggtcctgaactcctgacctcaggtaatccacccgcctcggcctcccaaggcgtgagtcaccgcgcccggctgatagatcattttcaacatgacgatttagcaacggccgaacccagaccatcaagaatagggacctgggcaggtagaacggctcagtggaagaagcagaaaacgaaagcgatgtctgcacgtggcctgcgcttaagaggaagatcttatacaaccagccagcctcaccagaccccagaaccaacttcaagagcctgtccttccgcagctgggccgcccagcattaacccacctcctttaaacttacttccaggacaactcgtgagactcttctcctcgaagtaaaaagtctaggatgtgatacgggctgccgctaagcccaagctcgtcctccactcaccttagagcacaagaccgtgactacgtacaggagcagccatgacagcttccccgagaagctgcgcttctcacgagatcttacggattccctcaaaggtcaaaaagcatatgttcgcggctgtagctgaaggacttacttgaagaaagtttaccaaggagaatgactaatttccctgcatacaggagtggggctcggggataccacagagcttataagggcgatgtttgatcgtgtatcgcaacgtaacccattcaggtcctaactttaaacacctaacctctgctgggcgccagactttgtagtgcgcctgcgccttgcccttggctgcgtggttgccaggaaaccgcgaagccgcggtccctgcctctgagtctctctcgaccatggccaaattcgtcatcgcgggtgagtgatccccgcgtccgcccgcagattgctcaaaacgccgacaacagctcacctcccatggccgctcggcttggcagcctctatacggaccgctccatgctttgctatagatttattcaaagttttttactggaccgtgacgg

SEQ ID NO: 25336 - DNA, 2300 bp, Homo sapien
tcctttaagaataatgatcaacatattgcagtcctgcaaagacctccagtaccataatttggatctcttcaagggacttgcagattatgtggctgcaactttcgacatctggaagttcagaaaagtgagtacattaacaatttagaataagcctcacaaacttttaaaacactaattcatgtagcattttaagtatttctctttcacctttatagtagttaagataccaaaatattccaatgctgaattgacttttgaaaaattagctccttattattcctgtctgggggctacttgctaatatgaatagtccccaacttaggatggcttgacttaatattttttgactgtttgatgttgcaaaagcaatacgcattcagtagaaaccatactttgaattttgaattttgttgttttgctgggttagtgatatgttgtatgatgctctcttttcatgctgagcagtggcagcaagtcgcagctcccaatcagctgtgcaatcatgagggtaaacaatgcatattgtattcaataaattacttgagatattcaacacttttattataatataggctttttgttaactcattttgcccaactataggtgaatgtaagtgttctaagcgtgtttaaagtaggctaggctaagctatgatgttcagtaagttggatgtattaaatgcattttgacttaaaatattttcaatttatggtgagtttgttgggatataccccaccgtaagtcaaggacaatctgtatactattctatcctttggtcatctttctatttgaaacaaaaatttgctcttctttttcgttttaaaagggttgtatgggctgggcgcggtggctcacgcctgtaatcccagcactttgggaggccaaggtgggtggatcacctgaggtcaggagttcaagaccagcctggccaacatggtgaaaccccatctctactaaaaatacaaaaagtagccgggcatggtgacgtgtccctgtaatcccagctactaggggggctgaggcaggaggaccacttgaacctgggaggtggaggttgcagtaagctgagattgtgccactgtactccagcctgggcaataaagatcaaaactctgtctcaaaaaaaaaaaaaaaaaaaaagggttgtatggtacttttgttagatatttagcatgatttccgtgtttatactttgttcttgttagatttcaaataataaagatgggtgatgtgacaggcttggggtttttgaagaataaaatgtcactacttaatggtcatgtccattgttttatccagagtaaaagcctttaaaatcaggagctgtgttaagaatataaacatttaatgaagcacctggtaaaaacttctttttgcaatgaaataggtgataactgttagatctctaggttcagtttattttggagagtaaggtaaatattgagtttactgtggaaattggttatagaaagagaagtaataatcctaagtaagaaagattgagaaggaaattggaggtgaacttgaaagtttattttaatcataatgtttcagttccattttcacttataggtatgaatattaaatatagaaattttggggttatgtcttacatgttagaatctaggaagtatttaagtttgggaatgcgagaagttcaagattgagttggtcattttgaaaaccttcagaaaaggcatatttaaaagtaattttcagatatgttgtatgaaaagcatgtaggaagagatttatttttaaatcagatggaaacgtagaaatcattgtatgccctggttctcagcttaaaaaagattgcttattaacttgatacccaattcaagaattaatagaacagattttgtgagagaaagatgattgttccttttcatggaaatattctgtttcaggatatattctgttgatcaggacagttgaattgctgcttagattttttgagatctaaaaaattactattagcatactgtaattattatagagttttccctcaattttctctttttaaggttctttttatcctcattttatttgaaaaccttggctttcgacctgttggtttaatggacctgtttatgaagagaatagtagaggatcctgaatccctaaacatgaaaaacattctatctattcttcatacttactcttctctcaatcatgtctacaaatgccagaacaaagagtatgtacttgtttttttttaccttttttattgccatataacttacaaaaaaggttataaatcataagcttaatgaattattacaagtgaacacaccca

SEQ ID NO: 25337 - DNA, 2300 bp, Homo sapien
acccttgctccaaaattagtactaccaaggttcctgccagtcccctcacttgggtgaggaagagagtggcatgagtgttgcattttacccctcattctgaacagcaaaattcaaattcaggatttttgaattaactaaatcccaagggaaggatgcaaaatgctaacaatgcagttttctttaaggtgccattatcgtaggcaagctatgctgagttttctatactcaccgcctccactttctcacttccctttccttctttaaccagctccaggcaggcgtttgtccccaccacgttatctactgaaattgctcttttcaaggtctccaggagcctctatcctgctggttatgattggttagttcttcgtcctcgtttgaccagtgggtaactcccattttttttgtttttaatgctttcctcatttggcttctgggacacaatagtcacccattttttaactacctcactggctgttcttcacaattccctcgctggattcttctcttctaccaagtcctctaaatgttaggtcagcccaggtctcagtctttgtctttctctgtctatacccacaccctagatgaactcctctagcccagtggctttaaacaccatcgtgatattgtgatacaataggaaatacatattttgtctttgtccctggttcctgacacagagctcctaaaacccttggaatttcctcagtgataagatcaataaaggtgaaagggccatttttgttattcatgacgtcccttttgactatgtctaagtttaagtgaacaggtaacttttggaaagtttctaaggatagcggctggttgccaggagaatcagccatgttattcagtaatcccctcccatctctggggaggaaagagggactggagatttatttaatcaccaatgaccaatgatatgatcaatcatacctatgtaatgaagtcttcataaaaacacaagggaacagagtttggagagcctctgggttgctaaacacatggagggactgggtggatggcatgcctggagacagcatggaagcgcttatctcctctagttttttaactgcattctctttacttgaaactgtaacatttgtttgtatactcgtttatttttctctcaactctactgtgagttccataaaagaagggactctgccttgttcacccttgtatcttaagtatctagcatagtgtctggtatacagtggtactcatgagatttttgtagaatgaatacatgaatacagggcagaagatttaaactgggtccctaaatgccaaggactccatttaaatactctacctgctctgcgctaaagtttgccttgctcagttagactattagcaatggtcttaacatgagtctttaattttactggtcaatgagattcaagcataacttggctatgtctgaaaacatggcggagtatctgacagagtccttcatgtaagaggggcgtggggtaaaatccacatgggaaaggattgaaactgtcttcactgctcagatttgaagagatctgggtttgtttaagaagctggtgatgtggttcatcagaaaaagagaaggcatttgaccccaatcaaagccttagattgaaggaggaagtggagattctgaataatgaccatgtccattttgaccagagcagagtgttctttctggtctcatgaacaggctcatgattcacaaagactagcctactattcccattcaacctgtgtgaggggaagagcaggaatgattgctcctgagcacgagtgatgggggttcctagaaatactccaaggtgactttacatagggaggaaatttatttcaggatctggtgaagttgagagctcacgtaaatttggttttagagaagaaatgaaatatcaaatggtacagcatttcccacactggaaaaggtgtttgaggacatgagagagttaataaagcaattgcccgtgactttctgctgagacatccactaactgatttatctcatcttgattgtgggagccacagtcttgatgcattcattctcaaggacacttgatccactgccagagaggcccagaattttctaacttactgtgtggcagaatgaagcctctgcttgaaaccctttatcttttggggatgctggttcctggagggctgggatatgataggtgagtgtaaagtgggaagaggaactgattattataatttagattgtctaaattgaatggtttctttttaagaccaatgcagctggcttctccttccttgctactcatatataccaccatgagatgagaata

SEQ ID NO: 25338 - DNA, 2300 bp, Homo sapien
accataagcaagcagaaagtcagactgagtgtcaaaggtggcacctcaaataattttaatgagccgtcttcctactcattacaggaaacattaatgtaatgggaatgcatttctctcttatttggaacttgtaaatatgcaatttattaataaagataagtggaaaccatgctgcaaaatagtgctgcgatgtgattctcttcctagcagagctccaacatgggcaagagtgtctaatgctcaggagttctaatataaagtaagacacggccaggcacagtggttcccacctgtagtcccagcactttgggaggctgaggtgagcagatggcttgaggccaggaattcaagaccagcctgggcgacatagcaaggccttgtttctacaagaaaaataatttttaaaaaattaattaggcatggtggcctgtacctggagttccagctactcaggaggcagaggtgggaggatcacctgagcccaggaatttgaggctgcagtgagcctccagcctgggtgacagagccagactctgcctcaacaaaataaaaataaaatttaaaaaataaagtgagatgcaaaccttttacatctgactctactctattctgggttgcttaatgtactagtgccagctctgtgccactagacatatatttagcatattggaaggaaaaccaaaaacaaggatttttacataggagctaatctgataattatatgggtatccaaaagtcagacagcaagggatagtaaaaacaatataattaaacaacttgaatgaggcagggagactaggggaatctatctctgagactggatgctgcatacattttatcaaagaagaaattctaaagaaaagtttcatgcagatgcacattcactcccagacgattgatgggagctaatgatcccaaacatcccccttgacctagtgttccattttcagggagaactcaaatcatgattctaacagaaaacagaacagttagaagaagaagatcagggagcatttaacttttggcaacattccaggtcaattcttccaattcctgaggcttgggaatgcagatcagccataagaaatttgggatccctaagaatgataatctacaaattccaattattttcggttaaatgttttgctgtcaatgtagcatttccttttgccagagacttccaggacatttttgaagccactcaaatgttgcctccaaagagaggggcatcattacctccaggtcccagatggtgaggttgaggggttaaatgaacagtcccaggccacacacttcgtttccaggaatcagatgccaatatgggattatctctccaagtttctgattctttgtacagaaaataaacctttctagagttaagacatatcatatgacatctgctgtttatacaatatgagaaactctcctgagcagtgtacagatcttgggatgtaacatctacccttagaagtacccggcatatattcatctatgactcctcttcataacatggggtatacattatgtttctgcagtagcaagtaggagaggcttgttgaaagcactggcattgaatgagcactggaccttccaagtcattagcaagattgagacgagcagtaagaaaacacagtggttcttaaaaagtaccttgtgtcatttaaagagccaaagaaactacttactatcctgagaaggcagtattatgtggacaggaagaatacagacctttgaattagacttgatttgattcttgtatgtggggaaaagcaagagagatcagattgttactgtgtctgtgtagaaagaagtagacataggagactccattttgttatgtactaagaaaaattattctgccttgagtttctgtgaccttacccccaaccccgtgctctctgaaacatgtgctgtgtcaactcagagttaaatggattaagggcggtgcaagatgtgctttgttaaacagatgcttgaaggcagcatgctccttaagagtcatcaccactccctaatctcaagtacccagggacacaaaaactgcggaaggccgcagggacctctgcctaggaaagccaggtattgtccaaggtttctccccatgtgatagtctgaaatatggcctcgtgggaagggaaagacctgacccatcccccagcccgacacccgtaaagggtctgtgctgaggaggattagtaaaagaggaaggaatgcctcttgcagttgagacaagaggaaggcatctgtctcctgcctgtccctgggcaatggaatgtctcggtataaaacccgattgtatg

SEQ ID NO: 25339 - DNA, 2300 bp, Homo sapien
ggggtttctacctttcctctatctccaagattctattaatagtatattctcctaaaggtcctattagtttacatagctcaagtggggagacaatgatagctaatatttagtattcacctaatagtgtcagatactatgctaggtgagttaccaaagatattttgactcttcataacaactagacaacgcggatcccactatttctgtttctgagatgggtagatacaagttctgacccagtaattcgctcaaagtcgtgcagctagttagctggcagcgtccttgcacatctaattgcagatgcatctgcatctacattagagtaaatgttccaattatactcatacaatgaatgctatgaatctggccaacagaattccagacactaacaagtaaataaatcaggctttcctcaatcccagtaattcatgtttaatattccttggcaaatactgaatttcaatctgtgcttatttcatagagtagaatctttcaaatgttgtgttatcgagtcctacatagtcaaagggaggggaaagacaaggagggtgattaaggtgaagcgtttcttccattactggtagaacgaagtttctcatctcttaagcaccgaattctgcaatcattccaaaagtggaagctcagctcacagcgcattttggggaagcttaaaccacactaaccatttaaggtcaagcaaacaattggccaaccctaacgtgaattgtgcagggttttcatctcagatgtaacagatctctctatgtctacatcccaactccagaaaacgagaaatcgagttcctcctctcaccatcgaagctctgcagacacctcgctggagaccccatggtgagcctcatcacgtaaaggccccctcgcaagctgccggctccagcttgcgccccacgtctacctaggctccctctagcctctttaacgcacagtcgagcaacaggccccttgcaatcaactctagccgccggactcccgaccaggtctctcgctcggggtcagaaggaggcgcgggagggagggcggcggcggcggcgcccgcggggcggggcggggactgtgcgcaagcggggggcgggcgcaggccgcggtctcgctccgctcccctttgttctctcccattgtgtggcacttcctcctcaggcgcttcttctctgcaccctggcagcccgtggggagttcgggaaggggccctggatgccttttctgcttgtttttgagtacgtgaggacctccccggcaccgcctcgcgcgggtccctgccccgtgcccaggcggaggcggggtggccactgtccttccttcccgctccgcgccctcggcggcttccccgcggccccctgcgccgcgccccctccaggaggcgtcctgaccccgcactccggcctttcacctcccgaccgtcagcctcagggccgccgcggcgacgcgcgaccccttccctctgaggggcgcgggctccggacgcgccgggctctgccaggcatctagtggagggtcggaggtcggcgaccagcccgagcccagccgtcccgggagctggcgcgagtgtcgccacgaccctccctgtcccttgcgctcgcgctgcccggccgccgggcggccgcctcagcccccttatatagccctctaaaaatagctcgcctcgcaccgccttgtaaggcagcagggagatccgcagcgtgccaatccgcgcccgccgccagggccaagccccgccccaggctctgctccgggctccccattggtcctcagtgacttcatgagccccctgtttaccttacatggtcacacgcggcctaatggacgccctcctcgagatcccacggctgcgcggagaaccgaacggagggagggagtttggggagggggaagagcaggaggaggagaaaagggagggggaagactacaaactagcaaggatggggtggggggtggggagggaagggaaggggggggaagagaagcgatcgcgagagaaaaaaatgcaacctcccaaaataaagagcaaagattgcattaggagcgaacagcgctgcagaaatagatggcagcttcgtgtcagtgagtttgcatcccccttcctgatccacgagctggagtgattagagccctggaagggaattgttactcccgtggagaagtccccttttcctggcagtcgtctgcactgtacacgctggatgcctctctccatccaccccactcactcgctcctctctcacctcctctctccctctcctgcattgatttttttttttcctttttagttgactgaaacaaaac

SEQ ID NO: 25340 - DNA, 2300 bp, Homo sapien
agtggtagttacaacagtgcagtttattttggtttgctgaactgccaaagttctcttgtgatcttaatttgttgattactttgtacatctggataccttgcatgtgttttgcaatgtgaatcttgggtctctagggtataaaaagtagctaaatataactaatattgaaaatgtgcctttcagaatgccttgctgcataaatctcttaaaatgaatctaaaatattctacaaagcttggagcaaagaccataatgaggtttgcagtatttgctttgtaaaattttggttgagtccttttgcaagtcagacggctgatagttacataggaaaagtctcaatggaagcctcctcctccggccccacccaagcaatttttgtaaacacacactgacttaaagctgaggaaccccatttttcaccatacaaagctcagtacagaacagtgtggggagtcagatgctcttggatttgaacccctgcttgaccacttccaggttgtgagaccttgaccaacttacttagtatttccaagcgtgggtatcttcatccataaagttggggatactttggggctgtccttaagattaaatgagacattgcatataaagtgtttatgcgcatacggcacattcgaagtgcttaataaatgggaactattatttgtaaaatcttcaaactcacgttaaccgatatgtcctattttattcaaaaattgttataatgtaacacacacaaaataagttcacttgagtctcaagtaccaaattatatggttggtcttgcctcaccttttgcctctagttttctatacccaagttcctttccttcccctattattcatgaacatgttttttgccctagtgtttctcaatggttcctgcccatccccccagttgaaatagcatgggggtcaggggagagcatggagaaggggagaccttgtaacaaactagcaaggggtttctacctttcctctatctccaagattctattaatagtatattctcctaaaggtcctattagtttacatagctcaagtggggagacaatgatagctaatatttagtattcacctaatagtgtcagatactatgctaggtgagttaccaaagatattttgactcttcataacaactagacaacgcggatcccactatttctgtttctgagatgggtagatacaagttctgacccagtaattcgctcaaagtcgtgcagctagttagctggcagcgtccttgcacatctaattgcagatgcatctgcatctacattagagtaaatgttccaattatactcatacaatgaatgctatgaatctggccaacagaattccagacactaacaagtaaataaatcaggctttcctcaatcccagtaattcatgtttaatattccttggcaaatactgaatttcaatctgtgcttatttcatagagtagaatctttcaaatgttgtgttatcgagtcctacatagtcaaagggaggggaaagacaaggagggtgattaaggtgaagcgtttcttccattactggtagaacgaagtttctcatctcttaagcaccgaattctgcaatcattccaaaagtggaagctcagctcacagcgcattttggggaagcttaaaccacactaaccatttaaggtcaagcaaacaattggccaaccctaacgtgaattgtgcagggttttcatctcagatgtaacagatctctctatgtctacatcccaactccagaaaacgagaaatcgagttcctcctctcaccatcgaagctctgcagacacctcgctggagaccccatggtgagcctcatcacgtaaaggccccctcgcaagctgccggctccagcttgcgccccacgtctacctaggctccctctagcctctttaacgcacagtcgagcaacaggccccttgcaatcaactctagccgccggactcccgaccaggtctctcgctcggggtcagaaggaggcgcgggagggagggcggcggcggcggcgcccgcggggcggggcggggactgtgcgcaagcggggggcgggcgcaggccgcggtctcgctccgctcccctttgttctctcccattgtgtggcacttcctcctcaggcgcttcttctctgcaccctggcagcccgtggggagttcgggaaggggccctggatgccttttctgcttgtttttgagtacgtgaggacctccccggcaccgcctcgcgcgggtccctgccccgtgcccaggcggaggcggggtggccactgtccttccttcccgctccgcgccctcggcggcttc

SEQ ID NO: 25341 - DNA, 2300 bp, Homo sapien
ttaatgtgtgtattcacatattaaatttttactattttattcttaaaatatcctcatttatttctaagctccccccgggtggggggataatttattatttactctagggtgttttctataggattacttccaaagattgacattattagaagtaaaatgaacacctcccaaggcaatacttgtggagaagacagattttggagtcgatttggaggcagacctgtattctaatctgcttttacccacttactggacacatggtaatgagcaaattacatgcactctctaaacttcagtatcttcatctataaaaatggagcactaagagttccctcacaggattgtggagatcagaggtatgtgtaaaatgctaggtacaaagaaggtaatcaaccagtaagtggtagttacaacagtgcagtttattttggtttgctgaactgccaaagttctcttgtgatcttaatttgttgattactttgtacatctggataccttgcatgtgttttgcaatgtgaatcttgggtctctagggtataaaaagtagctaaatataactaatattgaaaatgtgcctttcagaatgccttgctgcataaatctcttaaaatgaatctaaaatattctacaaagcttggagcaaagaccataatgaggtttgcagtatttgctttgtaaaattttggttgagtccttttgcaagtcagacggctgatagttacataggaaaagtctcaatggaagcctcctcctccggccccacccaagcaatttttgtaaacacacactgacttaaagctgaggaaccccatttttcaccatacaaagctcagtacagaacagtgtggggagtcagatgctcttggatttgaacccctgcttgaccacttccaggttgtgagaccttgaccaacttacttagtatttccaagcgtgggtatcttcatccataaagttggggatactttggggctgtccttaagattaaatgagacattgcatataaagtgtttatgcgcatacggcacattcgaagtgcttaataaatgggaactattatttgtaaaatcttcaaactcacgttaaccgatatgtcctattttattcaaaaattgttataatgtaacacacacaaaataagttcacttgagtctcaagtaccaaattatatggttggtcttgcctcaccttttgcctctagttttctatacccaagttcctttccttcccctattattcatgaacatgttttttgccctagtgtttctcaatggttcctgcccatccccccagttgaaatagcatgggggtcaggggagagcatggagaaggggagaccttgtaacaaactagcaaggggtttctacctttcctctatctccaagattctattaatagtatattctcctaaaggtcctattagtttacatagctcaagtggggagacaatgatagctaatatttagtattcacctaatagtgtcagatactatgctaggtgagttaccaaagatattttgactcttcataacaactagacaacgcggatcccactatttctgtttctgagatgggtagatacaagttctgacccagtaattcgctcaaagtcgtgcagctagttagctggcagcgtccttgcacatctaattgcagatgcatctgcatctacattagagtaaatgttccaattatactcatacaatgaatgctatgaatctggccaacagaattccagacactaacaagtaaataaatcaggctttcctcaatcccagtaattcatgtttaatattccttggcaaatactgaatttcaatctgtgcttatttcatagagtagaatctttcaaatgttgtgttatcgagtcctacatagtcaaagggaggggaaagacaaggagggtgattaaggtgaagcgtttcttccattactggtagaacgaagtttctcatctcttaagcaccgaattctgcaatcattccaaaagtggaagctcagctcacagcgcattttggggaagcttaaaccacactaaccatttaaggtcaagcaaacaattggccaaccctaacgtgaattgtgcagggttttcatctcagatgtaacagatctctctatgtctacatcccaactccagaaaacgagaaatcgagttcctcctctcaccatcgaagctctgcagacacctcgctggagaccccatggtgagcctcatcacgtaaaggccccctcgcaagctgccggctccagcttgcgccccacgtctacctaggctccctctagcctctttaacgcac

SEQ ID NO: 25342 - DNA, 2300 bp, Homo sapien
catcttgtctgggtgcatatttgaaccccatcagtagacagaaaacatgtatttccttgaaggcccctcagaccccaggtacaaacattgaagtaaataacagcagggatgggggttctgcctcgcttcacctgccagccacgtgcagaccttgtttcagtccaactgagactttagcaagtgcttcattctggtttgtgaatggcttcccagtgtctgtcactgtgttcacagggccaccggggttggctgagtcagaataccagccatgtggcatgtcgcatggggcaagagctgtgctgcccatgggagtccagagaaggagcacactaaggaccaacaccaggtaggccttgcccaaacaggactctaaagaagttggccaaaagagggttgcagatctagtagtttagaagtggtgccaagataaggtcagattccttatcttgagccaccttgagggtggctgtcctgaccacctgcaattgttcactactcacctgtataggccagattgtgtctgccaggcggatggaccaggctggtttgaaggaccagggcagattacatgccccagacaggtgttatacagtggttaaagctcctccttgtgtttaaaggattatttacaaaatgtaaaaagacccaaagactttcattcctttgtaatgttgggattaaaatctcaactaacagtagtctaactggattggaaatgggggatttcctatggaaatttcattcttttgaattccagctgcatacacagtagattttttccccctataaatgaaagtgtatggcaatctgggtattctcttattcaagtaaagatagtagtaaactaaatattttttagtgagaggattgctttatattctgctttttctgctgttgttcactagggcttctaatacaaatgtagtatcaccctcaatcagctcttcttataatacctgttgtgtatgatgatgtggatgcttaggggaacaggataggggatctcttgtatttcaggggatgcaggcatgagtggatggcccaaggtcaaataatgaactgaagttcattatctctgtttccagctctgcagatgagcaatatcatcacaactaaccaattgatcaattattcattcagtcatttaatgagaagctactgtgtacccatcctttccttggccttctggacagttagacatggtgcctgtcttcagattgctcacacaccagttggagacacaaaagttacatgcagtaagcaacaatccctaaatgctcaacagctcaccaagcctgaatagagaggaagagaccttggtgtggcctggaaggaaagagcagctttgggaaggagtggcataaaagagagaacttaattcagcagtttttcttcctctatgcccagatggtattacatgtgttactggccagtgttgggtaacagtggcactgatgtggtcactaaggggcccttggtaccagggctgggacaagggtggggaaagcaagacatctaggcccttcaagaatgagcacctccctaaatgatgtgcgtaggttgtccctccctggcctctacctagtcccagtatgctttctctgcctctctctatttcattctctagctccaccttctttttattagtgttattttttctccctcctggttgtttttctccattctttctcttcttttttttttttcttttcctttttactagtctacttctaatactcttccagtgcccctccgtaatccattccagaagttgctgtattcttatgtagactggtgctagaggtcatggggtggatgtaaacaatgtctgcaacctgccttagcattgttatttttaatcctgtgataacaatagtactgacacatattacaagtcatgtctttggatctagtttctgagaaagcccaagttctttttatgaaagaacacccatgtaaaggaatgagatgatctaagttacatgaagaaattaactgcaacaaaatgatattaatacatttgatattcttggtcaactaatgcttctaaacatcttcccttcagagcataagctcctttctcatcttattctccacagactcctctccattggatctctagcacctagaatagagctgggtacacatgatgaggtgcttaatacgtatttgtcaaattgaatgtcaagttttaggagtttaaagagtgttttcaaatggggagaagccgagacacaaatagtctcaggaatgagatgaaattatttaaccaattggagatgaaattcgaaatggaaact

SEQ ID NO: 25343 - DNA, 2300 bp, Homo sapien
gggttgagtttgaaatgccctaagtcatccaaatgaaagtgtaccaaaggcagtatgctgggaactatgaatgtaggattccagagcaagatctaggcttgagttatggattgaagagtctttgacagagggtatttgatgctgctgggagagcataagaccacctaggaaagtgtatggggagactcagtaagagggccagggttcagctcagcatgattccaatgtgtaagaggtagatcaaggaggagctggttgttaaagagcaaactcaggtagggaggaaacctgggacataagaccagagggaagagggtatttggaagcaactgtggtcaatcgcgtcaaatactgggatgagggcttgtaaaatgaggactgaaaatgatccgctgcatttacagtcatgaagcttgtctgtggacaattcagagccacttcaggtgagcggtggggacactggagagggctgggaggtgggacatgaaagactgtccatggggtaagagacagctgcagttgttggagagcaatttagggagaagagaaatctttttaaagaattgaaagacttaagcatgtttaaataccagtaagaaagagccggtagagaaggaaaggttgagagtaacagaaggaaaggagactcgttaagggcaaagtccataagaaaacagtagggtacctggagtaccaggaaggacaactctttctttacaagagaagtgagtcatgggcggagtccagaatcgaaccctctctgcttcctaaagacacgtctcctttaaaggacagaaaaagaatgattaagacttgaggccgggcgcggtggctcatacgtgtaaccccaccactttaggaggccgaggcgggtggattacctgaggtcaggagttccataccagcctggccaacatggtgaaaccccgtctctactaacaacacaaaaattagccaggtgtggtggcaggtgcctgtaatcccagctactagggaggctgaggcaggagaatcgctcgaaaccgggaggcggaggttgcagtgagccgagatcgtgccactgcactccagcctgggcgacaagggctagactccgtctcattaaaaaaaaaaaaaaaaaaaaaaagacttgaaaccccaaggagagggctgcagagttcactatcaaggagaatggggacctagtggtgccgtcctgagagacctctgaaagaacaattcagtagtttccagccacggaagtccccctgctgggtttagggtgcagtgggtgcgaatccctgctgtagaaaacaggctgaggaaagaaagcgacacaggatgttgtctggagaaaggcggggaggtaggatggggcatatttccaggggtccgggcaggttgtgtggcttggaggcctccgagggccgtcgacgtcagccatggtccgggcagagccccgcaaggtgccacagtatcggggccagcgccccccggaaaagcatgctccgctggcggccgccaggtttctccgcggagtctcggaaaggaaaacccgtccccacgggggtcccacgacgcccccgggtcccaggccccgggacgttggcagaggcgcagcagaccttcttccccagcccgcacggctccagcggtccggccgcgtcccagcccgggctgcccgtcccccgtctcccggcggcgtcggaaagttcccggggctggcggcggtcaagagcagagccagggcagccgcagccgccttctagcccgccgctcaccgccgcaggggcaggcctgagcgggggtttccaccaagtcgccgacacccctcgggaattcccccactgggccacacacaaaccccgcttcctccttcaaatttccgctgccggctttaccgatgcgaaagccgcggtggagtttagaccactcctcccggcgccgggctcagcccgccttcgccttccctctccccgcggaaccccttctcgtcgcccgaagaaacccgaaggtcttcggcaagttccgtccccagcgcgggggcggggccgctcgagctgctccgggcctagctcggctgtttccgtgcgcggccgctgcgcactcggcactgggcggcgctggctggctccctggctgcggctcctcagtcggcggcggctgctgctgcctgtggcccgggcggctgggagaagcggagtgttggtgagtgacgcggcggaggtgtagtttgacgcggtgtgttacgtgggggagagaataaaactccagcgagatccgggccgtgaacgaaagcagtgacggaggagcttgtacca

SEQ ID NO: 25344 - DNA, 2300 bp, Homo sapien
tggaaaatggactggcttggccacaacctgaaagacaaaataaacattttattttctaaacatttctttttttctatgcgcaaaactgcctgaaagcaactacagaatttcattcatttgtgcttttgcattaaactgtgaatgttccaacacctgcctccacttctcccctcaagaaattttcaacgccaggaatcatgaagagacttctgcttttcaacccccaccctcctcaagaagtaataatttgtttacttgtaaattgatgggagaaatgaggaaaagaaaatctttttaaaaatgatttcaaggtttgtgctgagctccttgattgccttagggacagaattaccccagcctcttgagctgaagtaatgtgtgggccgcatgcataaagtaagtaaggtgcaatgaagaagtgttgattgccaaattgacatgttgtcacattctcattgtgaattatgtaaagttgttaagagacataccctctaaaaaagaactttagcatggtattgaaggaattagaaatgaatttggagtgctttttatgtatgttgtcttcttcaatactgaaaatttgtccttggttcttaaaagcattctgtactaatacagctcttccatagggcagttgttgcttcttaattcagttctgtatgtgttcaacatttttgaatacattaaaagaagtaaccaactgaacgacaaagcatggtatttgaattttaaattaaagcaaagtaaataaaagtacaaagcatattttagttagtactaaattcttagtaaaatgctgatcagtaaaccaatcccttgagttatataacaagatttttaaataaatgttattgtcctcaccttcaaaaatatttatattgtcactcatttacgtaaaaagatatttctaatttactgttgcccattgcacttacataccaccaccaagaaagccttcaagatgtcaaataaagcaaagtgatatatatttgtttatgaaatgttacatgtagaaaaatactgattttaaatattttccatattaacaatttaacagagaatctctagtgaattttttaaatgaaagaagttgtaaggatataaaaagtacagtgttagatgtgcacaaggaaagttattttcagacatatttgaatgactgctgtactgcaatatttggattgtcattcttacaaaacatttttttgttctcttgtaaaaagagtagttattagttctgctttagctttccaatatgctgtatagcctttgtcattttataattttaattcctgattaaaacagtctgtatttgtgtatatcatacattgttttcaataccacttttaattgttactcattttattcactaagctcgataaatctaacagttactcttaaaaaaaaaaaaaaaagactaaggtggattttaaaaattggaaactgacataatgttaggttataatttctcatttggagccgggcgcagtggctcacgcctgtaatcccagcactttgggaggccaaggtgggtggatcacctgtggtcaagagttcaagaccagcctggccatcatggtgaaaccccatctctactaaaaatacaaaaattagccaggcgtggtggctggcgcctgtaatcccagctactcaggaggttgaggcagcagaattgcttgaacccaggaggcagagggttgcagtgagccgagatagcaccattgcactccagcctgggcgactccatctcaaaaaataaaaataaaaaaaatgtctcatttgggaaggaaattccttttaaaaaagagttgagacacttagaaaactaatgttttatatttagtcaagagttatttaagaaagtcaagcttgtttaacaacaaaatatgaagatttaagtgttaattgctggatccattttaaaataagattttaattaacatttgtaaatggtatattttcgtttgtaacaaaccattgtcttttttcaaggatgaacagagtttatgaaggagcatcattctaagaattaagtgatgtagtctttatgtttggacagttcaccagattctcaagaaggctttcaaacaactataaagtttgatgtttgtcctgctgagctaatggggaaagttatagcataaaaattgtgtaaccgcatagatatgtcatttttaaaaactggtttaacagaaatcaagcaaagtcacaaatatgttcacaagttggaattatttattgagtcaaaatgtcgaatcgaacattttgaatgaagtaagtgttataaatgaaaaattgcc

SEQ ID NO: 25345 - DNA, 2300 bp, Homo sapien
agtcgtggtggtgggccccttaatctaagctacttggaggctgaggcaggagaatcccttgaacctgggaggcggaggttgcagtgagccgagatcatgccattgcactccaccctgggtgacaagagcgaaactctgaataataataataaaaaaaaaaaatcagcgctcgggcggtaggggtgggggaggtggcagtggttcacacctgtaatcccgcattttgggaggctgagatgagcggatcaccggagatcaggagttcaaggccagcctggccaacatggtgaagccccgtctctactaaaaacacaaaaaaagccgggtgtggcggcgggcgcctgtaattccagctactttggaggctgaggcaggagaactgcttgaacccgggaggtggaggctgcagtgagccgagatcgcgccactgcactccagcctggcgacagagcaagactccgtctcaaacaaacaaacaaaatcccacaaaaattagctggcgtgctggcgcaggcctgtaatcctagctacacgggagaatgaggcaggagaatcgcttgaacccggaaggcggagactgcagtgagccgagttcgcgcccttgcactccagcctgggcgacagagagagactccgtctcaaaacaaaaacaaaaacaaaaacaaaagcaaaaaaccaaacaaaaaaatcagcgctcgggccccctcccatggccagctcttggggcgggggactggtaagggaggtttaccccagctggttctaacgtgcagccgcgctgagagcgcagcgggcggtgtggggcgaggggccccaggaggaaaaagaagcctgccccgggaggatgccggtccccgcacggtcccactcaatggacccactccagccgcgcgctctgccagggcctgcggccagggtaccaggccctcggcaccttccacgtccagcgtgggtcctcacgggcaggtgcgtcttggcatcgggaggagggagactggggcactggagtctgcagcgccgcctggggccggggctggagccgagcgcacgcccagagctccgcgcttccgactgcagccagagcccgccgacccccgccccactttaaaaacttggactcgggcgccacgtgttcacttcccccactgtgctttagttgaaaagggttttgtgacttttccactcgattgccgccaagcgggctattacgccgcttctgaccccaccgtggagacgcggggactagagtgaccatgccttcttcggagcgagctgtctccatcatccgctaacgcgccacctttaaaaaacaggcacaacgcgcaagcgacaaagtcagaggcagagagcggcggagcacatgatagaaaaggtcgagaggcacattcagcgccaggtgggtggcttttctctcccgctaggagagcccagggcaccccatgctctccctgtgcacccgcggcagttcggcaccccgatctcactcttgctcccgcccccacagcgcctccctcggcggcgggggaaacggattaagtcgtccgtgtaccctggggacgcacgagggaaagccccggtcccccctcccgcaacgtcactcctccaccgcgccacggcccggccccgccctcgccgtgagctccgggggcacctgccggaggctgggtgccgggagaccggaaatgcgtggctccgggccggggccgcccgcccccgcgtcgcgggctctttaaggccggcggttttcgcagccagcccggggcggggaaagcggagcgcgcgctccacgcgggaccgcctcccgggccgtaagtaccggcgtggcggcgcctcagcccggcctgggcgagccctgggtgctccgccgggcagctcacggcgccccgtatggcctggggatcctaagaggccctgtgacccccctcgcctggtctccctctcacccctggagggttgccgcagctccggggcccccgggcaggaagggcgcactggtcgtcccgggagaggggtgagtggggggcagctatagggggagttcggggaggcctccgagtccccgctgtccccgcgagccgcttggaggcccccagtgtcgctcacttccagggtcggggagacggaactgcggcgaccatgtatttctggtttatcaaaccgctaacacccagtctaagggcaggttctgtcccattgttatcactatcgaagcagccgatggaggaggggaggtgggtagcgaaaccgtagcgaaagaacccgggccgcccggctggctgcagctgcagtccgggcgcccg

SEQ ID NO: 25346 - DNA, 2300 bp, Homo sapien
aaaggaggtaaaagtccctcactggtggtcttccaagttccctgaggttaccctcgaagccacaggccccaccttccgatggaagattaatctggaggccggggacgccgcctacaggacggaagaggccaggagagagaggttcaggcccccgccaggctcccaccgcgggaagcaggctcccgggggcggccccgggagctcttaaaaatatcagcgcttgccgggcgcggtggctcatgcctgtgatcccagcactttgcgaggccgaggcgggtggatcacctttagtcatgagttcgagaccagtctggccaacgtggtgaaacccccgtctctactaaaaatacaaaaattagccagtcgtggtggtgggccccttaatctaagctacttggaggctgaggcaggagaatcccttgaacctgggaggcggaggttgcagtgagccgagatcatgccattgcactccaccctgggtgacaagagcgaaactctgaataataataataaaaaaaaaaaatcagcgctcgggcggtaggggtgggggaggtggcagtggttcacacctgtaatcccgcattttgggaggctgagatgagcggatcaccggagatcaggagttcaaggccagcctggccaacatggtgaagccccgtctctactaaaaacacaaaaaaagccgggtgtggcggcgggcgcctgtaattccagctactttggaggctgaggcaggagaactgcttgaacccgggaggtggaggctgcagtgagccgagatcgcgccactgcactccagcctggcgacagagcaagactccgtctcaaacaaacaaacaaaatcccacaaaaattagctggcgtgctggcgcaggcctgtaatcctagctacacgggagaatgaggcaggagaatcgcttgaacccggaaggcggagactgcagtgagccgagttcgcgcccttgcactccagcctgggcgacagagagagactccgtctcaaaacaaaaacaaaaacaaaaacaaaagcaaaaaaccaaacaaaaaaatcagcgctcgggccccctcccatggccagctcttggggcgggggactggtaagggaggtttaccccagctggttctaacgtgcagccgcgctgagagcgcagcgggcggtgtggggcgaggggccccaggaggaaaaagaagcctgccccgggaggatgccggtccccgcacggtcccactcaatggacccactccagccgcgcgctctgccagggcctgcggccagggtaccaggccctcggcaccttccacgtccagcgtgggtcctcacgggcaggtgcgtcttggcatcgggaggagggagactggggcactggagtctgcagcgccgcctggggccggggctggagccgagcgcacgcccagagctccgcgcttccgactgcagccagagcccgccgacccccgccccactttaaaaacttggactcgggcgccacgtgttcacttcccccactgtgctttagttgaaaagggttttgtgacttttccactcgattgccgccaagcgggctattacgccgcttctgaccccaccgtggagacgcggggactagagtgaccatgccttcttcggagcgagctgtctccatcatccgctaacgcgccacctttaaaaaacaggcacaacgcgcaagcgacaaagtcagaggcagagagcggcggagcacatgatagaaaaggtcgagaggcacattcagcgccaggtgggtggcttttctctcccgctaggagagcccagggcaccccatgctctccctgtgcacccgcggcagttcggcaccccgatctcactcttgctcccgcccccacagcgcctccctcggcggcgggggaaacggattaagtcgtccgtgtaccctggggacgcacgagggaaagccccggtcccccctcccgcaacgtcactcctccaccgcgccacggcccggccccgccctcgccgtgagctccgggggcacctgccggaggctgggtgccgggagaccggaaatgcgtggctccgggccggggccgcccgcccccgcgtcgcgggctctttaaggccggcggttttcgcagccagcccggggcggggaaagcggagcgcgcgctccacgcgggaccgcctcccgggccgtaagtaccggcgtggcggcgcctcagcccggcctgggcgagccctgggtgctccgccgggcagctcacggcgccccgtatggcctggggatcctaagaggccctgtgacccccctcgcctggtctccctc

SEQ ID NO: 25347 - DNA, 2300 bp, Homo sapien
aaaagtatgtgacatgtgctaagagctcaggtattgaatggatagtgaacgtatgagttaactctggacctatataaagtctcagcttctttcacagaatcaaactcttgcttaattcaaagcacattcctcctacttgcttccctttgctctcccaggcttgccactgttacagaatttttttttcttaattctctctaatattcccttcattcaaaatgttttaaaatctatttccgtaacaatgcttcccaatatcttcctggttagcaagttttaaattcttcagttttcaaggtcgtagatatctatttttgtgtatgtctgttgttaaatgcaggcattattttgtaccttaaaataggcatcgtctcaagtctacaagaatcatccaaaatggtatctaatgacattcctagggtttcagacaattttttttttctttgagacggagtcttgctctgtcgcccaggctggagtgcagtggactgatcttggctcactgcaatctctgcctcccaggttcaggagattctcctgcctcagcctccctagtagctgggactatgggtggacgccaccatgcctggctaatttttgtgtttttagtagagacggggtttctccatgttggtcaggctggtcttgaactcctgacctcaagcaattcacccgcctctgcctctctaagtgctgggattacagacgtgagccaccgcgcccaacaagagcaaaactccgtctcaaaaaaaaaaaaacaaaaaaaaaacaatcccattttgcaggttttatagaagaaattgggacgcagaagttaagttacttccgcaagcttacatgactgctcagggtgagggtccctgatcatgatgatcagaaaataaaggtagaaatcaagcttagggaggaagtgacattgtgtgtatatatatatatttgtttatttatttttatttttatgttttatttttttgaaacggagcctaggtcgcccaggctggagtgcaatggcgcgatctcggcttacggcaacctctgcctcccgggttcaagtgattctcctgcctcagcctcccgagtagctgggaatacgggcgcgtgccaccatgcccggctaattttttgtatttttagtagagacgggatttcaccgtgttagccaggatggtctggatctcctgacctggtgatccgcccgcctcggcctcccaaagtgttgggattacaggcatgagccaccgcgcccggccgggattgtttttaagggttaaataaatataccacagttggaacactgtctggcacatagtgcttgccaaatggtaactattcatcttcatggaatcaagactgtggtgccccactgcatggttctcagttttgcgtgagaaaatcgtgctttctgtgctgtttttagtacaagaagagaaacctggaagtccctgcctagaggagagaaacaggcaagaaaagggagttggcgagtcccagcatttcagagttggcagggacgagttaggtccctattttatggatgaggaagtggaagggtgacgtgtcctcgagtctcattcaagacccacagccacaactctttatggagagtaggaccagggccccagggttgctatgatcacgttgcaggtgaaaactaacgctcattggaagacaggagcggagcactgagttacaaaaacagttaacaatttgggtgtaaccaagtttagtgagcaaacgaaagctgtcagactcggaagaagagttgctaatggagcgaactctttactaataacggctttctacagagatcattgacacagcttccagttacaaatgcccgtgcgcttccagtaggaccggaaagctcccagcagccagcgatgaatgaaaacccgagtctgggatagcggcgtgaggggctgggcagctgccaggcgggggcggggcagcaggtcacgtgcctggcttcgaggcgggcgccggagggggaactctgaccatgattggttcctcctaaccaggtgaccgcaggtcgcgttccggttggcaggcaccggccagggccagcggccttcagtcggtaggcggcggcggaaggaggaggagctccagccgcgctctctcccggcagtggctgtgcttcacagcgcttgttgggttccccaccccttttaaataagccgggctggtcaccgccctcgcagacgagtcagcttaagggaggcggcggcagcgcggcggtgggggtgcggccgaggcccgagccctgcccggggccgggccgcggggcgggcgggcga

SEQ ID NO: 25348 - DNA, 2300 bp, Homo sapien
gctagtttcttaaaatggttacagtggaattttgtgttatcaatgaattttttattagtactcacccatctgtcttgtacaatatatgtatcatttccccttacttggttttctaatattatgcattggttatatggaaaatattggttcacatctcttctttcttttttttttcttttttttgagacagagtctcattccatcacccaggctggagtgcagtggtgcagtctcagctcactgcaacctccgcctcccgggttcaagcgattctcctgtctcaacctcccaagtagctgagattacaaatacataccaccataccagctaattttttgtatttttagtagagacagtgtttcaccatgttgcccaggctggtcttgaattcctgagctcaagcaatccgcacacctcagcctcccaaagtgctaggattacaggcgtgagccaccatacccagcctggttcacatttcttgacagtggcaaagctcacttttgttagtatcaccaccaattgtattaaaaaatctttaagtattgagaagctgttaaactcacataataaggtacaagtttctccaaatcctgatttttagtttgaaagcttgaattttatcattgcaacaaatagtgttattttcttgaagtgacaggcttcatttttttaaaactttttatttatttatcttttgagactgagtctcactctgttgcccaggctggagggcactggtgccatcttcgctcactgtaacctctgccttccgggttcaagtgattctcctgcctcagcctcctgagtagccgggactgcgggcgcctgtcaccatgcctggctaatttttgtattagtagagatggggtttcaccctgttggccaggctggtctcgaactcctgacctcaagtgatccacccgcctcagcctcccaaggtgctgggattataggcatgagccaccacacctggccacttctttcatttttgagaatgacatttgtactttcaagtaaaaatgatattctgtgaaaaaaaaatggcttgtttagctcacaattaaatcacaagtgcttttccttaacacaactctacctcggtatgcagaattactttatgtgaactttctgcttactccagaatagtgaaaagaaaggtcaagatttaataataccattaatttttactgcttcagcaaggatattcatgagtgaagcaggtgtttttcttaaactgcaagaggcagtaaagagtagcataacttctagtataatttggtagcactgccttgattcatgctgagaagccagcagtttgcccacttttgctgttatacactcattacaaatgtcatacagtcaaaaagcaagcaataccttagtattctttttttttaaattatttttatttctaaattttcaatcagctttctcaggttgaataagtattcttaaaagaacagttttgacctcaaggacctcttggaaaaggatctagagggtctccagaagtccacagaccacacttggagaaccactggttttattaaatgagcacaatgtattagttttataaacttgtaaagattatcaaagccttgtctcttttaaaataaaaagacaataaggtttttaactcatcaaactacttaaacaaatacatgtcaagaatgtaatacggagaactagaaaggaaaagcctgggaaatctgaatttcattcacagtcattaaagttctaaagagtttattgcccaccactactgctgtgtaaaacgttcttgagttccaatgaggggttagaagagtgaaaatatactttattaccattgcctgttagggagggccaatacttaaaggcaattctgaatcgtcattgtagaaaagacctcacagtacagaacctcatatgctgagtaaaaagaggtcaggaaatcctctgaaggctggcatcccggagaagaatttgtacaactctttgctttggtgaagcaaacaccaaagcaaacaggaggcatctcccgccacccccagcagacattttactcagatattaacaattcctgaattaacttcttcaatgcatattcttattttatagagatgcaaatagatccctggatatttttgatgagagatcacatccacttacagtaagtgtcactttttttgaggtagtatttttctctcatagagttgtgtttatttcatgctgatatttataaatagtcctaacaaatatacatgatctctatgaagataattagaaaacaatttaaatttaaatcaattaaaatggtg

SEQ ID NO: 25349 - DNA, 2300 bp, Homo sapien
tccgctatcctgagcgccccatcatcttcctgtcagcctgctacctgtgcgtgtcgctgggcttcctggtgcgtctggtcgtgggccatgccagcgtggcctgcagccgcgagcacaaccacatccactacgagaccacgggccctgcactgtgcaccatcgtcttcctcctggtctacttcttcggcatggccagctccatctggtgggtcatcctgtcgctcacctggttcctggccgccggcatgaagtggggcaacgaggccatcgcgggctacgcgcagtacttccacctggctgcgtggctcatccccagcgtcaagtccatcacggcactggcgctgagctccgtggacggggacccagtggccggcatctgctacgtgggcaaccagaacctgaactcgctgcgcggcttcgtgctgggcccgctggtgctctacctgctggtgggcacgctcttcctgctggcgggcttcgtgtcgctcttccgcatccgcagcgtcatcaagcagggcggcaccaagacggacaagctggagaagctcatgatccgcatcggcatcttcacgctgctctacacggtccccgccagcattgtggtggcctgctacctgtacgagcagcactaccgcgagagctgggaggcggcgctcacctgcgcctgcccgggccacgacaccggccagccgcgcgccaagcccgagtactgggtgctcatgctcaagtacttcatgtgcctggtggtgggcatcacgtcgggcgtctggatctggtcgggcaagacggtggagtcgtggcggcgtttcaccagccgctgctgctgccgcccgcggcgcggccacaagagcgggggcgccatggccgcaggggactaccccgaggcgagcgccgcgctcacaggcaggaccgggccgccgggccccgccgccacctaccacaagcaggtgtccctgtcgcacgtgtaggaggctgccgccgagggactcggccggagagctgaggggaggggggcgttttgtttggtagttttgccaaggtcacttccgtttaccttcatggtgctgttgccccctcccgcggcgacttggagagagggaagaggggcgttttcgaggaagaacctgtcccaggtcttctccaaggggcccagctcacgtgtattctattttgcgtttcttactgccttctttatgggaaccctctttttaatttatatgtatttttcttaatttgtaactttgttgcattttggcaacaatttacctttgctttgggggctttacaatcctaaggttggcgttgtaatgaagttccacttggttcaggtttctttgaactgtgtggtctcaattgggaaaatatatttcctatacgtgtgtctttaaaaaaaaatgtgaacagtgaacgtttcggttgctgtgactgggaagttgttgggtgtgctttttcagccagcttctccttccactgcttaaagtgtccatgattctttaaggtgagctgcagtttatagccccaggtcatacctaggaggggagcataatgagctcagggcctccccaaagtgacaaggttagggagtgcttagcggttttgtgttcagccttagctttgtttatagagggaggttcagtttcttttctgtagtgcttgtaataattctcactcctaacagcaccatcgttgtgtcttgaataagttagaggtagcattatagaggatctggcataaatatttgcagtagtgagagcctaagcgatggtgattggtggagcttgaattttaggctggtgagatggcagctttgtgcctgagaggtagtgggtggttcttaagcttcagtgatcccctttttttttttttttttttttttttaaggaacttgtgttataattttggtaaaagtataaacccactccctctggacaatacttagcgacagttgctaaagggggctcctttttaaatgtaaggactgaaatggatatacttctaataagtaaatttccaacacttatttgctccaccccctcccccctcccccctccccctttatcatgttaaacagcctttttgcttttcttattcctcctctcctggagagctgtgattagaaaccacacccacccttgaatgaagtgcttgaactgggggagggaggctggctacctgtgaacaaacattggcccaaataagggaaaataagtgttcctggactttggactagtttatagccagatattccaagagcagcaagacgttgctctctgccgtctctgaaaacaaaagagatgcat

SEQ ID NO: 25350 - DNA, 2300 bp, Homo sapien
cagtggaaggaaaagtttggggagaaggaaaaaatttaaaccctcttcctaggcgtgtgaatgtatttcaagtatgctaaatacctcagtcttccaatctaattacaacacatagaaaagaggcatttttaggacatttaaaacttgtagcataattgcgcaactgaagagcgccgccgtgtccccgccatcggtgcgccctccgaccccccgcggcgcgcaagtgcgcggcttagcagcaggcagccggggacggaagggcacggggaggccggcgccctgcccagcacagaaccctgggtcggtatcgcttctctctgcgggcgacttcggaactgcctgggattataaacctcgaccaataaaggactcacatctttctgggtcttctaaaggcagaaagaaatccattttcttgtcacaacaagattttgttaagagatgcaaaagtaaaggtcgaagccagggaggctgcgatagtatggggggaggggcggctacgatggtgagtgccgctgaccaactacctgggttcgaatcccagggttgccatttgggcggctactatgtgccaggtgatcggaatacggaggtgaacttgcttgccgaggtcgccctttcttgggggaactatgattagctcggttgccttggccaagtctcagtctcggtttcttcacctgtaggaagtacctgcctcagaattgttgtaaggagtgagatcttgtcttaagatgtaaacgggccgggcgcggtggctcacacctgtaatcccagcattttgggaggccgaggcgggcagatcacggtgtcaggagttcgagaacagccttacatggtgaaagcccgtctctaccaaaaatacaaaaattagctgggcgtggtggcgggcgccagtaatcccagctacgcaggaggctgaggcaggataatcgcttgaacccgggagacagaggttgcagtgagccgagatcgcgccactgcactccagcctgggagacagaacaactcgtctcaaaaaaaaaaaaaaaaaaaaaggatgtaaccgattaacactttgttgggcacacagtaaagggctcagtaagtatcctctcttctttcacacagttccaagacagctcggaagggagacagccacgcctaagagtgattccttgagcagttctttcaaagaagcactgaactctgtaaggacgcttagctgcaggcagaaagggcaggggccctgggagcaaaggtgcataagccaggaagttacaggagcgagtcctgcacccagggcgcgggcagagaactccggagggacttctggcaagggcttcccgcccgggtgcccagagcggcatgattagcattcgccccgcccccatctcctccaggcccgcgattggtcagcgctccttggctgcccgctcctggcggggccagagggcgccgggggaaaggccgagcccgcggggcagtgggcggggacgcgcggagagcttggcgaggcggcccaccaaccgcgcccgggcctgagggggcggagccggggcggggcttcccggcgggcattagaagcaggtgacccgggcggggcgggagagggcagccagcctgcggccgtgagtccgctgtggtcgccgccgcgcgcggttccgtgctcgccagaggtgggcgaaagggtgcgagagcgcgggggaggagccgagcagggcacgtcccgagagcgtcgccaccgcccccaggagtccactggagcgcggagccccctgcaggggaggaggcgagcggcgggcgggacgcggcggccggcgctcaccatgcagtcccggcctggccagcgccggctgctcgcggtgctgtgaggcggcggggtcccacggcccccgcctcccgccttcctcccgcccaggtgctgccaggcgcgctcgccctccgtccggctcccggccccggggagaacgcacggcctgcccctgcccggctccgtctggatcatgcggggggctcccgaggaggagagggcgagtgaccggcctgcgccgcccctgttctgggggcgccccccactctgagtcgcccccacctgctgccatgtgccgctgccacgggtacccagcctgtcgctaaactttccgggcgccagcccggctctgagtcgcgcttctcagcggagtgacccagggacggaggacccaggctggctggggactgtctgctcttctcggcgggatccgtggaggtgagaaccttccctttctccctgttcttctcccgtttcctgtgcccttttccgggaagctgagggttct

SEQ ID NO: 25351 - DNA, 2300 bp, Homo sapien
aaccccgcagtaaagaagccagttcctaaaatagacctcattttgcaccgcggcaggaaggccacaaagtacttaaaaagccgtcaactggaatgggggtagtgttctttccaggcccgctttttccaaagttaaaagcctctttatatgaaaaccatgtaaactctcagcagccccctttgcttcactgccttttctagggagtgcattagagtcatttttacgtctgtagtgctaaagggtcacctagttaggagctttaacatcggattcgctgagagggtcatcggtttttgattcttctagagtaggcctccaccaagaagggaatacgtctaatacttgggatctgtggtttgcaacacaagtggtatccctcagactcctgaaaagggactatgccgtgacttccttccggctgcagtgagatccgaggtgtttacaccaccctagttgccgaatgcagcctttgctcagctagagtgtgtcctctgacggagcctggcctctgtttttgtctctgtgtgttgtgtgtacacactgaacgtggacatcggatagttcttttctgtgcctcctcagagaggcttggcttccaaacctgggagtttgttctctacccattggctagaaaaggccgtccataaattagtatatccaggtgggactagcacgatgccacgcacactgaacattttctgcagaggggcgttagcagtggaagtagagacacattctggtcctcctttagagtcaagccaatgctgttgctcgtgtatttgtgcacaattattcatctccgttgatctgacacactctcttgaaatcactagattatgaaacagatcttcacctcctgattccaatactgcctggtttcaacacaggggttgttttatttttttacttctcctagtaaatagagatgtgtataatttttgcccattttatttcttgagttgtctgcaccacttcttttcttactctgaaataatgtgaaaacgtgaagttggagcaagaccttgaaagagcctccctcctttgcgtgacctgaatcggtagcggcactctctgtttcccctgcctccgtgtcacttgttagtgatgggcattaggagcttcatatgttgcacaccttgtatcactcttccgaccctgagtcaggtagagctgtctgctcgaggtcgaatccagtgatgggtgactaagctctgctcggttaatgtaaacagacaagtgttgatttctgtcatgtggaacggtgtttcgacagttaagtctagcacccagtagtctccttattggtagacgattctaatttcattggattcaaaaatctctgactcaagggtctttccttagtgcgttttaatgggtgcatggctgagggaaaatccaagtcattgttaaactctaggtaaaagacaagagtatgggataccctcctaaccataccggtagttgtcagttttatttaaagtgggttccacttggccaggattggtggctcacgcctgtaatcccagccctttgggaggccaaggcaggcagatcacttgaggtcaggagtttgagaccagccgggccaaaaatggtgaaatcaggtctatactaaaaataaaaaaattaggctgaacgtagtggctcatgcctgtaatcccaacactttgaaggccgaggtgggtgaatcacttgaggtcaggagtttgaggccagcctggccaacatggtgaaacccccctctttactaaaaatacaaaaattagctgagtgttttggtggatgcctataatcccagctacttgggagactgaggcaggagaattgcttgaacctgggaggcagaggttgcagtgagccgagattgcgccactgcactccagcctgggcgacagagcaagactccgtctcaaaaaaaaaaaaaaaagtaagttccaaatgatcatgttttgtggcactgtcttcgtaaagtggccgctggtgtgatggaaagcattgctaaactcaagtgagacaactgctgttttgctttggattttccctgtgaaaagagaagccactgcctgttcgtcttgttagaaagacaagactttgaatgaagttccagactttgaatgaagttccagactttgaatgaagctggttgttgcccagagtagaagattcaggcacctacagcaactcacagcaactcctaactcttaggagggctccctcctattggccgtgaagctgcaaaccagcctctctcttttccctggatcttccttgcccctagttctgagccccagcccagaggc

SEQ ID NO: 25352 - DNA, 2300 bp, Homo sapien
tttctgagacggcgtttcactcttgttacccaggctggagtgcaatggcatgatctcagctcactgcaacttccgcctcctgggttcaagtgattctcctgcctcagcctcccaagtagctgggattacaggcgcatgccaccacacccagctaatttttgtatttttagtagagatgggtttcgccatgttggccaggctggtctcgaactcctgacctcaggtgatccaccctcctcggcttcccaaagtgctgggattacaggcgtgagccactgcgcctgactggatgtcattttcatgtctgataagaatgtcaggaaatctctcaagtgataatccccttttattaagtactaaactagtatatattgcagctaatcattgattacggatggcatgacttgtaaaacagaggggaagggagaaaagaagataggaggggaattatacctactatgtgctgagcattgtgctaggtaccttatttctaattcaacaagtacttattaagtacctactatgtacaaggcaatgttcaatgttctgtggtctaagaatgaaaagacagatcttacccttgcccttagtggaactgattgtccagcaggaaagacagccttaaaaaaaatttaagacttattttatttgttcagacatgtaaataagctattataatatagcctgaactaagagcccatgatagaagaataatttagtagtgatacctgatactgactcaggcatgcatgcatgtgtgtaggcgaggttggggaatcaggacagactctctgaaagagggtaagtgtgcagttgctgattgaagcctgtggaaggagcattgcaagctcaggggacagcataagcacagtcaggctcagagagaaaacggccatctaagcagagacctaaaaagtgaactagtcgagtcaagcttggatctctgattactagacagaaggcccatgaactggcctggagggctgctgaaggtttctgagaaatgagagtttgtgagcagcacattttatgctcgctcctattcattgacccttcctcgctttaccaacctgagggaagataaaagtattagcagggagttaggtccagtggcggaaggcacgttctctcttgtgtatttggtactgttaggttggtgcaaaagtaattgcggtttttaccgttaaaagtaatggtaaaaaccgcaattacttttgcaccaccctaatagactgttacctagaaaacatggaaccctggcaaagcgtgattggttcctagattcacaaggcataactagtcacagttgttccagtatttctgttttctacacagacctctgcatctcacgttgatgttgcacgctccgttgatgttgcacgttccatgccccatacttattcttgtacatgtgattccaccctagttctagtttttatttttattttacttttaagacagagtcttgctgtgtcactcaggctggagtacagtggcatgattatggctcactgcagctccaacctccaggctgaagtgatcctcctacctcagcctcctgagtagctagggctacaggcatgtgccaccatgcccagctaattttttaattttttatagagacgggctctcactatgttgcctaggttggtcttgaactcctgggctcaagcaatccctcccaccttggcctcccaaaatgctgggattagaagtgtgtgccaccgcacccagcctcctagttacagtttttagactcgagatttccccggctatttcttgccagttaggtaccatcgtgggattctactacttttattttgtttaatttgaaccagaagactgtcagtccctgatctgtgtggtttcttgtgccctgatctgtgtggtttcttgtgcctgccttcttataactaattctaatcaatactttgcctctcttttcctttctagaacacaagcagacattcccaaacattctaaagaagggttacctggagattagaaaggaccatgacagttactggcaaagctgttatgcagaactttcaccttacaacttatacttctacagcctcgacagcagtgggaatcaaaacctttatgccacgtaccagctttcacacttccagagcatatctgttttaggcaacctggaggccaggatggtggatactgttttgtatgacaacactcagctacagctaaaggcagagtcaccatgggaggctttggactggggacagaagctttgggaagtagtgcatgctgctgtgcccggttacatggggcggcagaat

SEQ ID NO: 25353 - DNA, 2300 bp, Homo sapien
gagacagcgtctcgctcttttgcacaggctggagtgcactggctcaatatcagctcactgcaacctgcgtctcctgagtccaaacgattctagtgcctcagcctcctaagtagctgggattacaggtcgtgtgccaccatgcctggctaattttcgttttagtagagacagggtttcactatgttgcccaggctggtctcgaactgctggcctcaatcaatccacccgcctcgacctcccaaagtgctgggattacaggcgtgcaccgccatgctctgctaatttttgtatttttagtagagatgaggttttatcatgttggtcagtctggtctcgaaccgctggcctccagcgatccacccgccttggcctccctaagtgcgtggattacaggcacgagctaccacacccggccttttttttttttttttttagagtgaaagtttattaaaaagctttagagtagtaatgaagggaaggaaaagaagaaaagaacacttggaagaagaccaagcaagtgacttgagagaccaagcacctgttacctgcttcttaaagagcaaagagaaattagccagcctaagtaagaggatgggccaggagtgagaactctcatcagagggaatcacatgtacaaagtcctgaggcaaaagagaatactgcaaatattctcttttggtaattaaaacaaaacaaaacaaaaaatgtacctctggccaggtgaggtggctcacacctgtaatcccagcactttggaaggcaaggaagaaggattgcctgaggccaggagttcaggatcatcctgggcaacacagggagaccttgcctttacaaaaaaaaaaaaaagagaaagaaagaaaaaagaagttagccacgttgtggtgatgcgtgcctgtagtcctagctactcaggaggctgagttggggggatcccttgaacccaggagttcagggctgcagtgagctatgatcgtgcgactgcactctggccggggcacagagtgagatcctgtctctagcaaaacagaaaaaaaagtacctcaaattgcagggtttaaagaaagcttatttaaactttgaatatcaaccaaaggaaattttttcttaactcaaagcttaaagatttgcttattaatcttctggagggtgggaaggtgggaagaggaatcagagttttagatttctgtttcatccctgacccctttgacctttttttttttttatcattcctttgttcattcatttattcagatatatatacattgggcctgtgctaggtgcctactagatggtggtgagtgaaactgaaatagtgcctgccctcagggagtttataggtgagatgggtgagcgtgggaaaaccaataaaactgataaataagtgtgtacttataaagtgagaaaatggctaagaagtgtgctatgatggaaaacagacaggaaactgcaaggaaggtctgtccaatcagaccagcatatccctgcaaagcgaccacagtcactgcaggtgggatgtgggcggtcttaccaggcagtcctgcccgcgtgcacacacacgcacaccctattttgctgggaatccgcaagtgggggtgaagacctcacctcaaaaccaccccttttcaacctgcgtaggaaaggacagtgaaaacggattttcactgcagccccaaaaccggaaatgagaagcaatctccagaatagtcccacttttggaaagaacttatttgagtaattaattcccttagacaagggagctgctaaaaaccagcccgatcctgacatgttctaagtgacattttccaatcgcaaacacccattttggcgttgggtggagcagtgaggagactccacgacacacgccattgctttcacaatgtgtacaagaggaactgtatataagaaagcaaagaaataaggaggcctggcgggtgcggtcaggccttgcctagctgccgggtccctcgggcaggaaagactcgtcctcgcggcctggaaccttgtgtgtccggctctggctgcccgggccgccggcggaagcatttcagagtgggaccgcgagaagccgcttgtaaacagagccgggccgggatggtcagcgcccgggcgggctgtcaccgtgaggcgggcggcaggctgcgggagtcaagcccctccaggagcggactgaaggccccgcaggtgaatggagagtagcagccggggcccaggtgagcatccgtctgcttctgtgctgcctggccggccagtttgggggatggggtggggacgactgcattgtaaatatccgagcagctccc

SEQ ID NO: 25354 - DNA, 2300 bp, Homo sapien
tctttacaaaaatggaatcatgctatacatattagtctgcaacttgcttttaaaatgtattataatatggacatatatctaggtcagtatcttattctgtttgatggttgaattgcatcccattgtttggaggtcccttagaccatttcaccatttgtccacttaagtgactgggcttttccaatgttgcttttaccaacaatgctgcaaagaataacattgtacatatacgctaatcctgacatgccataattttaaaaagatagcgacctagaagtgagactaccggctcatagtgcaagtttattttattttatttatttattttttgagacatggtcacactctgttgtccaggatggagtgcagtggcacaaacccagctcactgcagcctcgacctcacaggctcaagcgatcctcccatctcagcctcctaagtagctggggctacaggcgcgcaccaccatgcctgactaattttttcacttttttgtagagaaggggtctcactatgttgccagggctggtctcgaactcctgggctcaagtgaccctcccaccttggcctccgaaagtgctgggattacaggtgtgagccaccacacccagccacaagtttattttccatttcaatagcctccaattattagccactagagactcttaacttccttgagttaggatccttaccaatttttgagcacctaccatacgcctgctatatgtagcaatggggatgaagaaaacaatcaaaacaaaacaaaagaaaaaggtatttccctaccaccgtagagctctatatagaaagaatacaaaaaaaaaaaagcagccagaaaataagaattaaaataatttgtattgcacatagttggtgtttaattcataaataccacttacaaagatttatgactcaaagacaagacaaagtacttccatgggttgacacagggctgtaagcaattctttgaacatgaaagaagctggacacataggtcatattccactccagtactcttcccagtccatcaaactgctctcttccaggccaataagtactttctgaagtcttcctcgagtccaacttctagatttttattccttcctctccctgcatcattccagccatagctcccctttgtgttcatgcaattaatttcgtctgagtcaaaggccttgtgtactctcgctcgttcagagggcaaaggtgtattctagatcctaccagaaataagtttcttaggaatttggttttattttataacaagctaagagatcatgtttttgtgtttcaaacatattactttttctaatttcctcaaacttagatatttccctttttagttctttctgagattaagcatcttagaactattctctcttttgaatcacggcaccacctttagctaagagaaaaacatctaattctcagctacttccaggcataattgcaacaaaatcagacccaatattgaagattcacgtttgctgtgtgttttaccataataaaagttcgaaattctgtgaactctcttaataaaatgttccaatttcttacaccctttcatgatgacgttctcttaaaggactaacttgaaattttcaacattcagttaagcccatttccttcctattaacaatcagtattcaatattgtggcacgtaagtaatactgtagttctgacagattaatttatatttgccttattaagagtcgttgctttttttgctccccgacttaaattttttttgtttttccccaatctatacgaataaaagcgtgaactatatgtgaaatagctgaagctccacttccattataaatagacaatgtcccaaattgccgttttacaaacattctcaatagcatcagccagtgatagcaatccgaatactccagagagaatgcgaccaaaacccacaacaagccccgtggtctagcacagcaaagagaaaaaaagagaacacgaaaatgcccttgctcccctccgggggccccttttgtgcggttcttgccaacgcagcagccctcctgctatatagcccgccgcgccgcagccccacccgctcagcgccgccgccccaccagctcagcaccgccgtgcgcccagccagccatggggaaggtgagcccagcctgcgccccgggaccccggagcttcctccatcgcgggggccagagactggggcaggagcaggcctgtgagacctcgccttgtcccgccttgccttgcagatcaccctctacgaggaccggggcttccagggccgccactatgaatgcagcagcgaccaccccaa

SEQ ID NO: 25355 - DNA, 2300 bp, Homo sapien
tggctaaaatacatgatttccttgtcaaaacatgaagggataaaccacagcagtgttttggcccaagaactatttggtgcttattaaaaatgtaggttctgggctgggcgtggtggctcatgcctgtaatcccagcactttgggagaccgaggtgagtggatcacctgaggtcagaaattcgagaccatcatggccaacatagcaaaaccctgtctccaataaaaatacaaaaattagccgggcatggtgacccgcgcctataatctcagctactcaggaagctgagacagaagaatcacttgaacccgggaggcagaggttgcagtgagctgagatcgcaccactgcactccagcctgggtaacagagcaaggctccatctcaaaaaataaaataaaataaataaaataaaaaataaaaatgtaggttctgaggtcttctcctgatctaatgatgcaggatttagccaaaagatcaagatggtaatttgcatttttaataagcaaggtgattcttaggcacactggagtttgaaaaccacccgatggtttcgaaagtcccttccaagcctaatttttctttaatcacaaaatggcttcatagaggataaattttttcaggaatctttgagaggattaaatatctttgagagggataaacaggatgaagtcagccttaacaatgtcactctattactaataacaacatttattcagtgttcatttgtgccaagtatgtgccaaatgccttatacacataatcccacttattcatgtcaatgtcctttagctaaagaccaccagggacacacctgtctttaaacaagttgagcttattacttgttgcagcaagggaggacatgctccttggggaagcatggagtgtctcagtaagagagcttagaaagaaattgttataggatttgcacttcagttgtgcgatttggggaaggagctaaaaaagttggagttcactccagattagatgttagcagaaagcagggttaattttgtgattagttatctcaagaaatcttacccgtagggaggggagactagaacacggataaacctgtaatccataaagaagtggcagttaatcattttggctgagagagtgagggcttgggattttgagagtggagcattgactttgtttttgtctgcgcttaggcaaagttaagaagtggatttattttatctcatttcatcctggtctcggagtagccttgtctgaagttgttattctgtgagactgtttatgtctaatagcggagtaacatgtcctcactgcgagtgccacgccagcatctgaatgtcagaggctactcttttttctcactttttttctcattaatcagactatagtccatgagataactcctgctctgagtggttatataatttgccatggagctaatcagtgggccttctgagtacaggcggcctgagtccaaagctcacactcttgcccgtgaagctttatggcctccctcacgcttgaaaaagggaaagcaatctataaagtagtatacggtacttctcagtcttgggcccagtgaccatagaaacctttcccttgcttgttatcgtaagttcactaccagggactgatctctagttagacgacgtgcccacgaaaggcatagttaaaagctgtcttaaagcattgggttaacgaagtcaaaactagccaagataagaatctagatttgtgtccggccctggactggaaaattgtgtaaagacaaaaatgtaaggtagagcagtctctgccatccagggaaatgagtcagtgcttgtggcattctacctcagcaacctctctggaatcctggagcaattctataatggcatagatctttcccagaaaattcacagggaataattcaatcatatagacagagccacgaatttcaggtcaaaagttcagactgatgcacagataaatttagaaaacactaacaatccaaataaaagcaacacagagcagtatgtacaggacagcgttagaatataccagagaacaaggacacaatctacaatcatttccagtgaatgcaggatgttaaagagatgcataaaatccccttaccgctgagggccccttttgtgttgttcttgccaacgcagcagccatcctgctatatagactggctgtgcagccgcaggccccatcacactgaactcgcatcatccgtgtcaaccagccatggggaaggtgagcagaacacaaattaaataaaatgaaaaaaaagttgcctttatataatgcctgttaggagcaaataatgtaattcg

SEQ ID NO: 25356 - DNA, 2300 bp, Homo sapien
attttcttcttgtagtggacgctctggtgctgcctggacttccactgtggactgaagcactccttctcccagatgctgacagcttaaagctgagtttgtctccaagaattttcttctgctggaggaagctgccttgcccaaagttacacttctccatggcagcagcccacatcaaattacggggcaatgcagaggcacagattcccggtccacttgcctaagttcctgacaactctagccctagccttccctgcgggatgggatgaagtcaccattattgcaatagctctctctcagctcacacttacaactgcctgcaggggtcccttctgaccagctgatagagtgggggaaggctgagcttgatacactaataaattggcatggcatttgggtacaagcccaaaatagaatgctgctgcagaatagctcactcaggagtcaccctaaagacagcagtgagggaaatcctcccaaaaggcaaccttgaggtagtgcacctggctgctcactcggtgcagaaagaaaagtagcccaaggtcaagcatatatggaattattgagcagtaatgtgtggcttggctggctggtccagggcctggaaggagaaagattggaagattagggacaagaaggtctggggtagaggaatgtgcagggagatatgggattgggcacaaagggcgaagatagttgtatcccatgtgaaggcccagtgtagggcatccaccattgaagaggcactaaacaaccaagtagaaaaaatgatttggtcatttgattccagtcagcgtctgccatcagccaccctactgctggcagtgagctcactaagagagcgttcatagtggtatggatgaaggctatgcattaacttctacttattaaggctaatccagctatttccactgtagaatgtccaatctgccagcaatagggaccaactctgagcccttttggtcccatgccttgagaagaccaatcagccacttagtggtaacatttgaggcagagcaggaacaccaaacagcaggcaggactctggacagccaccagcagaaggagggatttaggcccttaggaagatctgaaagggggaagaaagccacaactatctgtttttgctcaggtcagagccaattattgaggacctgcaatgtgccaaccctctgctctagggctcagggatagacatgaacaagaaataatacccagcccccagaagcctacaaaattccaggcaagtatcagttttattcaagacaagcccccaaacaccaacaatgatgatcacagaatttttttttttttttttttgcgacagggtcttgctctgttgcccaggctggagtgcagtggtgcaatcatggctcactgcaacctcgacctcctgagcttaagcaatcctctcacctcagcctcccaaatagctgggactacaggtatgcgccaccatgcagggctaatttttgtatttgttgtagagatggggtctcaccatgttacctaggctggtctctaactcctgagctcaagcaatccacctgcctcagcctcccaaagtcctgggattataggtgtgcaccacctcgcctggctgatcacagaattttgaatttgaactaagctttatgggttttaacacactttcacagattacttcacttgattccctcttctttaagattccttactatttaaattctggcttttagaactaaaacacacacacacacacacacaaaaacaccaccagtccctgagcagaattcattacttagtttaatgacttttgagaagtcaattaagcagagtaaactataaaataaaagcacagagacagaatttcgcccatccttttgctcaactaaaagtgtactctattcattttgatggcaacaacagctttagtgaattagaacaacccgaacctaccagaaagaatgagagtaaaccattcagccaaccccagtgacctgggcacggagagcagcgagcttgcaaatccccttactcaccaaaatgggcccttttgtgtgatttcctgtggaggcagcagtcagggctgctatacatacagtgacgttcccgcagtcccacacagcaaccagaaaacatctgctcacttccttcaaaatgggaaaggtaagtcctgggtaccggatgctcagccttggccctaatgcagtggcctcagtgggggccaatcactccatgctcccacatcttccatttttcagatcaccttctacgaggacagggccttccagggccgcagctacgaatgcaccactgactgc

SEQ ID NO: 25357 - DNA, 2300 bp, Homo sapien
ggagcagacgagaagcatcatcttaaaaccacagctcttgccagtacatttttctttacaactgtttttggtacaactgcactgaagtgttatttttgatgttgagctttcttcttttagaagcatattgcatggctacattttcttaaaaaaaaaaactgtgaccttatgctacttcattgtgactggaagactgctggagaattcagaaagtatatagtatttctgtgttagagcaagctggctttgtagcacattttacaaatgtgtggcattgaatattgcacagtgatggagtgggaggcagatttccaaagagttaatccaaaataaaattaatctgtcattgattgcctttactgtgttctcatatgaaaagaatgtttaaatcatttcaataaagcattaaaaaaatgaatacaggctttctctcagtagactataatgactactaggagggaagatgttctggtcttttagtacctttccaaaatgctgattaggcacatggcttagcctatcaatgtatgtaataacaacttgatcacatgaatgtcagtacacataatacatttcttaaggttttggtgtgccatctgtctacagaacagttttcatcagcatgtacaaaaacacagatggagattgtagactttttctgaaaatggtggtatattctcatgtggggctgggagaccaatgcagcgttttccacactgggtttgattatggttctaagatttaccagtaagcctgcagctaattagggggaggcaaaggagggaatcagcaacttgcggtccctgcatgcactgctaggtgtttagcttcataggacttcacccagttttcttttgcctagctctgctagttatgaggaaacatttttttctcggtagctactgctgtctctccttttaccacctgcgcgtttgccttacatgctgcctgaggattttcacaaatgacattgtgaatgtgttgctagctgtggtcaaatactcttttagaatccctcggtgggtctaaagcacaaaggtgtttgatttcatcttcctacatacatgtggaatgacaaaagacagtctggggtttggagtcttcctccacacttgcacatctgaggagtacttctaaatcaataagttggcagcaatggagaaggctgttaggcagtcacttgggttcaatgaaacagtgatactattgaaaggaaaaacacaggcaaatcatcacgctaattttaaaaaataaaagcaatgctagaaggagggtggcagggggaggggagtgaaatgttcctgtgtatttttctgctcttcgagcctctcacagattctcagggtttctttttatttttagctcaagaagtgtttaatctcttgattaaatatacctgcttccagtatttactgcttttcaccagcacctcaaagtcatacatttaaagattgattttattattttttcatctcatgaaattgttatatttataatcgaatttttttttctgtctggctgaagatggcagatataatagaaaattaagaaaacagcagcaaaaaacaaaatataacaacataaagctaagatctataatcttgccattcattgattaccatgattgatatgttggtatagtacacacttctaatcttatgttttccctacataaatataggcaaaatatttttatcaaaaccctatcatactgatgaagtcacttaagaaatataattgtctttcaattagaggattttctgtctgggattttttttgttgcctcttcacacttcaagtccttctggaacgcatgtgttctcataagtgacctcagatggaaccaccaacctccatctcagcagtttccataggcaaacattgcagaatgctgggcatgtaatgcatttctagtgagctgcataggatgagaagtgtgccctttgtctccaaggtcataatggctctgctgactttaatacctttcactggagctagtgaggacaactcgaaaatgccagaaagagagagagcccactgccccatgatctcaaatgaaaaaaaaaagagaatacagaaatccccctacgcaccacccccaggtcccttttgtgttgtttttgccaacacagcagcttccctgctatatataccagttgcccctttgtccctatcatactagatgctaatcaccctctgtcaacaaccatggggaaggtgagcctgtggaggtgctgtgccatgtctattgggggtctgtggtgtgtggggatgttccttccagctgactgtctactgtc

SEQ ID NO: 25358 - DNA, 2300 bp, Homo sapien
ggcatgagctaccacacccagcctacagtttagttttaattataaacaaaatattagaataaattgaaaatggctgggcgtggtggcttatgcctgtcatcccagcactttgggaggccaaggcagatggatcatttgagcccaggagtttgagaccagccagggcaacatagtgagacctcattgctacaaaaaaaaaaattaattaaaaaataaaaaattgtctgggtgcggtggctcacgcctgtaatcccagcactttgggaggccgaggcgggcagatcacctgaggtcgggagttcaagaccagcctcatcaacatggagaaaccctgtctctactaaaaatacaaagttagccgggcgtggtggcgcatgcctgtaatcccagctactccagaggctgaggcaggagaatcgcttgaatccgggaggcggaggttgtggtgagccaagatcacaccattgcactccagcctgggcaacaagagcaaaactccatctcaaaaaaatgaataaataaataaataaataaaagtaaacagtcatagtagaggagagactgaattattttttaattctctctatagaaaatactatgaaaccttggtcctattaacagataatcaaagagtatgtaagaaaaaaaggaattttagtgtatgttaggcagttagtaatcatgaaaatattaatactgattttttgtttgtggtatttttcagctctttaaaatttgtaacttgtaattaatagttctaaataaacatacaattttgtattagtttcatatttacaattctgcattctttttattaaagacggtccccataatgtataaacttcaggctcaccaaacccggaagtgtctaggtacaatataaactcaatatggagtgaacaactagtttagaaaattctatatctagggttttgttagtgtctttcataatatgacctcaggtaatcaagtgacttacttggccagtggaaaggagtggaaataaagattaagaggtgtcaataacagacacccagccgtagatgggccagaagaacaaactctgcccctagtctagtggtatagaggagacacagacagaaaccattaacaagctttaagcaagggagcaagtgtttaagactaggaggcaggcgtgtgggcagggattgtcaggcctctgagcccaagccaagccatcacatcccctgtgacttgcacatatacatccagatggcctaaagtaactgaagatccacaaaagaagtaaaaatagtcttaagtgatgacattccaccattgtgatttgtttcttccccaccctaactgatcaatgtgctttgtaatctccccccgcttaagcaggtactttgtaatctcccccacctttaagaaggttctttgtaattctccccacccttgagcatgtagtttgtgagatccaccccctgcccacaaaacattgctcctaactccaccgcctatcccaaaacctataagaactaatgataatccaccaccctttgctgactctcttttcggactcagcccgcctgcacccagttgaaataaacagccatgttgctcacacaaagcctgtttggtggtctcttcacacagacgcacatgaaagggatctcatctataattagaaagatggtgctagcttgaacccaggtgatgtttcttcaggattgccactgttttgtattgacattcatcgagtagaatgatctttgggtcattgggtactttggggcaccctaactatgtaggagccagagtttcactagcttccccagcaatccttgcttagtcaattgattcctatgtctgcagccaaatgctataaaaaactctggggaaggtaaactcctcccatcctcttggtttttcaattaatcatttagatgggaaacataagcctactcaggtaaaaagacacgtgaacttcaggccaggatcacaatcctgtcccaaatatatgactttccaccctccctcaacccttaatgggggtgggcgtaggggagtgtatttttaaaacaaatgattttaattcattcactgtttcctagcaaccaggaaaaagcatgtgttcctgatgtctgtgagcaccagtctgagatgcgcggatgcttcagcatgcctccagaagcagagaaagaacaaaagcactggaaccggtctccggttggtgagcgattctcaaaggggaatttgttaagagcaggcacttaatagaacagcccgagagacctgtaccacgattgcaggtgtgcagcagggaacctgcatgg

SEQ ID NO: 25359 - DNA, 2300 bp, Homo sapien
gagactgcaccagcctgtcagggcaagactctgtctcataaataaataaataaataaataaatattggagcattaaattctgggcagcaatatacaagcatgctattgtcctacaaatcacaatataaaatactctttattttcatgtttttgagagcaatgaacacacaaaatataatctctggaggagactaaaattcttttttcaatccaccgttttctaaggcttcacatctctagtccaacttcattggatcacagataatcccccgccaactgagcatggtggctcacgcttgtaatcccaggactttgggaggccgaggagggccaatcacttgagtccaggagttcgagaccagcctgggctgctgaaacccatctctaccaaaggaaaaagaaaagaaaagaaagaaagaaaaattagttgagtgtgattgtgtgcacctgtaatcccagctactcggaaggctgaggtgggaggatctcttgagcccaggaagtcaaggctgcagtgagcggtgatcgctccactgcactccagccagggcaacagagcaaggccctgtcttaaaaaagaaaataataagaatcccattcattatcttctaatgcaaacaatcaatggagtttctaaagacctagacataggtggtgtcaggacctgcttctgtaacttttccatcctttgcattaggcagcgcggaaccccctaggcgaccccgcgctggccgggagcactctttcttcagccaaaggtacgttccattaccgcccctcgggggcgcgctaggcagcgggccggccaagctgccgccgcccagggcgccctgtcccgttcgcttttgtgccgacctggaaacactctgtggtgctctagattgttacaaagttcggggtggtgcagccccagcgcgccccgctccccggcctgcaggtggcatacaagtctcttcgctgtcgggattcgggactgaatctctgccgggcggcaaccccttcccccaccgggatcaccgggaaagtggcaccatggattctccatctttgactgtggccacgcccctctcgctgactccgcccatcccacgggaattggcgtgtggcgattggaggcgtgtcgggggcggggctgggggaggtgggctgaggaggcggggcctgggaggggacaaagccgggaagaggaaaagctcggacctaccctgtggtcccgggtttctgcagagtctacttcagaagcggaggcactgggagtccggtttgggattgccaggctgtggttgtgagtctgagcttgtgagcggctgtggcgccccaactcttcgccagcatatcatcccggcaggtaacctcaggctccaaggggcggccccggtccctggctgtggaggggtggctctaattccgcagaaggcaggaatggggtaaaggaaaaaagcgcagatcttgggtgtggagggagtcaaggcctgcgtgcaaagaagggaacaaatccaggtattgagaatgggaaaagaaaagggaaggaggggatgctggatgcttggatatgcagaaggtctgcttttgggcctgggagggagaaactgggcggtgaggaagttggatgcaacgacaaggggaaaatcaggtctgcacttgggttggaaaatcgaggggtggaagttgcaagaatgcatgtagaagactaagcctggagtgtaggaggaagaaaacgtgcagcagctgggggctggatgcaaagaaggctgtaagccgcagacgggcgtctgcaggcaactcaggcggcgaggaatagccttgaagccgatccctcgcgtccgccagggggcgtggaggggcggagctccagcggccttcagaggggtcgctaggccacacggggcgagagggggctgggggaaacacccccgccagttccgggtgcctggagtttaaaaggtcccagcaccagcgaggggaggggaggggaggggcgggcgtggagacctggaaggaggtaccgatccagccttgattgcagccctcttgcacaacggccataaggacgggtgcaggccaagagcaaggacatgcaaaccccaagacctgctaacgggcggcgaagcgggggcacgccctcgcacacgcagagataaattgtgctcccatgacctttatttggaaagtgcctgcgggcctaaaattggcctttgtcccaccgagtacactcagcactgtactttaaaccggataaactgggctgtctggcaggtactaaaaacagctaaattctcctgtgagtgttctgtatgtta

SEQ ID NO: 25360 - DNA, 2300 bp, Homo sapien
tgttagagataattttttaaaataaattttggaggctgggcacggtggctcacgcctgtaattccagcactttgggaggccgaggcaggcggatcacttgaggtcaggagttcgagaccaacctggccaacatggtgcaacaccgtctctactaaatacaaaaattagcttagcatggtggcacacctgtagtcccagttacttgggaagctgaaagaggagaatcacttgaacccaggaggcggaagttgcagtgagccgagactgcaccagcctgtcagggcaagactctgtctcataaataaataaataaataaataaatattggagcattaaattctgggcagcaatatacaagcatgctattgtcctacaaatcacaatataaaatactctttattttcatgtttttgagagcaatgaacacacaaaatataatctctggaggagactaaaattcttttttcaatccaccgttttctaaggcttcacatctctagtccaacttcattggatcacagataatcccccgccaactgagcatggtggctcacgcttgtaatcccaggactttgggaggccgaggagggccaatcacttgagtccaggagttcgagaccagcctgggctgctgaaacccatctctaccaaaggaaaaagaaaagaaaagaaagaaagaaaaattagttgagtgtgattgtgtgcacctgtaatcccagctactcggaaggctgaggtgggaggatctcttgagcccaggaagtcaaggctgcagtgagcggtgatcgctccactgcactccagccagggcaacagagcaaggccctgtcttaaaaaagaaaataataagaatcccattcattatcttctaatgcaaacaatcaatggagtttctaaagacctagacataggtggtgtcaggacctgcttctgtaacttttccatcctttgcattaggcagcgcggaaccccctaggcgaccccgcgctggccgggagcactctttcttcagccaaaggtacgttccattaccgcccctcgggggcgcgctaggcagcgggccggccaagctgccgccgcccagggcgccctgtcccgttcgcttttgtgccgacctggaaacactctgtggtgctctagattgttacaaagttcggggtggtgcagccccagcgcgccccgctccccggcctgcaggtggcatacaagtctcttcgctgtcgggattcgggactgaatctctgccgggcggcaaccccttcccccaccgggatcaccgggaaagtggcaccatggattctccatctttgactgtggccacgcccctctcgctgactccgcccatcccacgggaattggcgtgtggcgattggaggcgtgtcgggggcggggctgggggaggtgggctgaggaggcggggcctgggaggggacaaagccgggaagaggaaaagctcggacctaccctgtggtcccgggtttctgcagagtctacttcagaagcggaggcactgggagtccggtttgggattgccaggctgtggttgtgagtctgagcttgtgagcggctgtggcgccccaactcttcgccagcatatcatcccggcaggtaacctcaggctccaaggggcggccccggtccctggctgtggaggggtggctctaattccgcagaaggcaggaatggggtaaaggaaaaaagcgcagatcttgggtgtggagggagtcaaggcctgcgtgcaaagaagggaacaaatccaggtattgagaatgggaaaagaaaagggaaggaggggatgctggatgcttggatatgcagaaggtctgcttttgggcctgggagggagaaactgggcggtgaggaagttggatgcaacgacaaggggaaaatcaggtctgcacttgggttggaaaatcgaggggtggaagttgcaagaatgcatgtagaagactaagcctggagtgtaggaggaagaaaacgtgcagcagctgggggctggatgcaaagaaggctgtaagccgcagacgggcgtctgcaggcaactcaggcggcgaggaatagccttgaagccgatccctcgcgtccgccagggggcgtggaggggcggagctccagcggccttcagaggggtcgctaggccacacggggcgagagggggctgggggaaacacccccgccagttccgggtgcctggagtttaaaaggtcccagcaccagcgaggggaggggaggggaggggcgggcgtggagacctggaaggaggtaccgatccagccttgattgcagccctcttgcacaac

SEQ ID NO: 25361 - DNA, 2300 bp, Homo sapien
agataggagaaaaccgccctgtggctggaggcgagatatgctggcagcaatactgctctgttactctttgctacactgagatgtttgtgtaaagtgaaacataaatctagcctatgtgtacatccaggcgtagtacctttccttgaacttattcatgatacagattcctttgctcacatgtttcctgctgaccttctccccaccatcaccctgttgccctgccacactcccctcgccaagatagtaaaaatagtgatcaataaatactgagggaactcagagaccagcgctggtgcgggtccttgcacattgagcgccagtctcctgggcccactgttctttctatatactttgtctctgtgtcttatttcttttctcagtctctcggctccacctgatgagaaatacccacaggtgtggagggtcagacccccttcaaaaagctcatatacctctctaaacagttctacaggaataaatggaggtggctgccaatatcccttaagccacctcaaaaaccaagttgacaaggtgtatgcttttttcttttctctcgggaaaaataccagtgccctctggtgtccaaagtgcaccttgagtagtaccacgtagatcagtttatcttcaaagaataatgtactaattcaatgttagagataattttttaaaataaattttggaggctgggcacggtggctcacgcctgtaattccagcactttgggaggccgaggcaggcggatcacttgaggtcaggagttcgagaccaacctggccaacatggtgcaacaccgtctctactaaatacaaaaattagcttagcatggtggcacacctgtagtcccagttacttgggaagctgaaagaggagaatcacttgaacccaggaggcggaagttgcagtgagccgagactgcaccagcctgtcagggcaagactctgtctcataaataaataaataaataaataaatattggagcattaaattctgggcagcaatatacaagcatgctattgtcctacaaatcacaatataaaatactctttattttcatgtttttgagagcaatgaacacacaaaatataatctctggaggagactaaaattcttttttcaatccaccgttttctaaggcttcacatctctagtccaacttcattggatcacagataatcccccgccaactgagcatggtggctcacgcttgtaatcccaggactttgggaggccgaggagggccaatcacttgagtccaggagttcgagaccagcctgggctgctgaaacccatctctaccaaaggaaaaagaaaagaaaagaaagaaagaaaaattagttgagtgtgattgtgtgcacctgtaatcccagctactcggaaggctgaggtgggaggatctcttgagcccaggaagtcaaggctgcagtgagcggtgatcgctccactgcactccagccagggcaacagagcaaggccctgtcttaaaaaagaaaataataagaatcccattcattatcttctaatgcaaacaatcaatggagtttctaaagacctagacataggtggtgtcaggacctgcttctgtaacttttccatcctttgcattaggcagcgcggaaccccctaggcgaccccgcgctggccgggagcactctttcttcagccaaaggtacgttccattaccgcccctcgggggcgcgctaggcagcgggccggccaagctgccgccgcccagggcgccctgtcccgttcgcttttgtgccgacctggaaacactctgtggtgctctagattgttacaaagttcggggtggtgcagccccagcgcgccccgctccccggcctgcaggtggcatacaagtctcttcgctgtcgggattcgggactgaatctctgccgggcggcaaccccttcccccaccgggatcaccgggaaagtggcaccatggattctccatctttgactgtggccacgcccctctcgctgactccgcccatcccacgggaattggcgtgtggcgattggaggcgtgtcgggggcggggctgggggaggtgggctgaggaggcggggcctgggaggggacaaagccgggaagaggaaaagctcggacctaccctgtggtcccgggtttctgcagagtctacttcagaagcggaggcactgggagtccggtttgggattgccaggctgtggttgtgagtctgagcttgtgagcggctgtggcgccccaactcttcgccagcatatcatcccggcaggtaacctcaggctccaaggggcggccccggtccctggctgtgga

SEQ ID NO: 25362 - DNA, 2300 bp, Homo sapien
gggacacctggagcacagaaatgaatagtggcagtaatgaactataacatgttggaaaaaaatgagtccaaagtcatactaaccaatataaagaaagaaagaaaaagatggaacgctattagttgcagtaaaattcaactaatacatacagaggaatagaagtataatatcatcgaacaataattgattcagcaagaatcctaaatctgtgcttgaatgaaagtttttgaggaggatatatacacagacaaataatctctctacagataaaattcatctggaattaattttggatgtctagtgtgaagtgagaatctaaaatgatttcttttgcaaaaacagtagcccagttttcaatctcttttccacagaaattaaactgtaagctaatatagatattagacggtaagcttcttgaggacatggactgtgtaatgttcacatatatttttattttttaggctagtcaagtgaagcagtgggatacgttcataattctatccttagtgtagtgcttctataactaacacactgcaggttaaattagggactcaaaaatatttgcggagtgcactttttttttttttttttaaaccatagatggagtttctacatacactgcagtcgtcgtggctgggcaatttattcttttcatatgatctctgtacctatttcatactttattgtaggtttatgaaatattaacatagggtgataattacgagggccttttttgcttatcttaaatttttaaaaaaaatttttttaaaggaaggcagagacttgagcatctttatgggctgaggaggcagagtcattggaaaaggggaggttgcagatacggtgcaagctcccagacaggagagggtgaattgggggccaaaaggattgagctggggaagaagaggccccttcctcagagagatgagggagaaaggcagaccagggcagatgtggatgtaggtaaatgttgtggtgtgtggggaattagcttgttaagggtcacgcccagataccttgggatttttcacgtgggtataaaatatgattctctgatgagaatgatggtcaaggtaatgtgggggtcgtggtggtggtctgacgcagcagtaataaggaatgggagaagctgactacagactcccagaaagattgctgaagggcccagctgaggatggtgactgggatttgcactggactcaacctgcaggtttcgatggtgctttccaactccaggaaaactgggctgggatttgacaaaactcttgaggaaaaggactcacagaatttaaaactgcatttccctttaggtttcgtctgctttccatcctcccctaccaagccccacaactgcggcgagcatgttttctgcagttaactgcactgcgctctcagcaggacagaaatgacgaataactctagccaagctgaacaagatagggcttgggcttggtaactttatttgcatcagcatttgcaacacaacacctaaatgaaaaaattaactataaagccgacatcacttactctgggtcagggaactgtgccattcgctttaagtgcatttacttaatctcaaaaaagtattaagaagtgagtccttttattaatccgactttacacaccagaggtctaaggcctaaataaatgagcaatttgcttaagatcatatggctggttattggtggagtcatgcaagtctggaaacagagtcatcgctaactccggttcagtgctacacgagtgaactgtctacaacaaagcaataacatattatgagtgcccacagtatcgaacacatacggtaaccgcagtccagccagcacccctgcagtgcccagagcaccaagcacccatccgttgaccccgcatgcgtgacgctcacgcgcgcagtccccctggcttcttccaggaaggctgaagcggcctaatctcggccaaaagatcaggacgactcgatctgggctggactccttctgcctgagcatctgatccgagcgtcggccgggctgggaggagccggcccccgggaaagatttcggactgggggacaggaaaacagagggcggagtcttgggggggggaagcgagaagccgcatcaaccatgtaagcagcttcgcttcctgccgcaaccgtccgcggcctgaggagcccaccgccgctctcgggggccgacttccgggggctgagccgttgaagcggaggctggggcggggggcagccggcgcggccggggcaggaggcgcaggtaagggagggggcctggagcttggccggctggggctcagcatgggaagga

SEQ ID NO: 25363 - DNA, 2300 bp, Homo sapien
ggtatctcattgtggttttgatttgcatttctctgatggccagtgatgatgagcattttttcatgtgtctgttgggtgcataaatgtcttcttttgagaagtgtctgttcatgtgcttcgcccactttttgatggggttgtttgtttttttcttgtaaatttgtttgagttttttgtagattctggatattagccctttgtcagatgagtagattgcaaaaattttctcccattctgtaggttgcctgttcactctgatgatattttaatatgtccagatactgcattttaccaggtgtaatatttctgatttatcttacttaggaaagggaattcttgaagaattatgtccagcgaatagttgatgttcgacccaccttggttcttgttgagaaaacagtgtctcggattgcccaggacatgttattggaacatggcattactttggtcattaatgtaaagtcagtgagtgtttttaattttctattgtattttaaaaaaatcacagcttttaaatttatatgcacgtatggtaggtatacaagaatctttttttctttgctgttctatttgtattgaaagtgggacagaagatatggcacctatttcattaagattcagaatttcagactggaactggaagaaagtataattgattatgtaatacttattggtgtctacaagaccaaaagtgaaatggacattagttaatcactaggtatttgttgatccttcatttttgttggagaattgctcaagcagaagacgttctctcccttgaaaagtttaccctgtgcagaacaggggccaattctaggaagttgtttttctccccacattatcttgtggtaatccatgatgcttaagtgcatttttataatgttattaatatgagtaaggtttcagtgggcatatattgattactaagcaactaagtgtagaagaatccagaataaaaaaattcatcatatatttattaaaaaggaaatttgtgaatgttattttttaatttttccattacttttccagattaaatttacaaagatttttattcttctctagttttgtaatacaatgtttttctgttttgtagcaagttttggaacgaatcagtcgaatgacccaaggtgatttagtgatgtcaatggaccagctgcttacgaaaccacacctgggcacttgtcacaaattttatatgcagatatttcagttgcctaatggtgagtgatctttagcatagattgacctgaggaaaagagttaacttatcactactacaatgtttacttactaggaaatacctattaatagtgggtaagtgaggataggcaactgtgatcttattcatgtaagagtttttcttttacagatattaagagagtgaattaattctatttgtacttctggattgccacctccaccatcttaactttctgtttgtttttgtttgtagaacaaaccaagacactgatgttttttgaaggttgtccacagcacctaggctgtacaatcaagctaagaggaggctctgattatgagctggctcgagttaaggagatcctaatatttatgatctgtgttgcttatcattctcaactagaaatatcctttctcatggatgaatttgctatgcctcccacattaatgcaaaacccttcattccattccctgattgagggacgagggcatgagggggctgtccaagagcagtacggtggaggttccatcccctgggatcctgacatccctcctgagtctctgccctgtgatgatagcagtttgctggaattgaggattgtgtttgagaagggtgagcaggaaaataaaaatcttccgcaggctgttgcctctgtgaagcatcaagaacatagcacaacagcttgcccggcgggtctcccttgtgctttctttgcacctgtaccggaatcattgttgccactccctgtggatgaccaacaagatgctttaggcagcgagcagccagagactttgcagcaaacagttgtgctgcaggatcccaaaagccagataagagcctttagagaccctctacaggatgacactggattatatgttactgaggaagtcacctcctctgaagataaacgaaagacttattctttggcctttaagcaggaattaaaagatgtgatcctctgtatctccccagtaatcacattccgagaaccctttcttttaactgaaaaggggatgagatgctctacccgagattattttgcagagcaggtttactggtctcctctcctcaataaagaattcaaagaaatggagaacaggagg

SEQ ID NO: 25364 - DNA, 2300 bp, Homo sapien
gctgtttataatgggatccttggaaggcatagatgcttcaaaaattattttgaaatgtgaaacttaggggactatttgttcttctagatattaagatgtattttaaatctctaataattaaacagaaagtagtaggcttgcaaagcaagtcagtcacatataaaaaaatagctctgacatagattctagtatattttatgtataaaaatatgttttaagtatattaatatataattgtattatatgttaattatgtatgttatataattatatatgttataggctaataaagttatatattatgtaactagtatataattttatgttttaaaattatgttttataaaataatattttatgcatattttatatagcttagtacatgataaagcattgcaaactattggggaaacattattctacacacatggggaaaatagtcataataaagaagccatggaagttcttggtataagaactgagttactatattgccactgtaggaatcattcagttgtaagaaaaagtattcaacctaaattctctatttttctaatttaaaaactgaaattccaaaaaacatacatttttattgtgatcatttagacagtttaattgtatatcttatgcttgcttgatagtgacttgagtaggatatttttacttttaatttgctaagtttttttgttacatcaaggaaaaaggaaaggacaaaatgaactgataattactcaaaaccttggctttactaatgatattaaaccttttagatgaagtagatggaggagatacacaaaagaagcaactcataaatcctcatgtggaacttcgtaagtatgagatattatatcattggtttggggagagggactacagttgagccatctctattatttgagaattctagcttcatactaaataaatgtcccagttcttgaaatgaatattaagtctttatgctgacatgaggtatatttaatcaacagtttataaaatataaatttaatttataaagaaatttaatcaaaagtataatttatttgtaaattatgctcttatttctaatagttaaacatttacttattatgtaatctagagccacagaattttgacagttgcatttagaattgtgtatatgtgtgccagaaacgtattatccagaataatatgtacagtacattttaagatatttattaagaattactataaaagtacaatgatgttaatatggtaggtaacaagtgtaaaattagaactgagtcttttttttatgtgatttttatttttttctctttttttggaaagtatgtaaggatggtcatacgatgttctttaattccccctgaagatcagtttaacaaaattgtgataaatagggatttggatctaacatgcaaaatgccatcatgaagaaacttaagtggttgcatttggccagggtagggagtgagggagcggaggaggaaagatattttctgagtcataaagctttttaaaaaaacttctgttgtttatagaattttcagatgctaatgccaagttttactgtcggctctactatgcgggagagtttcataagatgcgtgaagtgattctggacagcagtgaagaagatttcattcgttccctctcccactcatcaccctggcaggcccggggaggcaaatcaggagctgccttctatgcaactgagggtgagcctttctcatcgtttattgattggttcagtagtcttcatctctttacctcagaaaatgcagcaggaaggatattgcttaataagaactttcataactatgacttactagttttaacagaggtgtttataaagttttatttagtagttttaaaaagtagatcttctagaactgaacttagatgtgttattgacaaaagtagagggtttttgactatataaatccacaggatcccttcagttaattgagaattgtgttctgatcaaaattttcactgtgacattagaaaattccccttaaaatcataaaacaacctaatcatttaggatctttggaatgatgtgttatagattacagtatatattgtgattgagtaaacacataaaatttctgccttttagatgatagatttattttgaagcaaatgcctcgtctggaagtccagtccttcctcgactttgcaccacattacttcaattatattacaaatgctgttcaacaaaaggtagaaatctaaaaccatggtctgtaatcaaagtttggtggcttttttcacatcctgaatctttctgttagtctattcttgtgttgctataaagaaat

SEQ ID NO: 25365 - DNA, 2300 bp, Homo sapien
agtaccttttctcttcagatgtaccccgagaagtacccgtgtttgaatggccagacttccctgttgttatctgcctacttcctgagttccagtgagaaagccctcaggactgagcttcagagggctaagttctttccaaatttaacagtcaggcactcagagaaaagactgccaaccatttgatggaggtgtttcacatctgagtttgatgaatggtattccaccctggataaactggagagatgctctatttaattgattgcaaaccctactttgatttctaagcctcttctatcagagcagccttacatggagctaaagttgtgatttcagaggcattagcaaacttttgtcctccacctcccttcaaaatatctttcccattaaaaagatggattctttaataagtgatgttgcattaactggttaggtacttggagaaattgttacattacctaaaaaattgatactttaaaacattaaattatttatttaatgtttgaaacagtaaaattatgaaacggtagaaaagaactagaaaaaagatctgatgaaaagattttctaatttttagtatgcaattcctttctcgcataaaagctaaggaagaaattataaaagaaaagactgctagatttagatacataaatttaaaaaaccctccgcactgatcaagatattataaattaggccaaaaacaaagttgaaaaacattttggtatttatgtcagaaaaatattttatattgtaaacatagacagtgcttttctacataaatagggaatactcaaacttaccacagccctttgcccattcacagactatgatcacaataataataataatattcatcatcaccaaacaatgctaacgatactagctaatacttattgagcatttccttggactttatgtttgtttactcacttaacttttccaacaaaattttgagggacagcagtgggctgaatgtttatgttcccccaaaatacatatgttgaagttctagtccttaaggtgatggcttattaggcatggactttgagaggtgatttggtcatgagggctctgagatcagtgcccttataaaagagacctcagaaaaatccctcatcccttctgccatgtgaggttgcaatgagaagacagcagtggtcaatgaggaagcgggcttttatcagacactgaatctgccagcactttgatcttggacttcccagcctccagactgtgagaaataaatctctgaagtttataagccacccagtttatggtattttgttatagcatccagagctgattaaaggaggttctcgcatttctcccatcttacaattgaggagattaagacaaagagaggccagtatgtaatttgctcagggttatgcagctagcacatggcagagccagaattcaaaggctttcttccttcaagaggcaagaacaagagattttaaaaggttgtaatacaattggccaatgaatgtctaaaatagtcaaacttaaaaataaactaaaaaaaaagaatattagttgtctttttttaatgccaggattcaaagcacaataccacacaaagaacttttgacccacaagaaatatatacattatttctacttaacacacaccgagtattattataatggttaggagaaaatgaatcagagcattttagagagctttaggactgtccagcgaacagcccagacgcagggcctacctggcctcgggagcctttagccatcttatcgctgtcctcggggccgatggtcagcgcacgcaggacaggaagaaacttctggatcactcctggaagacccagggcgcccctagagacagggccctggaacccgggacagagtggagggaagcagaaacattgcgaatcgggggtggcggcagcagcgacatgagatcctttgccctccgccccctgggctgcgggacccagtgacttcgaggaggagcgcgagcgcagccgcgcggggcgcacccggatccgcctggggcgggagccgcccccttcccgccgcaggcggcgcggggctgcgagtcaagtccaggactcgggccagtctctccggaagacaagaccaacctcgcgccgcggcgcagcagcacgcgggttctgagaagcgcgtggctccggcgacaagaccccaagcaccctcggccggtggcccgggcccgaccaccccagctgcgcgtcgttactggccacaagtttgctctgggccagccaagttggcaacttggaagcttctcccgggctctggaggagggtccctgcttcttcctac

SEQ ID NO: 25366 - DNA, 2300 bp, Homo sapien
tttgttccccatattaaattctctctattgaattacaacatatagatgctatttttctgaaagaactctaagatgtgtgtcgagaggaggcaatctcccatataaggaccaggttccccaaagagaaaagccattagagtttggctgcctcagctaatcttaaagtggaggaaaaaacaaacaaacaaacaaacaaacaaaaacaaaaagtgctgaggaacactgtactttaaactatcagagaaataatgtcttttttattgctgttttttagagacagggtctcactctgtcacccaggctggagtgcagtggtgtaatcataactcactgcaccctcaaacttctggcttcaagcgatactccctcctgagctgctgggattacaggtgtgagccaccgctcctggccctggaaaattactctcattgagcacctgcgcctgcatgcctggtcatgaatgtcagctgctaacactctggtagcatgcctactccttcctcccatccacatactgtctatgatttcctagtctcctaagacctccttctcagtaaggccatcttccgaggaggagcatcaactcctccaacctcccagctcctgggtgtgccttgatacttccaaactcactgcaagcgtcactggcacatggtatgaagcagagcgggggaggcaggacacagagcactgggtgtgactggggagggcaggctttcacagcttcctctgtgatggtttctaatccttgcaggctcccaccattgggtctctttccatctgaaaatggaggaaattagaccagctgcctaaaacatcaactctaatgttctaggttctaagattctgtggttaatttaagtgacagaaccacattatggctgctgtttcatcagcactgtgaagactgtacaagccacacctcagtatgttggctgaccttaaaaacaccttgtcagtacttgatatagacactcgaagtaattctaagttgcatcttacttttcttacttacaataaaatgctgctctctgattatgaagattcatactccttagtacgaatggtaaagaatcatttgttttctcaggtggtcatttcactttcaaaagcatttaagaggcaatttttttaagggtgatatttcaaggtcaacactttccgtgctttctaattcattgtatttgtatcattcttcaaagatccttcatattcattatctttttaagcataagagaattgggctgtcatttttagttctcatatgacacatgaatacactgagagttagattaagtgaactgtctctagagcatacgtctggctatctagaatgtaataactataaagggaggggatctttcttattagggttgtgggaaaggtctgtcactgatgtttctaatgcttagaagagtgcctgacacatagtaggtgtcaataaacattcgttgactcaataaatgaatgaatctaattcgtgacagagctgggtctagaattctctactccctcagccattgctcctttagtgctgacaagagttgttctatgttctcaagcgccccacattcctttgtcttttctggatgcacctgtggttgggtttgtgaggcgaggccagtgagctttcctggtgaggtgccactggcaaccccgcctcatagcgacacaggggagggaagcagggggtctgcggaggttgctcccgagagactaaagctgttgcccccgattttccaaggacgccagtgaggaaggcccgcctgtcccgccgcccgggcactggcctcactttgtcgcgggaggggaccagggctctggagaaggcccgggccagcggctgggcggggctctccgaggctcccacctcgcggtccccgcctggcggccggcggctgcggcagaaggcgaagcggtcgtgctccccctcccggacactgcggcggtggcagcgccagccccgccgcggccgcccacgggctcgcggagtctggcgggacctgcgcggggcgggacctgcgcggggcggggaggaggggccgaggcggagctgctgcgctgggagccggctgggggcgccgctctcagtctggggcgggcgctcgggctgcgcgggctctgggcagcagcagcagcagcagcagcatcctctcttcctttacttcccttccgcttctttctcttccttctccttctttttcccccccctccccttcttcccctaacccttctacccctctcctttttctccggagggcgctaagtccgtgagcggtggcagtcgcgaccgcgggtgc

SEQ ID NO: 25367 - DNA, 2300 bp, Homo sapien
ttttggaatgaattattatcattattattgtaatttttaattttacctgggctttccattttccagcttcattgtttttggtaacccaggaaagtttaacttgtctatacctagaaggtgccttgggagaccgactcaatttgattacccagttttatgcttgcagaaataatgaggccagtaatgataagagtgcctagtatgtaatgatgaagttcaggctcaacaagataggttcacaaaagggcaatcatgcttgatttatctgattgccagactggaaatgaaagaaaagcagtgacataattaccccagattcctcagacctcaaatacaatccagcacagatatttgcaaaagtcttcagaatgattgcaatgcattttaaagagggacatacatcactgctgtagcaaatacaagaaggtttaaaaaatcaaagacaaaggatgtttctggaatctgtattgcttgcaaacagaacaaaagagagcagggaaagaaagtcacttggtgagagaagaaaggcagaggattgaatcaggaaacgctgcgggtgcctgggttttgtgaccttggtcatattctttgggcctcagctttctcacctatgaaacaaaggatgtggactaggctaagtggttccatgaagccagtatttggatagaggcaaggggtagcagaattgatctcatacaaaagaactgtagtttgaatatttatgaaagcaaaattagctagtgattaaaaaatggggcagaaaggtggctcaaggagaatgcaaatttatcttaattcaaaatacagtataaaactgatggaggcgattctttcaagaaggaaaaaaaaaaaaagaaacatatcatctgtctctcaatttccttccctgtagtctcattctctcttctctgccatcatattttttttttcttgactttctgtttccagtaaccatggtgatgcttcttcccagcaaccttcttcacagctggcctttttggttctcatcgaattttgctccattcactggttcaggttgctaacaatgctgtaaaaattaacttatttattgacatttttctccttcccttttccccaggaaataaatgcaggaaattattccacacttaacctccctacacaagggcactgtaaaatagggatattcaactgctaatttcagttgctaacatggaggggatacagattatgccaaagattgaattctctgcctgggccctcagggactgaaaagccccaggaccaagctggttgccacctccttttgcttttgtatgtaaatagattgcccccagaaatcacatatcggccctggttttctaattctctgttttttttttttctttttctcttgtaaggaaaacatggccaagtgcataattataactgttaaaagggtattgaattttctgtaggaaaatatacataaatatatgcatttctttaatgaagatatttattttggaatataaataagcaatatgcgatagttaaaaatattgtaattatctgccaatgacaaaacatcaacaaatctctgatgtccttaatgcagataataaaaattcccataaactagtatttagtcatgtccagtttgtgtagcttaacttgtttgtaatcctatatgcctgaaaactgtttctctatttaagcggtgtgtgtgtgtgcgtgcgtgcgtgcgtgtgtgtgtgtgtgtctggcattaacacaaaggagaccagatgatgacattcataggctgatagactcgactcctggggacacacttggatggaggcaattaaaatgcctgtcaggcatttggtaccagaagcccctatggcaaaccgctaaatcgtaagtgagggctgcatcctattgtcagtgaatgatggcggagctgagtggcttgtcatcattctcgaaaattctgagactagtgagctctctccctctctcccactcgccttattttcctgttcgccactgcggggacttctaatttgcagcttccctttccccggcacacacagacacgagctggtggcttgcagactgcgtctgtctggagctagagagccagagagccagcctgtggggataatgctcccggagaaggattctgcagcagttctcaaaggctagacttgagtggtattgctgcatatgcgctggtaatggtttggggcttttaattttatttcgtttcattttcaattcgtttttcataggatgtgctttatgtaatctcagagtaaagatcttttaaaattcattattgagcttcctaaatattc

SEQ ID NO: 25368 - DNA, 2300 bp, Homo sapien
aaatcttaaatttcaaaaaattaatatttactaaattaatttttgatttttctatcaaaatcatgaattaacatatgtcattgggtcattaattttgtttgaaaataatagctatattgagtgagatataattcacatataaaaattcacccctttaaattaaatagttcagtgatttttagtgtattaacagagttatgcaagcatatccattatctaattttagaaggtttttatcacccccaatggaaacccatcagcagtcactcaatttctgcctcacctctatcctagacaacctctaatctactctctatggatctgtcccttttcctggacatttcatataagtaatacaataggtggtcttttgtagaaggcttctttcacttagcatcgtattttcagtgttcatgcatcattcactgctttttatggaagaataatattccattgaatggatatgccagattttattagttcattaatcagttgacggacatttaagttgctgagtcattgattcttttttaaactgaaaggaaaccctgtggttatttagtccagtatcctcctttaatacatgtgagattgtgtcccaaagtggtattcctagacttacatagttattgtatttcttattattttagatgctgggttggtacaacacatacattcatgtacttttctactcattctttcatatgcgtaatacatacttatggagcactaagtgtttatgatctgaataaacaaaaataattatggttcatgtcctcatgaggttcacagtttaattgggaataagcttttattaaataatcatataaataaacacaaaattagaaccatggcaagagctataaagaagacattggggaactgaccttgtcaaggaggatattttagctgtgatctatggataagcaataattacctaagtaaaaagggtagagaagagcattccaagcagagcaagagcacatgcaaaggccctggctataggagcatggcttataggagaaatgacagaggcaaggtaacaggagaggagagggtaggggaagcatgtgtggaatgaggctggaaagtaaggttaaatgatgccaaatcttccaggacaagggaagggttttactcattttctgaggagtattggaccactgaagtattttaatcctagagataatgcaagcaaaaagaaaatgtgtattgtttttacttttttttttttctcccagggcttagctgtgttaagaaaggcgaaatttgctggatgatacgttatcttttctgccaaaacttgtggtagaattgtggcatttcaagttttcttttatgtgtttaccaaataacttgttatcaaaagtaaaaacttgtattattttcacaggataaacagcctccttattagaattctccaattcaattttgtgaagaactattctttccagttctcctacggaataagcaatcatggctacttaagaagtattataataaatatataaaggccatatgtttccattatacaataaacatgttttagacctataaattctaaaggtacagaaaccattctctaaattccaattagctaatgcctaattctttagcctaagtgcttttgacttgagagccattcctctcaggcactatatgaatgggacccaggaagcttttgtagaaataatataaagcttttgtaaaaaataaaggtcatgcctgcatgggcatgaatccaaagctttcattaaattctacaaagagtctattatacacacaaaaaagttaaaaactagggtttttgagagtggaaaataatctataagttactaggaaaaaatatttggtcactttttatactacttagagaagtttaaaccaatgcagttacaaatgacgccaaatatttaaactaacagctattatataagctaatatcttgaaagcagtattctcttttttaaaaattatagaccttagatcatactcagggattatattgagcacttgtgaggaatgtagattcctggacccactacagacatttggaatcagaatccctggaatagaactcagaactctggatttttaaccaggatcccaggtgattttggtgtcaacacatgtttggaaaggtaacatagtaaataacaacattctttctctgttcagtgttttgaaaaaacaaatttatacaattcattagttataatagtaccatgtaatgcacactgaaaaaatatatatataatataatttacaatttaaagatgaagaaattatggaccaatgaa

SEQ ID NO: 25369 - DNA, 2300 bp, Homo sapien
accaatgtgctatttttcttttcccatacccacttggtcatcatatcctattaattctacctctgcaatattattcaaactcacccccttgtctgtagttctgctattatgatcagggttcaggatctcataaaacatttctctaatcttcatactggggttcctaatacaacttttgcctgtttcaaataatccctacattcctgtcatgtcattcacacttaaatggatatgaagtttctacttctctgcttaaaggccttctaggaaaactttctagcctgtcatacaaagtctccatctgattcctacacataatttctgccttgaccttttgttcataactgaatctgcattcgtatctcccatgattcttttctcttttcatgtctgtcttctcttaatattcagacttccttgtgagcaagagtccatatagctccatagagctatgagtatataaaatacactcaataaatatgccttgagtaaactgtacttagaatctttctttgtttcaagatccatatttgagatcataagatccatatttttgagattcataataaaagataacttcaagaaagtaaatgaagaatttatttctatggcaaaaaatattgatatatactatgctgttaattatatatgaaatattacatctgttgagattaggacctggagtctgattcttcatttcatggattacaccaatatctttgctctaaaagatgaggccaggcatggtggctcatgcctgtaatcccagaactttgagaagccaaggtgaaaggattgcttgagcccaggagtttgagactagcctgggaaacatagtgtgacccccatctctacaaaaataaaaaattagctgggagtagtggtgcacacctgtagtcccaactgttggggagactgagctgagaggatctcttgagcctgggaggtcaaggctgcagtgagtcgtgatcacacgtctgcactccagcctggttgaagagcgagattccgtcaaagaacaagaaagaagaaagaaggagaaggaggagaagaggaggaggaggagaagggggaggaggaggaggaagaaggagaaggaggagggggaggaggaggaattgcaggtagttactattccgattgcttcaccccacctcacccccctccccggcctacttgttttactcctagataatatatctaacagcaatccaactataaaatattaatatatgtaacatataagcatttgactattacaactgaaggaaaatggtagctatcactgggggcgaacaggatcacccaagtgcatttaatggactgtaataaaccacatttcctcacagcatgattcaaatgttcttcctcaatttgcaattaactgatatccacaactggttactttgggaactttgtattcctgctttaggaaaacaaacaaggtttatttcttgtggttatcatataaaaataacttctcatatctaagatctttcaagcttcctctcacttgccaaccttgcctcaccttcctggtttacacttctaataattttcatgtgttcctccggctaacccctggactcctgatctccttgctggaggtgagaatgatgccagggttagcgactgctctgcggttccccaaagctcctcctacccagacggcgacagtttggatgctgaggttggaaagcaggacaggggacactcctgagtgcagctcggagcggggaaagccgaattccgggggctgaagaggccgcgcaggggacgagcgcctgcgatgcggagcgtggacttcttgggccgtacccctgcggctcaagctgccccggattcgcttctccggccgtgcagcccggcgcgggccgctgtccacagtgggaggtgctgaaagcagggagcgggtgcgggggcggcgaggcggaccgctgctccgagcgcccccctcctcgctccgcggctcctccagccctcccctcctcccgcagccatgttccacgcgcggggaggggtggggggaggggagaggcacgggggatcagggcggagagagccggctctgcctcggggaaggaggggatgagagttgggagcagcgggaggaggcggcggcggcggctagcgaggagacagagctgggtcctgcagtaggactcccgggagccaccattatggtgaagaggaagagctccgagggccaggagcaggacggcggccgcggcatccccctgcccatccagaccttcctgtggcggcaaaccaggtgaggggcgcagagggcgcaccgcggg

SEQ ID NO: 25370 - DNA, 2300 bp, Homo sapien
tctagattttgaggccaaaatttgaaaataataattaataaggctatagaaagctggcatctcccccatctttgcacatgtgtatatgattttttatctttgattttaaattgtattacagtatgaataaatgccttcaaagacaaataaaccacatcactccccatgcagaagaccaatttcatgacatgaaacactaaaacataataaacaaacataataaaaagcgtcatgctttagttggaagtataaactggctccgataaccaagatttgtctttctggattcacagaaagcagggtgagttggatcggaagccatttgaggagctgttgttatcacttagttcatcatactttcctccccaggagcaccgaacacttcctatgagggcatccagccagtgttctgcctgtctaatcaatttgacttatgggataattcctctattatctccttctgtttaatgctcattattgatattatatttgcttatttagttcagtaaacacattgtccaagagatataaatatgggaaattttccttgagaaatatccagttccagaagctaaacattttcagatttctctaccattggcctttcagaaactacttaaaatactaagaatatttctcacctttaccagacaaggtcctttccctagccttttttcttccaagaaacagaaggttattctaacgatatttgtcaaactgcccagcaatttcatcatttaatgcctcagcgtatcttagagtattaatctaatcattagctggtagtctccaattattgaaaaggaattcatttcttaaaagttttatatcttttgaagaaattcaggatattcattcagaatttaagtatttaaagtttgatattcttaggcttgcttaaacttcccactgaactcatacagatgatacaaacattttaatatcctctaaagagaagatttgaaattatgccttttttggtgtattttatagaaaacacagaataatttgtacttcaggacctgccaactcagggttttaaagagctttataaatgctgcaataaacatcttcacaaattctttatagaatgacaattaaatacttctttatgcaaaatatattttacctaagtgctttgcaaacttcattttatagctagcagcatttattttgcaataaaaatgagtttgttcaatatctggaaacttgtaaactccctgggaataaaaatacctaatttcaaatctaggacataataaaggaaaaatgaaaaatgtatcaatccatctgactttgcaatacagatggagagattataacaaagttataccaagaagcctattgctaattccaagtttcagtcttttataatcttttttttttctctctcaaaatttccaagaattttttcctgggccttgatttgtcaaaatgatgatataactaaattttcttctgggccacaattaaggacactaatacaatcccaattctcaggaattgccttccctaatctgacttcaatgcctgtgcctggttgtccagagttcttcatccataattaaggtggccctcactcagccaccccttctttcttgatccttatcccttttcccctcaacccagagacttcggtcattgtcccatttcattccactgtatagacattcttttgtctcttttattcagatatagtgtggcatgcatcttcccattgcacacaaagcctttgaggttttctaaacatggattgtcaattctatcacttatctaaatttcaaactttttttttcattaagatcttaaaatctctatcttggtgaaaatactgaactctttctgagaccagcattagaccttagctttgagctttggggtttttcctatggagcagttgttctcaatgtaaacaccctcagacttctcagtctgtctgtgctcacatcttactcagacaagaggggctagcagggttgcctgtcaccagcgagtggggatggttggaaacccttgccttctgaaggcttctgtctcagactaccagtatccatagcttaagctggtacttgtgactttttcacttttcttccttcattgcaggcccagaactgcctcactaagctatacaagctagataagatgcagttccgacaaaccatgagggactatgtgaacaaggactctctcaataatgtagtggacttcttgcatgctttgctaggattttgtatggagccggtcactgacagtaagtaaagctgcacccaagttctaggagaagtcgttgtgaggtgaat

SEQ ID NO: 25371 - DNA, 2300 bp, Homo sapien
gaacttaaatcatgatgagcttataaacccctgggaatcaatgttcttttaaagtgcctctcagaacaaacagaaaagcccaaagctagacagcctgtcttttgaagactctaaaactaacttaaaacttatgtgtgcttcagtaacttgaggatttaataaatgtttccatttctgttgttgttgttgttttgctgtggtgattactgtcattgttacaggcccatgacagccccacagatgagcaggtgtgaccaaggtcataagggaaccaccacagccaatcacaccatgtcgtctggggtgaacaccaggtaattcactgcgccttattcttctatggtctctcaatttcatacaacccgaatgtcagctgttgagaatgaaaggaaccctgaacatagtcaatattgagtgtgaaaacctccaaggaaaagaaaagaaggtgagagtttagagttacaagaaaataccaaggcttcttttgaaattgtcaaagagaaatctaaaccaacttcataaataggcatttgtgttgttttgtttgcttgagcattctagatgttctctgcctcctgggtggtctttgaactattccagtgttgtttcatttaccttcaacaaaaggcaaataaacaataataatcaggaggtggtttatcattcccagggcactcagagtcaacttactttcatctggacagattttctgcagacatttcatccaaactttgacatatgccctcaaatggtgcttttcatggttgttaacttaatctccttctcttgttgtggtgtaactcagatactggctatactagttaatattttacccgtttcattccatctgtgttagctttaaatattccgacatacacaaaaagcctaattagcttcctcctacaaggaagatttaagatagggcaaacccaaaatcagcttaagaaaaagttcttttcccagtatggaatagttggcctggaaatcataaggagaaattcaataatttttcactctctctgaagcctatttttaagtgtgtatcattattcatgtaaagttaattccctgctcatcatatatattcatattaaaaataaaacaaaaataaattccaaacccagctataaattgcctggtgtgatggttaacttatgcctcaatttcctatattaagggaaaatgatatactatagcttaagtgatatttagggacttctctaggctcactggattaaatgagggcttctaaagaagaaagagggcttctaaagtcttagtatccatgaatcataaagcaataagtctccagaactgaaaggaagtcagccatgattctccttcctgtcacttaagacagagcacatggtattaaaactataacttaaatttcaaaatgtccaaaaatttctctcatttggctatattctatgagtttgtatatatttttataatagtcgtctttacccaaatcacgcaacaataaaacaacttttgcagcagctataattgcaatatatgtgttagccaaatgaaagataaagcctttatgttttaggagtaatatatgtatatttgtgagcttatcaaaatgtatagcttcaagggcttttcatatgaaagtcgataagaagccccaaccaaaggaccccgttcttgctctaatagttatgtagactgtttttctgactcccaggtaccaggaacaaggagccaaactgcactttatcaggtacagaaagacttgctctaatttcataccagttctgacatcttgagatgattgccttttaagctggtttatggctctattagatttcatttgatgcataacatactatttctgggtaaacccccaaaagtgggtttactacagtttgggatgacagtctcttctaggctgctaagctttctttatccttcggatgaggttctccttggcctcaccctactgattcattaactcattaggaatcttatatttttcttcagtgtgataccctcttctcacagctgctacatgaatacattttcagacccctagttaatctttcacaatttcccagggaaaaccttcatttactggaggaagggcaaggcattcccagagaggaactggatgaacgaattgctcgggaagagttcagaagaccccgggagtccttactgaatatttgcactgagttctataagcactgtgggccacggctgaagatcttgcaaaatctggctggggagcctcgggtcattgccttggaactgctggatgtgaagtctcacatgaggtactggcctcgctt

SEQ ID NO: 25372 - DNA, 2300 bp, Homo sapien
ccaccagactcaggagcccagctggcttcacccagtggatcccatactggggcggcaggtggagctacctgccagtcccctactgtgcgccggcactcctcagcccttgggcggtcgatgggactgggtgctgtggagcagggggcggcgctcctcagggacgctgggcgcgcaggagcccacggcatggaggggaggctcaggcatggtgggctgcaggtcccgagccctgccccgtagagggaggcagctaaggcctggcaagaaatccagcacagcagctgctggcccaggtgctaagcccctcactgcccggggccagcaggccagccggcccacccaagtgcggggccgcagagcccacgcccacctcgaactcgcgctggcccacaagtgccttgcagtcccagttcccgcctgtgcctctccctgcatacctccccacaagctgagggagccagctccggccttggccagcccagacggactcccacagtgcagcggtgggctgaaaggctcctcaagcgcggccagagtgggtgccaaggccaagaaggcaccgagagtgagcgagggctgccagcacgctgtcacctctcagtccaagttaccacttccgtcttttacacagagtacaagtgctctattctgaccccttaaggattgctcttgctaagtccatttatccccgccaagtggttttacttctgtctcttttcctgaccctaggcacatttagcatcaggatactcatccatttctgaactgtgtgtgaacagcacacaaacctatcacaatttgtgaatgagcattggagaggtgtaggggccaagggaaaactttcccttcaccctccaaaggtttgctgaaaatcactgacagaaagaagattaacaggagaaaaggcataaaaacttatttgattatagttttacctgacacaggagccttcagaatgaagacccaaaggtacaggggtgattacccatttttatacttaggttcaacaaagtatagacagccatgtagaaatacgattggacaaaataggcgatctaatgctaatagactgacctggccttggccagtctagtttagattcctggcctctctgtgcagcattccctcctcctggatatgggatagaaccttctctagaagaggagttttataacctacagttgagatgggtcaaataatttatggccagtttttacacagaaaggtggaggaaagttagagtaatgcttttgggttttgtgtctggcttcagggaaagggggttccggtttcaatgactcttcttagggaagatgggctccagtttctatgacctgcctcctagaatgagactgagaagagagcagggcaggaagtcagagaaacactgttgcgtctgaggccttcactttgggctatcattttctgagcctcaacagagggaaaaacaaaaaaggtaaggaggaactgcaaaggcagaaaaagagggtaatataataataactaccattttgtactgagcaccaggcatcctgctgggcgcattacctggcttcactcatttaatacaaccctaaagctgggcactgtctttacagatgagaaaaccgaagttaagaagtgatttgccaggtcacccagctagtatctggcagagccagggttcctccagctcaaaagaagagctctaggagaaatacgaggaagaaaggtttttaattgttgttttaaagggccagcataggcgctggagaggaaagaaaggcatatgcaaagggtggagaaacaaaaagtgatgttaagtcaagagccgaggagagggaactgcaggagaagcaaagtgaaaaaaggttaagaaacgccttgagtactgcgaggacgttaagatccaaacagcacaagaaggaaggtcaaaatcaggtgtacgaggcccgtgtgccccgccccgccccaggcggacggctgacagcgccccaccccaggaggaggcgggacttcctcaccgcagagtggctgcttccggtagaatccggaagcctgtacggagaaggggcggggccaaaactgcgcgcccaatcggggtgacgctctagccttgccggggactcgtgggtaacttgcttttgggagccagcggtatggcgtcgggctgcaagattggcccgtccatcctcaacagcgacctggccaatttaggggccgagtgcctccggatgctagactctggggccgattatctgcacctggacgtaatggacgggtaactcctccgggctccggtcgggcttgccgcgcggcgg

SEQ ID NO: 25373 - DNA, 2300 bp, Homo sapien
aattcctaaatcttaataaaaactgagaaataaagttgtgatactatataacacttaaggcacgagtaatttttttttcaccgtttcccctccatggctatgaaggaactgggagaaggatgctcctttcattaattaaaattcttcactttgaaaatttaagtttattagggaaggaaggaagaaaaatatgaagatgtaagtatacataccttggagtaagtatttccttatattggagtttctctaatttagctggggctactaatgacatgggaatcacaatgttatctatgtcataagagctctcacttctcaatctccgtcgtgcagtattctgcaaaacaggattacagtagatttacagtactgtctagttacttgtaatgataccctcctttcatcagttatgtaaatatggcagtacacgttacataatttttgtaaatacattgttataaagtctgactaaaaaatgttaagaaaaccaaaaaataaaacatttttctatcttttgtaaatcagaacaatctcttggtagatgtgtaatgtgtatttatgtgtgcaagcatacaagcttatttttaagaccacaaaaaataggtcttaaatgcaaaactctttatcagaaaagaccaacatacatcaccctaaatgtcaatgaaaatgatcagtaaccactttttattaggaaaggcagtgaaacatttttggtcagcccttcagtatactcttcatttatgcattcctggttcctgagtttcggaattcatttctaaaccctcccaccttttgacctctctattccctggccagataacaaaaaaacaaacaaacaaacaaaaaacaggacaagaacaagaaagtcctgaattctcattagtaagactttatttagcttaatatgttaaggaatagagatgatcatgataatgtttaaatttttaacacataaaaagaagctataaccaaatattaatgaacttttagcttcatagttaaaaataagttgtatgaatcaaatatattgttttctaacaagatagttataaatgtctgttaatatgtgctagtaaggctgttatagattagcaaaatataaattattttcaaaatcaggtgtttttatttttaaagctattttagagttcaacatatggaaaaacctactcgtgatgaattctggattcttgataaaacgttgacattggaaacagcagtaaaattgctatgggatcctgattctgtgtgttgaaaatcagattcttcaagtttagttctttctcctgccatggaaagaaccattgaatgttacacattaaacaagtctaatatcattagaattactttcctaattagatgacaggtgattgattccttgttttgtgtgtgtgtgtttaaattcgtgtattagaaaacaaaaaaggaaatgaaaaaagaggagccttacttgcagtcatgccacaagttatttccattttctggggctttggcagtttttatcgaatatatttcttattgttccctgaataatccctcatctcatccctttattcttgtttcctgtgactcctattcatagttgaaccaccagaactatcttaattttcttatctaatctcatttttcatatctgactttttatcctaatttatgtgaggtatctgtccttggtcttctgaacactcttaattttttgaaaaaattctgctattataagtacatgtttccgaaagtacttgttctctggtactctttttttaaaacagcatcctgttcttgtttcatagatgaaatttctcatatctctcaggatattgattagaagtttacttctgttagtattttctgtatatcttccaagttctttttttttttttttcctgttttggttcccagttactgtgtgtgtgtgtgtgtgtagtaaatatatatatgtatgcgtttacttactgcccttattttagtacaagtgttttaaaatgagaatatttcctgcataatataaaatctaatacccagtccatatttaaatatctccatttgttaaaaaaaagtcctttatagctagtttcttcagataaggatctatatataaaaattggccattgtctcctaggtttcttatagtctagaataaatcatttttcattacattgacttttgacaggctggaccagatgtcctacccttttggaattgtctagttatttatttgtagtatgacatttctttattttattcctgtatgtacatcaaacttgaagttagatctaaagtgtcagtcaatttaagtgaaa

SEQ ID NO: 25374 - DNA, 2300 bp, Homo sapien
aattgttaatgacataaaattattttacaaactattcagccttcataatgtttaagggtactgggttgcctttttctgcgaatcaatatatggatttatacttttgataatatgcaatgaaatttgtttaattatgggataaatctttagcggttatctgacactgtctccgctattttctaggcaggagtaaatgcatattctgatgcatattcatttgtgaaaagggtaaaattgcagatacgtttagaggagacattgcattaggcaagtttttactatcacatatttttaacagctgtgaagttatatgtttttagttctgttcacttaggtcatctttttcttttctttgagacagagtcttactctgtcatgcaggctggagtgcattggcgtgatctctgcttactgcaacctctgcctcctgggttgaagtgattctcctgcctcagcctcctaagtagctgggattacagttgcccaccaccatgcccggctaatttttatatttttagtagagacagagtttcaccatgttggccatgctgatctcgaactcctgatctcaggtgatccgcctacctcggcaccccaaagtactgggattacaggtgtgagccaccacgtccggcctcacttaggtcttcttacacattatttattatattttagttcttgttattaataccgttcaggctgtgatgattaatttcaggaatagaagtttagataaatttattatattttataaagataagcaattcttatttttggctgaaagtacacaattgagtcacattttctattgttattaccagattataggctggatttttttttttcttttgactgtaattaaatgttgtcaaaaaatagaattctgagatgtaattacatccacaaatatttgttgaacacctattatgtgctagcaatgtgtagctttaattggggttttagctattaggcccccagtcagagggaagaatagcttaatctttgttgaaataatgttgggagttgggagatgaaggaggagttttgttccttcatgttctaatcagaaacattgaacatgttgcccttagaaaaaagtataagcataaaatttttttctagatatttgaccatttatttttacattattgtaggtttccaatacttatctacaggaatcgccatgaccccagctctgagggaggcaacagcaaagggtatcagcttttcatctttgccaagtaccatggagtctgacaagatgctctacatggaaagtcccagaactgtagatgaaaagctaaagggagacaccttttctcagatgcttggatttccaactcctgaacctactcttaatactaattttgtgaatttaaaacattttggctcccctcagtcttcaaaacattaccagactgtttttttaatgagatctaattctacattaaataaacacaatgagaattataaacaaaagaaattaggggagcccagttgcaataagctgaaaaacatactgtataatggcagcaacattcagctcagtaaaatctgtctttctcattctgaagagttcatcaaaaaggagcctctatcagataccacgagccagtgcatgaaagatgtacaaattattctggattcaaatataaccaaagacactaatgtagataaagtacaactacaaaactgtaaatggtatcaagagaatgcacttttggataaagttactgatgctgagattaaaaagggtttattgcactgtactcaaaagaaaattgtacctggccactcaaatgtgcctgttagttcttcagctgctgaaaaagaggaggaagtacatgctcgtttacttcattgtgtaagcaaacagaaaattttacttagccaggctagaagaactcagaaacatttgcagatgctcctggcaaagcatgttgttaagcactatggtcagcagatgaaattgtctatgaaacatcaactccccaaaatgaagacatttcatgaacctaccacaattttgggtaatagtttacctaaatgcactgaaattaagccagaagttaacacattgactgcagagaataaattgtgggatgatgcaaaaaatggctttgcacggtgtacagctgcggaaatccaaagatttgcattttctgctacagggctgttgtctcatgttgaagagggtttggattccgatgcaactgatagcagctctgatgacgatttggatgaatatacccttagaaaaaatgtggcagtgtaagtgcaaaattattattagactattt

SEQ ID NO: 25375 - DNA, 2300 bp, Homo sapien
gatgttttcagaaaaaaaaaatttttatcagtttggtgattggaaaactaggctcttgttttgttaatctatattcctctcattactagtatgattaagtctgtgtttaatgaccatttggatgtcatcatctgtgaagtacctgactgctctatcttttgctcatttgtaggaattcctcctatagtctagataactaatatttgtctgatatatatgttgcaaatattttctcctagtctgtcattttgctagtaaccgtttttttaattacatagaaattgttgtgcttttattttcttcttgatcatttttgttggactttgtaaagaatcagcttttggttttgtgtttttaagtaggaataaaggaagtagagttataactagcacctggggacatacactatgagagtgtgccatttaaatgactatcaactattatgtgttgaaacaaaaattttggcatatcaggttacaaaatactaggtatctttaaaagcttataattgttaatgacataaaattattttacaaactattcagccttcataatgtttaagggtactgggttgcctttttctgcgaatcaatatatggatttatacttttgataatatgcaatgaaatttgtttaattatgggataaatctttagcggttatctgacactgtctccgctattttctaggcaggagtaaatgcatattctgatgcatattcatttgtgaaaagggtaaaattgcagatacgtttagaggagacattgcattaggcaagtttttactatcacatatttttaacagctgtgaagttatatgtttttagttctgttcacttaggtcatctttttcttttctttgagacagagtcttactctgtcatgcaggctggagtgcattggcgtgatctctgcttactgcaacctctgcctcctgggttgaagtgattctcctgcctcagcctcctaagtagctgggattacagttgcccaccaccatgcccggctaatttttatatttttagtagagacagagtttcaccatgttggccatgctgatctcgaactcctgatctcaggtgatccgcctacctcggcaccccaaagtactgggattacaggtgtgagccaccacgtccggcctcacttaggtcttcttacacattatttattatattttagttcttgttattaataccgttcaggctgtgatgattaatttcaggaatagaagtttagataaatttattatattttataaagataagcaattcttatttttggctgaaagtacacaattgagtcacattttctattgttattaccagattataggctggatttttttttttcttttgactgtaattaaatgttgtcaaaaaatagaattctgagatgtaattacatccacaaatatttgttgaacacctattatgtgctagcaatgtgtagctttaattggggttttagctattaggcccccagtcagagggaagaatagcttaatctttgttgaaataatgttgggagttgggagatgaaggaggagttttgttccttcatgttctaatcagaaacattgaacatgttgcccttagaaaaaagtataagcataaaatttttttctagatatttgaccatttatttttacattattgtaggtttccaatacttatctacaggaatcgccatgaccccagctctgagggaggcaacagcaaagggtatcagcttttcatctttgccaagtaccatggagtctgacaagatgctctacatggaaagtcccagaactgtagatgaaaagctaaagggagacaccttttctcagatgcttggatttccaactcctgaacctactcttaatactaattttgtgaatttaaaacattttggctcccctcagtcttcaaaacattaccagactgtttttttaatgagatctaattctacattaaataaacacaatgagaattataaacaaaagaaattaggggagcccagttgcaataagctgaaaaacatactgtataatggcagcaacattcagctcagtaaaatctgtctttctcattctgaagagttcatcaaaaaggagcctctatcagataccacgagccagtgcatgaaagatgtacaaattattctggattcaaatataaccaaagacactaatgtagataaagtacaactacaaaactgtaaatggtatcaagagaatgcacttttggataaagttactgatgctgagattaaaaagggtttattgcactgtactcaaaagaaaattgtacctggcca

SEQ ID NO: 25376 - DNA, 2300 bp, Homo sapien
ttgttatatttagcttttccgtatctttatccagagactaagatgaattttcctgccttgtgatatttcaccttctgtctctgctgctcgctagtttggttatattcatagtacgctgttcagatttttgagagggacaggtgtgtggtgtgggagataaagtttagtatcttttgaggagtgctgtaacatcaacaagaagcgtgattaaagcagtttccctcagagaacaatgtagacactaaatactattgtgggtgtttattgattagaagacataggtctttgagttggtcaagtaacaacttgaatcttggaagaaatttcctaatgctagcttgttttagaattgtttttctatttccataaaagagtataaactgaaaaaaaccatcttttttttctttttttttttgcatttaggataaatgggaatctatttgcttatttttgaggcattatataaaagtgtataaattttgagacatacagaaactcatatagaaattacattttgagacattatacaataaagtgtatacataaaaaggcaaacatctataatttttttcactcagtattaaccattaacatttattcattttgcatttagtcttttcccctcaagtaataagattttgtagttaaaatgcaaatccccttgaactatcacttttagttctgtttcatggaacttaacttgatgcaactactagtacaagtttggtaggtatttttctggttcactttttattcttgcaaacagacacaaatgtatacgtatatatggtatggttttgtgtttgtgttatatttatatggtactatactatatatatattttacagtgttcttttttatttttaacttgatactgtttttaaggtctttctgtattgatactttaagtcattcctttttaatggcaatatagtattccatcacattttattctctgttttgttattgttagacatctagattgttttgaaaggatgttttgccattatgaacattaccctttggtaaaaatgtgtttgacaaacacattttctacattgtggtcaaattactgaaccaatttatgatcccaatagatatgagaagtcttacatctcatgatatgtatgtgatgttttcagaaaaaaaaaatttttatcagtttggtgattggaaaactaggctcttgttttgttaatctatattcctctcattactagtatgattaagtctgtgtttaatgaccatttggatgtcatcatctgtgaagtacctgactgctctatcttttgctcatttgtaggaattcctcctatagtctagataactaatatttgtctgatatatatgttgcaaatattttctcctagtctgtcattttgctagtaaccgtttttttaattacatagaaattgttgtgcttttattttcttcttgatcatttttgttggactttgtaaagaatcagcttttggttttgtgtttttaagtaggaataaaggaagtagagttataactagcacctggggacatacactatgagagtgtgccatttaaatgactatcaactattatgtgttgaaacaaaaattttggcatatcaggttacaaaatactaggtatctttaaaagcttataattgttaatgacataaaattattttacaaactattcagccttcataatgtttaagggtactgggttgcctttttctgcgaatcaatatatggatttatacttttgataatatgcaatgaaatttgtttaattatgggataaatctttagcggttatctgacactgtctccgctattttctaggcaggagtaaatgcatattctgatgcatattcatttgtgaaaagggtaaaattgcagatacgtttagaggagacattgcattaggcaagtttttactatcacatatttttaacagctgtgaagttatatgtttttagttctgttcacttaggtcatctttttcttttctttgagacagagtcttactctgtcatgcaggctggagtgcattggcgtgatctctgcttactgcaacctctgcctcctgggttgaagtgattctcctgcctcagcctcctaagtagctgggattacagttgcccaccaccatgcccggctaatttttatatttttagtagagacagagtttcaccatgttggccatgctgatctcgaactcctgatctcaggtgatccgcctacctcggcaccccaaagtactgggattacaggtgtgagccaccacgtccggcctcacttaggtcttcttacacattattt

SEQ ID NO: 25377 - DNA, 2300 bp, Homo sapien
ttcatttttgcatttctgtccccagggactaggacagtcctttgaatatggtaaatatccaataaatacttactgatttaattatttttcacaacacatcattagcttacaatttttattacaatgaaagtaaatcaatttcctaaaattcttcccttgccccatatcgaggtgcaattattcagtaattaaaaaaatatagctccaataaatgcagctggtcataaaaattatttcagtaatatcacaatctactagaagaaccaggaacgagtagctaattttccaattccagttatctatgttacggattacgctttgttatgactgcaattccttggatttctcccctcttccgcccccgggatcttatccaattgataaggttaaaataatggctattatccttctggcttaaaaagcctagtgctcttcgttccttaaatcatttcatgtgtaaattcggtgcttaggaaagactgtgatacaacatctaagaagctacatttagagttcagttttaaaaaaatcgagttcttggctggggaagtgcccaggtgcaggtttgttttgtggtgagcggttcgcggggccaggtgcaagacgctcagaagtgtttttgggtgtcgctggccaactatctccacataaactccgtttgtttatttgacagcgttactgcagaggggagttaggtccagcgccactcaaaccagatttgtagagacttaaaactgctttgtctgtttttttttttttaatcataaaaccacccagttggatccaaggcaaatttgtcacctacttcagggcccctctgagggtcagaaagaattatgagcgcatttgaacgcacggcccaaataaaagcaaacgcacggagacttgcggacttgacaattgtgagaaatctcttaaaactcgcctgtggagcggcgggcgaaagccgcggacgccagcagtagtcgaggccccggcgcggacggcagggaatgaagtcgcctgacttttcctcagggttttgtttttctgtcacggaggtacaaaaatagcaaagcaggggtgggaagtctcctggccgtgtttttttttttccccctcgccagggatggcactgggaaagagaagggaggaagcaggagctgcacggaacccgtcccgagggagccgaggtaaaccctgcaccagagttaagggagtcgtgctcctgccacttccagaacactccgagccgcttctgcaggccccgccccctgccggggtttccccgccacccgcttcatttgcatggcgctgcccctcccccgttgccattggctagcgccgggccccgcccactgctcccagaccgcggcagggttccgtccccccgagccgcacggagctgcgggcagcgggcggactgttaaaccgcggcggcggcggcggcggcggcggcggcggcggcggcggcggcggccggggcgggagcggggcgcgctctggagacgagtcagcggcgccccgggtgggggaggcgggcgggcagctagagatcacctcagcagcccccaccacggccggaccgaaggtgcggcggcggaggggagccagggcgccccagcaggcgagtggccggcgtctcagcggcgggatgacgggggtgggtcttccctcttggggacggcggcagcgcggggaggggagaagactgccgggtggacttgcgggtcaggcgaccgaccggcagccccttcgccccccgaatcctctgggctgctggactctggtctcggcacgggatcgcgctctagggcgggggtctgaccgcagccaaatttaaacggctaaacctaacagccttggcagctggggagggaaggggtctagggaggggtgggggcggacctggacgccggtcacgtggggggtggggcttggcagacctcccttttgttttggctggcgcgtgcgcagaaggcagaacacgtggtttcctggacccgcctcttgcctcatcggctgagcctcacccattgggggtgtggtgacggctcttttgaggcggctctgaggcggagcccactggatttgatgagacccctattttatttatttcacactttctttcaggaaaacgtagatttgggctttagagttagatgggatagagcagaatctaggggatttttgagggacggtgcttccaagtttgtgtcaccggtgtgctgaggaagggaccggtcttgctggaaaaagtcagattgcgtggtgtttggtagcaagaaataccaggcggtatcctggccgtttcagaaacc

SEQ ID NO: 25378 - DNA, 2300 bp, Homo sapien
ccagctactcgggaggctgaggcaggagaatggcatgaacccgggaggcggagcttgcagtgaggcgagatcgcaccactgcactccagcctgggagacagtgtgagactccgtctcaaaaaaaaaaaaaaaattaatctagagtattggaaacagcctacctcccacggctatgtgatgaacaaattacataatatatgtagaaatgctgtatgaatcactatttgtgtagttacaaagcttaatccctttgtcatcctctataaactccatgaggacagggaatttgtttactaatatatcttcattagccatcacaaaacatgtgttcaataaacatttggcaaatatataaatattttgtttggtagcaaaaaattatttcacaggagaaaactaccattaaatgatttgatgtctctacagttccttcaggttaaaatctgaattcctgtcattcaagatttactcaatctagttgacaatgtacttttctgccccccaaatattcacacaacatctcctcaaaccacccaaggacactatctcctgaactattgatgccttcctcctctctcttaagtcttttaaacgtccaactcaaatccagaatcttcctttgatctatcttaacacatgcttattagatgtctcaaactgctaattaaaaaaacaaaactttaaaaaatactttattcatttttgcatttctgtccccagggactaggacagtcctttgaatatggtaaatatccaataaatacttactgatttaattatttttcacaacacatcattagcttacaatttttattacaatgaaagtaaatcaatttcctaaaattcttcccttgccccatatcgaggtgcaattattcagtaattaaaaaaatatagctccaataaatgcagctggtcataaaaattatttcagtaatatcacaatctactagaagaaccaggaacgagtagctaattttccaattccagttatctatgttacggattacgctttgttatgactgcaattccttggatttctcccctcttccgcccccgggatcttatccaattgataaggttaaaataatggctattatccttctggcttaaaaagcctagtgctcttcgttccttaaatcatttcatgtgtaaattcggtgcttaggaaagactgtgatacaacatctaagaagctacatttagagttcagttttaaaaaaatcgagttcttggctggggaagtgcccaggtgcaggtttgttttgtggtgagcggttcgcggggccaggtgcaagacgctcagaagtgtttttgggtgtcgctggccaactatctccacataaactccgtttgtttatttgacagcgttactgcagaggggagttaggtccagcgccactcaaaccagatttgtagagacttaaaactgctttgtctgtttttttttttttaatcataaaaccacccagttggatccaaggcaaatttgtcacctacttcagggcccctctgagggtcagaaagaattatgagcgcatttgaacgcacggcccaaataaaagcaaacgcacggagacttgcggacttgacaattgtgagaaatctcttaaaactcgcctgtggagcggcgggcgaaagccgcggacgccagcagtagtcgaggccccggcgcggacggcagggaatgaagtcgcctgacttttcctcagggttttgtttttctgtcacggaggtacaaaaatagcaaagcaggggtgggaagtctcctggccgtgtttttttttttccccctcgccagggatggcactgggaaagagaagggaggaagcaggagctgcacggaacccgtcccgagggagccgaggtaaaccctgcaccagagttaagggagtcgtgctcctgccacttccagaacactccgagccgcttctgcaggccccgccccctgccggggtttccccgccacccgcttcatttgcatggcgctgcccctcccccgttgccattggctagcgccgggccccgcccactgctcccagaccgcggcagggttccgtccccccgagccgcacggagctgcgggcagcgggcggactgttaaaccgcggcggcggcggcggcggcggcggcggcggcggcggcggcggcggccggggcgggagcggggcgcgctctggagacgagtcagcggcgccccgggtgggggaggcgggcgggcagctagagatcacctcagcagcccccaccacggccggaccgaaggtgcggcggcggaggggagccagggcgccccagca

SEQ ID NO: 25379 - DNA, 2300 bp, Homo sapien
taattctgtattatgcaagcaaaatggtttagcaatcatccttgtgacattgtccaagatctatattacagaattacagatgcttagatttctttagtctaagactgtaatgcactaaaacttatgcaacacttctatatttgattagataagttttgctttgcaccaggggaaataaataaatactttttctaatgagctctgtatacaatgactataaaaaaaaaaaaaaggagagccctagaagataaattttataacttttcttttactttgagcagtttttccttataaatgtgtatgattaatattttggtcatattatattataggtatggctcatagagaagcaatttagaagcagattagggtttgaagttggaagcttaaacaaatccattcttaatcctgacaataaagtttactgtcaaaattgttggttacagatacttaaattgctatttatttttttaaagaaaatgttccaaaacataaaacagtaactagttttgagaccattgtcctctataagggaaaagaaaatatttcagacacatttaacagatgccaatttcagtttctcaattatgtcatcaaggtattcttcaaaccaaatataaaaatatatatataatttctaatcactcactttttatacatttataaacaggcagatacagatacagatacagacacaggcagttatttgggttaaagaagctggcattttcatggggtttagaaaggaccgtgtagtccatgacatttactaccaggtatcagaggaaaagcataagcagttccttttcttgaacatttgccttctaattgaataggcattggaatacacaaagtagagggtttttttaaaggatttgttctttcttttatctactacaaaatatgagtatttctcaatgatgacaataataattaccatttatcgaatgtttattgtattcctgtctttgtgccaaccacctgacctccgttatctgaaaaatctttccaacaaccctatgacatagatattgttattcttcatttacaggtgagtaaatggaggtttacatttgtatggaacatgttctgctacttgagataatgggaataggagcctaggagggctaaaagcaaggagccagcaagtctagacacattccagaggacattatgtcagtcatgcaagccctgcctcagctttcttcccaaccctcagccttttttcccaacagtatataaataatgtggtgttcctttcaatacaggtgtctctaatgctagtttgttccattcttggtgaagttaatttgaatcacatttggttagcatgtttatcagtttttttctactgagtttccttttgtgaagtaagaacaaatatgtttatgaatgtagagttagctgtgctaaaattaaatgaaaagtcaagcaaactacccagatagtttaagccaatcacccaggatttcatgaaccctttgagccatttatgtttcccttgagggatatttcacatcttttacctgagagttctacagggcatgcttttattagttgaaatgtcactgagggcgagagtaattgttcaacggatgtacttgaacttggacatttaagaattaacagaacgggctgggcgcagtggctcacgcctgtaatcccagcactttgggaggccgaggcgggaggatcacgaggtcaggagaccgagacctttctggctaacacggtgaaatcctgtctctactaaatcctgtgtcggattaattcgttctacttgctattaccaataaatagcatgggctcccagagctatgcctggctaactctatcaccttcaagggtttgctcaaactattcagcctactttaagtaaatcaatttccaaggttacaaaataaacttcacgtacatttttatggttaggtatttgcgcgtatttgggggctccatagctttcatccgttactcaaagcgcttcaggacgctaaaaaggctcagagctgcttcgataaacaagaaagaatgctgcaagcaaaggcagcagtttcgctgtaaaatcctattgctgacagccaagacgggcgtattccctcgcgaccagcctgtggcgtggttggggctccggaagggcgcgcgcgagcgcttttttgggaggacaccacaggtggacgcctcagctgatcgtcctccctcccggggaccctgccccgagtcgccgagtagccgcagagtcgcctccgtcgccccgccgcccctgtgtttcggacatggccgcacgccttctccgagggtcc

SEQ ID NO: 25380 - DNA, 2300 bp, Homo sapien
ataaattaaccatattttatatctaggcaaggacacttttttacctgaaaaaaattattaaatatgaaaataattatgtttagtagggcaattttgatggttaattttgtattatttatagttattagctcaactaatgatatatgctagttctcaataatcataagatgattcaaatttaataacataattacataaatataattacaaaactaaaaaagaacacaaagataacatggtaggctctgatgctttcatttatgtcaaaaattataagattccaaatcttgtaatattcaaagttacacatttccacctttgtctttcccttccatttcccccaatgattcaaagcattttttatttttctattaaatttcatttcccaataacctttcaaaatgtcaagctatttacgaaaatgtttacctgtgtactaataattttaaaattgtattttcaatcttcattttggaactcaagattctatgagatattttttcctacttataaacttagagccaaaagtgatatgcatattaaatgctgatttcttctgaaatggtttcaggagaagttacaaagtatatgtctttctagaagggaagacttcatgttttttgtgaccatccccctaaaaacagttgctgaagcagtactcaagttacaattaatctccaatatacattatgcctgtgagctgctttaaacatgtagaaaactgataaatattttgtgtgaactttagtggacatcctaggaggatcttttcctgtaccacttttcccagtaccatttccagaagggagttgcccgctattttcaggtaagctaccatgaaaacccattgctggccaatcccctagatacctttaaaattctaaaatacagttttggttggacaaggtgactcatgcctgtaatctcaacaatgggcaggatgatggcttgaggccaagagtccaaactagcctgggcaacataacgagaccctgtatctacaaaaagtcaaaataaaaattagtcaggtgcagtggcacatgcctgcagtcctacctactcaggagtctggggtgggaagatcacttgagcccaggagttcaaggctgcagtgagctgtgattgtgccattgcactccagccagggtgacagagcaagactctgtctcaaaaataataaaataaaataaagtacaattttgtattccacaagctctgccatgcattcttttggcttcttggtctagggactgagccatagagtgtttgccaaggcagaagtagaaatagaaacagcatgatctagtaagaacttatgtgtagttaaaaaaaatgtataggatgagagtaaaagaatgtaaaaatgatctatcagctttcctgcctagaaaaacttctgaaaataaaaaaaatgactactcagccattataaagataacaaggagggaagaaaataaccagacctaacgtaaggagactaaaggagaatgatgaaaagcggagatcaaaactattcctggcttagattatgcttgcaaaagagtgatctttaattggagattgaaagacctgaccagattgtcacttgggtgcgctctaagaaacatgcagaatgtgcatggccttttcaagtcctctgaactttaccataaaggacagtacacttcagaggatgctcctgctatagcagttgccatttgaaaccccaaaccagtcccatccaaaaacttgcattaataccaaaacttgctgactagaagtttgtaaagtccactgtcatcaagagaagggtctggcccaagaccttaaagaaattctaagctcttctgccatcaaacaaataggaagcttcttaaaggaagatgctccaagagaacatcttggaaataaagaccataaaagtaccggcaggcttccatctcactatggctgtctactccaaggttctggtcatctaaaaatagctctcagggtacagatccatctttccctttgccctaagaaagctaaagaactctccaaggggtgtggcaacttatctctgaaacctgatgctagctgtgaggtcaaagcttgcccagaaataaaaggaagcctcagccagggatgaccccactcagggaccggagcagccctcaactcactcttcagcttccctgctgtgttgcagcccagccgctccatcatggtgggtcctatgagacaataatttgtcatttataggagaaaatagatagaggatatgatcttattgagaagaaagataggcaaaaatggaactgaggagagaacatattcaa

SEQ ID NO: 25381 - DNA, 2300 bp, Homo sapien
ccttcatgttatgaaataaagtgttcctatttcaattcggggtatttgagtttttaaaaccaagatcattggtgacattagtaatgtaaaacatatgttgagtgagtggataaaacatatggattaatatattttatattgttttaatttattttccaaatgcaaggaagacaaaaatatttttgcccagaacacataaatctcctttatctgtttaaccttgtcacagattttaagggatttgtgcacatgaaacaaagtattgataaaaactatgagttaaagcaagatatatctatctctcagtaattgcagaaaatcccaatctatctttgaatgatccaaaggaaaactggtgaacaaatttctgctatttatgaaggtatttctgttataaacatagcattattttaaaaatctatcctgattatttaaatatgagacagtattctaggtaaaatatgttcagattcttctgactgtcctgtatgtaaaaaatgagtatcagcagctaaatttagataatgattgagtccttgatatggggaaacaaaggagggagctatcaaaatgtttttcctgtaatatacatggataatataattcagtagatcgtgccaccatgtgaaaaaggagactgattaactgtgggtcaattgtaacttaggtgaattatttctgatctgagagtcttaatcttgcttagttgtaatatatggacagaaatagtgaccttctccaagttggtgaatgcttttatatcagacccaagaaagtggctaattaatctgtatctttaaacacaactatatttaacaattagaatatgtgtgtatttacacatacatttgtacacatgtatggatgtatatatacacacatacagtaaatgtatatatgtatatatacacatacagtaaacatatgtgtgtttgtatatatatcctttatatatataaaatgtataaatgtgctcttttaaaacccaaactatttttttaaactggttaataactactcattaattaaatatctcacaagttaaaacaacagagatgagagtgggactgagaaataactgattactaattgtaaccccctctctggcagaatttaccacatacaaagttataaagtgcccattggtggtcttaaatttctcgatatgagtctagccttgcaaactgaggaaaccaaggacagaaaaggaaaaactttcaagttaccacaacttgcacagtgttgataattaaagttcttctctctctttatgtctctaaaaatgtattttgtctctctagtatggacaaaagatttatgtgataaataattagactttacaccatttagaaaataaatatctataagtatctacttttcttggaagctactttactattagaaaagttgttttgcaagaaggtaaatcttgctgtcatttccatccatttgatatgcttcattaaattatacaaagaaaattaaattataggaagtcatgttgaagttttttggcatagaattcactacaattaaaggagagaaagagtgccagagtctgtgctccctagaagggaagccactttaagacatgatgggctttccttatacgtctgcttttttatttttaaccaccaccacctctttgctgaccaacatttccttgcaaattatggcaaggggggaggagcatgagcaaaggagctgtgtgaaagttggtgatactccctgccaaaattccaagttgaaatggaatccttcagtaaagtctcttaggcaaggtgggaaaaaaagatttacaacttcagcagaactgtaattctaccaagaaaaagtacagtcaatctacctcactgtcaccaaaggatctgaagctggctttgtcatatatctttctcctttatatatggaggtgggggggggagaaaaaaaggaaagagagttaaaaaaaattgatgaagccctgaccctttagattccatttatagtctgagccggaatgccatcccccttgactagagaactgtccaatccagccgcatgtgtcaagattctattaggcactaagtgaaatatatatgcatgcccttatgccgtttaacactctgggtccatcttcaagacactgggctgtggatcaacccaaccaccactcctcttccaagaatcattttgacaggttcttttggaggaactccttctctttttaacccacccttttaaaaaaaaaaatggcaccaaagaaagacgtgaagaaacctgtggctgcggctgcggctgccccagccccggcaccggca

SEQ ID NO: 25382 - DNA, 2300 bp, Homo sapien
tggtgtgagccactgcacccagccaaaagtaggtattcttaaaaatatctgtattccctcttaacaattatgttcacccaatgaggcatgagaaaacacaggcccctagtattttacatccaggttctcttttgcacagtgatttgtgacatgctaaccagtttaatttacaagtttctttttttttgttttccagctgtggatatgccctgtggagtgacaccggtacaaagaacttcaggtttcctaggtccccaaattctctaagcactaacagtttaaagacgtccttaccatacaccaccgtttgctctcatcattaccctgaacgcacttgtgtataatcacaaaggagtaacacggcacatgtgaataccgttaggattcttcacctctttttaagaagcaaaccaaaatacattaaaaaatgccaattacatagtaaactacatatttgccaatttttaaaatttatactatcaataattgagtttatttcaattaataatgttaacaatgacacatttaacattatgttagagctcaatttgtatatattaacatgtatttttaaataatttacgtatttatcgtcgaatcatgtatttttttaaagggggatgctcaactctctcaggcaaaaatgagcacctttccgaacaccgtggggagaggcagggatgcaggcagacatatcctaaactcaccctcccggcagcatcaaagtagccttcggccagggatttgttataatcagcataaggattcgggaaggccctttgagccatgacgccggaagcaagcctgcagaacaggggaaaaacagaaactaggttgagataggggcctcggccgagttgcgagggcggcggcggcgcccaggtatcccccttcctccagctccagggccatcgagccgtctcggcggtccgagtggacctcgggcccactgcggcccaactgctaggacatggcgccttcgcgaaaaagctgccagggcccttaacccacccggacaaagaggccccgttttgcaaccccgttcccacgcccgcgacttgaagcaagtgcgcctcccgcgtcctgaagcccttctcggccctggcctctcaccccgcagccccggacagtaacagaagggctattttaccgcccagttcctgccaggagggccaatcagagccttcgccgttcccgagacccgcccccttctctcttacagtttgttaaagacacaggcgtgtaatttctaaaggataacgcagggtattttaattactgggtagcagaagtgaggacctagaatcacgcggagatgtgaccaatatttcctacccttctttaatttttcttatttttaaaaagtcaaatttaagtccagagtcataagaagtatatatttttttaacctggagaagaaacagactgcttttagatctgaacatgctggtatttctgctgttcgcaatagataaaatttggcggggggtggggggataatgtctctccagggacttgccaatcttttcttttcatttcttaaaacaaacaaacaaaaaagcaccaccatcattaacaacaacaacaacaaaaatatgcccaaaggacaggatatcaaatagcagttgataatactttggggaaagcacatgaaaacacaaattacagctcttaggaaatttattctgttccttagcctaaattggactataatactggataacaaagctctaaaaaatactgaaaaccaacacagcaggagatccacaacattcaatttcaatgttttaacagtccctgctatctgaaacatttttctttcatttaaaattaaatcccacctggtacatattaggcccattctattgctcagagaattttggagttcagttaaaaagtcagcctcactctctccttttccttctctccggtttcaatgaagagtcctagctccagacctccaactggagaagctcagtctccaccccaactccctccctccttggcctaagtttgtccttctgaggctgccatcccaaactctactcctaatccctccccacacccaggtttgctcttttaaaatagttgctttcttaggaaatgtagttgctttcttaacctcatcaaattcatgaagatttagccgaggcccatggtgagtcttaagctggatatctctcatgttttaaaagatgggtgtttgaaggagcaactcacaagagagaaaaggaaaacgagagacattttatcaattattttttctttaatgattaaaggctatccatttatcccactca

SEQ ID NO: 25383 - DNA, 2300 bp, Homo sapien
ttccgtttagacgcatgcttcacatcatcttcagaagtaaactccagataaagacttaaatataagaggtaaaaagctaataaaataaaatgtgggaagtcattgcagtctatgagtagacaaagacattttgaatatgaagctaaatcctcaaatcacagtgtcacaattagatgggtttaacttcatcgaaatgaaagattgtgattcaataaaggatatcctagaaaatgtgaacaaactaaagaaagtatctacaataactaaagtgaaaggagattaatatacagaatataccccacaaacacgggaaaaaaagaaacaaaactctttcaaatcaacaggaaaacaatgcaatcactaatagaaaaataaataaaggaacaggtaaagcccaattgtctaacaggtatatgaaggaaagttcaacaccattagccacagaaaaactaaaagattaaacatcagtgagattctacattattcattagaatggcaaacattagaacactagataataccaagtgttggagaggagatggaaatgacagaaacaattgatatgttggagtgaatactcttggagtgaacaatagatactgttagagggaatataaactagtccagcagttttggaaagcaatctaacaacattggggaaattaagtacagaatctcatatgatccagcaattgactgctgggtgtatgtctcagggatactcacacagattcataaaagcacatgttccaagaatattatttgtagtatggaagttagaaacaatgtccatcattaggggaaaggattagtaaaataagatagaggcatactatgaaaatatacaattaccatcctgccttgcttaacaacagtaatatttaattgcttaaagactgtgagtgggataaatggatagcctttaatcattaaagaaaaaataattgataaaatgtctctcgttttccttttctctcttgtgagttgctccttcaaacacccatcttttaaaacatgagagatatccagcttaagactcaccatgggcctcggctaaatcttcatgaatttgatgaggttaagaaagcaactacatttcctaagaaagcaactattttaaaagagcaaacctgggtgtggggagggattaggagtagagtttgggatggcagcctcagaaggacaaacttaggccaaggagggagggagttggggtggagactgagcttctccagttggaggtctggagctaggactcttcattgaaaccggagagaaggaaaaggagagagtgaggctgactttttaactgaactccaaaattctctgagcaatagaatgggcctaatatgtaccaggtgggatttaattttaaatgaaagaaaaatgtttcagatagcagggactgttaaaacattgaaattgaatgttgtggatctcctgctgtgttggttttcagtattttttagagctttgttatccagtattatagtccaatttaggctaaggaacagaataaatttcctaagagctgtaatttgtgttttcatgtgctttccccaaagtattatcaactgctatttgatatcctgtcctttgggcatatttttgttgttgttgttgttaatgatggtggtgcttttttgtttgtttgttttaagaaatgaaaagaaaagattggcaagtccctggagagacattatccccccaccccccgccaaattttatctattgcgaacagcagaaataccagcatgttcagatctaaaagcagtctgtttcttctccaggttaaaaaaatatatacttcttatgactctggacttaaatttgactttttaaaaataagaaaaattaaagaagggtaggaaatattggtcacatctccgcgtgattctaggtcctcacttctgctacccagtaattaaaataccctgcgttatcctttagaaattacacgcctgtgtctttaacaaactgtaagagagaagggggcgggtctcgggaacggcgaaggctctgattggccctcctggcaggaactgggcggtaaaatagcccttctgttactgtccggggctgcggggtgagaggccagggccgagaagggcttcaggacgcgggaggcgcacttgcttcaagtcgcgggcgtgggaacggggttgcaaaacggggcctctttgtccgggtgggttaagggccctggcagctttttcgcgaaggcgccatgtcctagcagttgggccgcagtgggcccgaggtccactcggaccgccgagacggctcgatggccctggagc

SEQ ID NO: 25384 - DNA, 2300 bp, Homo sapien
aagctctggactcctcagtacttccactgtcatatttgattaaaacataagtgatgaagggaggaaatatattatagtattcattgcatgggtaccttagggtaatgggactatgactgatttaaatttattttgcatcctaaaaagtttccattagtgggtgcagcacaccagcatggcacatgtatacatatgtaactaacctgcacaatgtgcacatgtaccctaaaacttaaagtataataataaaagaaaaaaaaacttaaaaagaaaagtttccataatgaggattgagtttatatcgttttcttaattaaggaaagacaaccctcactacacacacacacacacacacacacacacacataaaaagacaagaggtgagatcaaggcgtaaactagtattggactaagccagtaagtactgcttctcagtcctcagttctctaggttgggagttttccttttgctattttcattctcctccaattcatttttcaatgatcttcaacacaaatttcgcctttatttcttgttcaaaatacttccatgactattatgaatactatttatggatgaaggctgaacattttaaggcatactaagtctcccatgatatggtaccttttcattttcccattctataccctgcatctaggcttttaaaaaatataccacatgacttcatgcctctaggctattgctcatgccacggcatcccttctgggttttttcccctctttatctacttggtgaatttgcatccttcagtataacacagctcaacataattctatgcttaaactttactgaaaatgcacaaggaacttgatctttctttcttattttccccattttatttattttcccattgcatttgggcaactttcatggcaccagttattttattaattatttgtataaactagtatgagcctattttgtttagctttctatcaccaggagccatgaagcactttgaaatcaaatactgtttgtacttgaatatattaagtaagcgtgaggacttaaattaaactttgttcctctttaaaaaaatccttaccccaactctagcactgattctatgttattgaagcttacaatctttatgtcattttctgtcatcttttctgttatgagaagacctaggtatgagtctattgcctttattccttggccttctttgcaagggtatcaaagaacactgctgcagtacttcctgttctacatagtcatgtgacttaagcaagagcatctgccagccagtgaggccccttgagagcctggttaaacatgggactgaagggttaagtgaatcactttttattcatgttgaaatatgaatgctgaagtttggaaaattttatatataacattttaataactaaaaaaacttgacttaggaatagtgcttatattaaaatcagtgtttgtcattgtttcatgaagtttttacaaatctaagaggcttaagagggatataatagtccactttgctttagttgtgttttacttgatattactgattgctttaactttgaaacacagaacaatgctatagtaagaatgtagtatactactctattaacccaaaacataatatagataggtttattgtatatttgtggagaaaagtttattctaacgttctttttacaaatagtaaaaatgctatttgtaggatgctctgatttttactttttgtaaaaagaacattgtctttttaccccaacagaaaatggcaagcgttcagctttctttgggaatccaaaatctcttatgaggcatattaggtatcacatgtgacataagcaaaagcctgtgatccttagcatgttggaaagttgctactctttaggataaggttgtccatgatgtctaggtcattccattcagctgcataaacaattcctttgatggatggctggttttctacaaccccagcattattttagcaggagaaggtagtatttgatgtgttgcaatttgtgttacatgcccatggaacatctctggacattacctcaggaggaggggttaagagaaggaggagctgtggctgaagacatttaatggcagaatgaatggaaattcaaagatcgctgtgcagtcagccttaaacactgactgcacccctcccagatttcttttacattaactaaaaagtcttatcacacaatctcataaaatttatgtaatttcatttaattttagccacaaatcatcaaaatgacgaggattttgacagctttcaaagtggtgaggacactgaagactggttttggctttaccaatgt

SEQ ID NO: 25385 - DNA, 2300 bp, Homo sapien
ttttaagcttgatttcagaacattgtaacattttaagaaggtaagtgtgacttaagagccgaggaacctttagatcctcttggtttctcttttttgcctcaaacaatattaatttattaaacatcaggctttttcccatggcccaccctctacataaattataattcaggtctgagcagtcatctctttgttatctccctataactctcgggctttaaaattattgtagttctcttaaagtaagtcacttatatttcttagtttctgttaagccggtgagcaaccctttttgttatgagtgcaatgcccccctttctaaaaccgattatagaatttaatagacctgcgtatttaacacacaacaaagcttcctgaattgatttttgttgggaaaattactgggattaacaatctgtgacttttctcacagagtgattttcactaagcaattgaaattttgaattttaataggctttacttgttcactactttataaggaatacatttatattattctcttcacttttccttttccctattctttttctccttttctctccagagggcagaatcagcctgttttgaatatcacaaacaaacaggctttcattactgctcagaatcatggctatgccttggacaacaccctccctgctggctggaaaccactttttgtgaatgtcaacgatcaaacaaatgaggtaaatgatgtcaataaacctgttcagttggtgatgagaaacgcagggcttttaaaaataattgatacataagcattgtatatatttatgagatacatgtgatattttgatacatgcatatcatatgtaatgatcaaatcacactaggataaccatcacctcattttttatttctttgtattgagaacatttcaaatcttctcttctagctgttttgaaatatgcaataaattattcactcagaatattcacccagagtttttaaatacactatgatgcaaatacctttctcctgtttgtttgtgatttttttggggttgagtgttgaaaaacagctataggttttctcccatagccctctgtgttttaaaacgtcatttctctctcttattctctcatcagttgacttgttaagattcactatttgagttattaatcaacaactatctcatatattcaatgttagtgggctgttggtccaaatctgtttgagccccatctgggtgggtctctgggacttacttggcactggtgtagtgtttgagaagacccttggaaaagtaatttcggacttggggataagatgaggacttgagtttactctgaacagaacccagaggggtcccaaagactatagaccaaattttttatttatttatttattttaaaggaaaacacattcagttgagtcttcattgacccattttccatacttaatcaaaaaggtcagatatgtaagtccttaagatatcggaccatgttacttaatagtactgttagttacaaaaattttgttaagcatctaactcagtttttaaatttgagctttattgttccctgaataatacatagccacacttgacattcattgttacagaaggaatttcttcctgtttcttattcctttaggggattatgcatgagagcaaacccttcttcgctgtgcagttccacccagaggtcaccccggggccaatagacactgaggtacgtcaaaaagatgaggcctattatgtatgcaaaaaaaaaatgtatttgtgtggaaattcgagaaaccaaaataatcaccccagatgatcttgagcagaacattctcaagaagagtgctttggtaacacacattttgtattaaaatctccccatgaatgtcacagaggaaatttttatcttttttaaaatttaaagtgggaaagcccttaagaaacccgaagcgatggtatttttatttaaacccattatcattctaatatatttagttctgaaatttacaattgttgtactatgcaaatgaattcccttttgctctctctcgttctcatgactgaaatgaaattttaatcccccatctgtgacttcacaaaaatccctatggcaactggttgtgtagccactaagggagaataaacagcagcaggagaaggaggggaagggtgttggaggggagagagggcatgcatgcacatacatagatgattcagacggcttcagaaaagaaccacaaggaatgcttagaggagttttgtatttaatctaaatatttttacttttttgtgtgtgagctcttagttcattgttcaaacccatctttccaaataaatt

SEQ ID NO: 25386 - DNA, 2300 bp, Homo sapien
tgaaatataccagcagagttactagttgcatatatttcttaatgggtcttaaaaacgcagtgtgttattctaaaatatgttgttctggaatattttcagatttttcacagggtatatacacgtacacatacacacatacaagaataagagtagacatctttttgtataaagattttggttttgagagtttatctcttttttcagttaaattttctactcagcttaatgacccatagttgtagttttacttttgagaaattgataaagtaagcttgaggaagaggctgagctgcctatcagaacagaagttattactacattgttttggaatatattaggattttaaaaaatgcctgccttagcacaaaaatcatagtgactgattcaaaacaattttttatttgaagtcctctgtgaggaaatattctggaggaataaagccaagccagatccgacccataaattctcactgactattgtatgtttgtgtgaatgtggagtgaggtgataaaaatatgctatctcctacaagataactatcaacactacaagttaagagatcattatattaattctagattttcttaccaatttggcttaactgtagtttcaagagactttctttaattccaaagagatgtaccaaatttagggtataatgggtaacacaatcaaataaagaggagcgagtcaaaacctgttaggagatttttctgagaacacaccactcaaggcaagcacctactctgtatgccatttgtggatatagttggcaccatctttatgtttattggaaggaatgtcagtgatgtcagtttcatgttttgtaactcagtctacagtctcgggctctctaaataacacacagaggcatgactgctatgtattttaaaccaaataagacatttagaaaaatgtttgccaaagaaagtatctcttctcctcttggcaggccattgatgacaacatgtcccttgatgagattgagaagctcacatacattgacaagtggtttttgtataagatgcgtgatattttaaacatggaaaagacactgaaaggcctcaacaggtaaggcagtgctgctctcattcatgccagacaccttcagtgcaatttttaaagagtcttcttcctactcttaagcatttggtctacattgtgattcaatgaggtagatagtgccattgttggaaaatagtacccgtagccagaagacaaatggcaggtttttttttttttagatgtttacctttagaaatgtatccattaatctttttaatcatcttctattcccacccttgtcatcagacatagtaataaggtcttttgaatgcacaaaattggtatacattgatgaacgtgtattatttaattatgaagtattatctagatttaaattttattaatcaattaaatgaatatttgttttctataaattttcctctacattctgaagtctgttttccccttttaatatcaatctatacattgctgtatattgaggagaaaatgcattccttttgcgctctactgtttttaaattgggacattcagttcagcatacaattaagccacattcaggtttctcttaacagactcttcacctctgactaatttacatttttatctccatcatggccaattatttttaaacttcattttatgttgagaatattttgataatgtagtccttaaaatctacttttaaatttttcatgggaaactgctggggcaccttaggctgatgaaagcatggatcagttttaaacatctatcttcaataagaggagcatttattagcagattaagaaagacaatatagtcctcttgaacttcttccctctgaaagcactctgaaatacactactattggaaagacgtcttacctgcaaactagggatgtgtttagagaaggaaaaattttgtttgtataaaaattgttctcaaatgatttgacaaaatgtagatactttaatcacttaaaatatctttgaggacagtggaaaatctcaaaacctggattgctcaactatttagcaattgcaacatatacttgggttactgtatttgcctgatcaatatgtgtacaaactaggtaataaaacacttgcttttctttttgagaaaaattaggttctttttcatctatttaattattgcccatgtcaaatgcttggttttgaaaactgaggaattctatctgacaaagatgaaaccagctatagttgcttgtaaatcatcctttctagtgatcacataaaatgaacagtagacagcaaataatttaggaattgaac

SEQ ID NO: 25387 - DNA, 2300 bp, Homo sapien
aagagcagtgtgcacagttttgctgcaatcagtaccattctggtcaagtctccgtcatctgctctaggcttagttcctctctgccctaggctgcttctggtaaaaccgcacgctcagcttgttgggcgtcttcatggagcctgttatttgctgtgggtctaagaaagggaaagcttcaggcttcaggcatctgtacctcctatctgttctcagctccatggaaattcttaagggatggggctatagataagagagtgggaaatggagatcaaggtctcaaatgaaaggcagggtggtttgatttttaagctcccctgatactttttatttatatatttgctgcttctagaaaaaccaaaaaaggaaagtgattcatacatagaatgcctgtacaaatagcaaaccaataactacccccagcagattctggcccttgccagggtgcggtttcagagctgtaaaaggcaagggatatgtacattgaaatgacccagtcccagaatattttagattcagaaaaggtcagagactttcgtaactagcaatgacctccagattagggaccatgaatgtgcagagtgaggacaaggaaggggcctaaagctgggtctactgtagaataaacagaatcatttaaggttaattatgttctgatgtggcctccttaaattctttcaggctggggacaatttctagccctttaagatcaaatcagtggctttggactagaatctgcttaataagaatgaactccaaaggtgaaaaaaaaacataaaatctaaaaatcaaaggatatgcctttataaatgtgaaagtttagtttggctcaatgttggtcagtttagaaatgtgggagtaatcggagagatggcataactgggggcgggaggcggggcggtgattatacccctaccactacctaatcctcaggggctaccagttacttgctgtacacacttttaaagtactttctaattgtggaccatgagtggcagagtactgcgggcggaggctttttgctgaaagcaacattgacttttatttctagggaaagtcttgtctgtagatgagcaccgtggggcaacggagaaaatgctgactttcttgtttaaaaaaaaaaaaaatttccgtaagcggccctccaatggtccgtccactcagcaggccagctgtcccaggcctctgccagggagggaagacgagtgcttcagtgcatggcttcggtgagccctttaaatccagcttcccctgcccccaccaagaggctccctttccctgacaggtgttttcccaactccggaggcccaggattttggggagtggctgagccaataagatttccctttggaagggggggggaagggcgtggctagttgggtcagagcatgggcggggtttgcgcggctgagcagagccggcctggttgcgtggagggttgttttattcccaccgccccccgcaccttttttttttttttttctggagtcttattaatttctctgtgggctgcagctggagaccgcggagcgctggaaatgacgctcggagctttaattaccgcagccgccggacaagtgtgaggaaagctgagaggaaaaagaaggacgggatccggggagaagcgagaagctccccccgccccgctcccctcccgatttggactggaggtgcaaggaaactgaagaaggagcagaacatagcccggctgcggggagaggccggaaacctaccgcctctttgcaatcaactttttttggaaacctttcgccccccttccttttttattgttgaccaaccagtgagagagagagaaagtgaggagggagcgagcaagcgaaggctcacgcggggaaatagctgcacagtccggcccagagcgccaagcgcacacaccgagcacactcccacacgcgcacacacgcgctcacactcgccccctcctcgggccccggccctggacccgcgggcgcggactcggtcgcccgccctgggagtcgccacaccgcgcgcgccgcgcccgcccccctcgcacccccacgcgcgcccggctgggggatctcctccgcgtgcccgaaagggggatatgccatttggacatgtaattgtcagcacgggatctgagacttccaaaaaatgaagccggcgacaggactttgggtctgggtgagccttctcgtggcggcggggaccgtccagcccagcgattctcagtcaggtgggttccttctggcactccggtcgccgaacctgcagccgccggcggggctgcctcgagtggctcccctgccctcttcacccat

SEQ ID NO: 25388 - DNA, 2300 bp, Homo sapien
catctcagacatgaatgtctttctcagtctattccccaggacccctcttatcccgcttcaggtcccggtcaatgcggtgcgctttccgaaatggggccgcagagttgccggcggagaccagtaggtgggaggctccacgcacactccccgactcggccgggacgcggctcccggactccgcgcagggcgccaagatcgccgccccgctcccttcccccggcctccccaccaatcccagtttgaaagaaaacttcacgcggccgaaatgaacgtcacctcaccgctccaagcctccagccggcagaaaacgtgagatttattatgacacggggaggggagatgggggtcgccgtggcacactcggaagcgggttacctggcccccgtcgggggcggggtccgcagtccggggaccaacgggctgggggcgacgcggccgggcgcgcgggtgggcgcgagggagtgcgcgcgtcgcggagcctccggggcagcacttgtcctgtaatcgattgccgagcgcgccgagcggcttagcgcgcagacacgcgcacacgcgcccgccagcccgcgcgcgcgcgcacacgcgctctcatacacacacgcacaggcgctcgggccccgcacacacgcacgcgcgcgcacgcacgtccgctcgcccgcgcccggggctccgctgcccgccgccagccgcccgccgccgccgccgccgcagccgccgccagcccgccctccgcccgcgggcgtctgcgcgagcccggccggcgggggagatgtgctcgggctccaccggatcggtttctcggggtttgaccagctgtcccgggctaaccctgctcctcgctgaagatggaggaagtaaaaacaggattacccttagctacagatccactgccttagtttccaccaccaactgcagtgcacaaacacacgttaggcacaggaaagaaagaaagacagaggacacattaacagtaaacacaaacaaaagggtgatgggattattttactgcatgcactgctgaggtaaatctccgcttggcttttgcgtggtgaagaacagctcttgttttgtcttctgattcatagattatatataaatatgtgtatgatttgcaaaggggggagtgttttcaaagttaagtgtaattatatagcatctcgttttgcactgtgatgtgatcaaatgacttgttgctgttaaccagtaataataataataatataggtatttttctctgggagggatggattgtggttctgattagggtaatgatttttgtaaaggacgctcagggaatcgggttgaagatgatgtcctctgccttaatttatcgtcccctccttgtaatctgtttctgggatgttaatcgattaatcagttctcatctctatagctgtcatgaatttggacttgttttgctttgttttaacttgaattccaagaagaaagattgggtaggctggaataaattgaagctgtccagatagaaggtaatatccagatcctgttggaattaaaaaaaaaaaaaaaccaaaaaccctggtatgacacatgtaaacaggcagcagttaaatcactttgacaggttctagtatgggcgaaagagatggaattaagatttatttattttttttcttttttgccaagggccaaaaacagtcctgtgaagttggcctgggttcctagctgggttctgcctgactgtccctcccctctacccgcccccccccccttttctttcagttttcttgtcttagcttttggtcgattcttaaggaaccggtggatcaagttttttctcttgttaatcgcattgctatagcactgactgacctctctctctctcttttttttcctctttcctgaaagtacgtggtgccattcctgagtgacttttcctactagaccatccctaagggacgagggggaggggtggaaggaggaggaggaggaggacgaggaggaggaggaggaggaggggggtgttcttctctctcatttcttggttttgtttatcagccgatctgtttgctggatttgggcttggaatgacccacctgtaaagtgcttttccttcctcctccccttgaactctgcagggggcttggcttggagggggcaagggagggaaagagagaagggggaaacacaaaaaacttctttctttctccctccgtttatcttcagcccgacattgtcacctcctctttgaggggttagaagaagctgagatctcccgacagagctggaaatggtgatgaatcttttttaatcaaaggacaatttcttttgtatgtaca

SEQ ID NO: 25389 - DNA, 2300 bp, Homo sapien
acaatggatcctcttctaccaaataattacattgtgtaaactatcagacatttcatcttaatttcgattatctttatttcatattttcaaggatctctgtaacagtacagatacctaaacacttaggttcagtttttaggaaggacttatgacaatttcgagaacttatgttatcctttacatattgtgcatttacatattataaacgacatacagattttttgaggtaatttaagactaaaatatttgctctctgttgggatgattagagtgacttactggttctctactcagactttcccaaatacgactttaggaaaactaattttagcaactaagtgtttaaaaatctgccttatcaatatataactcacaggaactgcaatttttcttaaaatcatcataatgttattgcaagcctgagcccaaataatttctctccaacgaaaatttgttaatcttgtttgctgtaccacactatctaccattttctatagttaaacaaaaagagactatcgttacaattgtttaataatacattgtataggaaaaaaaactttcaagaagtaattcattataaaagctacagtatcacacaagttatatggtatccattacttcgtttgtgtcgatgtgaattaattccttccctatatcaaaatgtaaagaaaagacactatccaaaattacctacagagtggtgcttaaggtactgttgatgacttaatttccaatatatctttttttctcagcagaaaaaaaaaacctcaacaactatttctgggattcttcaaaggagtaagagtacggtgcctgttccgactcttctagcattgattttcttcacaatctgtgatatggtttctcaggaacaccgtttggcagtcctgataatttcatgtgttttcaaatttcagccatccagactacacagttcactattttcagctcctttcattttccttttccctttaattatagaagtctctattccctcttttcgcaaatgtggtcaggaaagatactaaatgctactatttgtagaaagaatatgcatttgtttttctcttgacggttcacttaagttctttccaaataaacaagctgtggttgatagtgataggtaacacttcaagggtagcaactttttgtactcatccgttcctttgactttggaagacgtggcacatgccccgggggagaaaaagcaagtcaacactttagtttttaaacttgcactgttaaagcactttcaaaatagtaatagttgagcttcatctcagacatgaatgtctttctcagtctattccccaggacccctcttatcccgcttcaggtcccggtcaatgcggtgcgctttccgaaatggggccgcagagttgccggcggagaccagtaggtgggaggctccacgcacactccccgactcggccgggacgcggctcccggactccgcgcagggcgccaagatcgccgccccgctcccttcccccggcctccccaccaatcccagtttgaaagaaaacttcacgcggccgaaatgaacgtcacctcaccgctccaagcctccagccggcagaaaacgtgagatttattatgacacggggaggggagatgggggtcgccgtggcacactcggaagcgggttacctggcccccgtcgggggcggggtccgcagtccggggaccaacgggctgggggcgacgcggccgggcgcgcgggtgggcgcgagggagtgcgcgcgtcgcggagcctccggggcagcacttgtcctgtaatcgattgccgagcgcgccgagcggcttagcgcgcagacacgcgcacacgcgcccgccagcccgcgcgcgcgcgcacacgcgctctcatacacacacgcacaggcgctcgggccccgcacacacgcacgcgcgcgcacgcacgtccgctcgcccgcgcccggggctccgctgcccgccgccagccgcccgccgccgccgccgccgcagccgccgccagcccgccctccgcccgcgggcgtctgcgcgagcccggccggcgggggagatgtgctcgggctccaccggatcggtttctcggggtttgaccagctgtcccgggctaaccctgctcctcgctgaagatggaggaagtaaaaacaggattacccttagctacagatccactgccttagtttccaccaccaactgcagtgcacaaacacacgttaggcacaggaaagaaagaaagacagaggacacattaacagtaaacacaaacaaaagggtgatgggattattttactgcatgcactgctgaggta

SEQ ID NO: 25390 - DNA, 2300 bp, Homo sapien
gaagatcacacactacatctaaaaagtcagaaatagatgagccattgtaacgaacaaaaacaaataaaagtaaacagtaatcgctctgagagaccatccttcatgtcttttgtgttcctacatgtcttgctggatatgccaaaaatgtaaggccttgaccactccttacccaggtcatttgttaaggctggatttataggaaacaaccttgagagataaggtaatgccttcttctgaaataaagagaaagctttctgtaaaagcagtggattctccaatgtcagaattcttctgtattttcagcctcctgtaattgttccttgcatttaatgagtactcaggaaatgtctgatgtgagaagtcaaggacaaagagtagggtagtaaaagaataggtaccaggaatgaattacccgactattatatctgtgacccttgattattctaaaaaataaaacaatatcaaacacatttaatagaaataacagctaacatttcttagtgtcttctatgttcccagtaagttcttaatgctttttgttgctttaccccttgcaacagcactttgaggtaggtaatattgttgtctttgttctacaaatgatgaaactggggcctagaggcattaagtagtagtttgcccaatgtgtcatagctagtaagtgatggaagcaggctctgaaagctgtctctctggctctgacacacgtactctcaaacacctccttaggaagttactgctaccttttggtaataaatgggagcttttataggatcactggcttccagttttcaccaagaaatgtagaatgaaaaataataccatttgccctagcaatcccattactgggtatatacccaaagaaacagaaattgttctaccataaaaacacatgtacatgcgtgttcattgatattcatgataaagacatggattcaacctaaatgcccatcaacggactggataaagaaaatgtggtacacatataccatggaatactatgcagccacagaagaatgagatcatgtcctctcagggacatgaatgcagctggaggccattatccttagcaaactaatgcaggaacagaaaaccaaatactgcatgttcttagttgtaagtgggagctaaataatgagaacaaatggacacaaagaaggaacaacagacactggggcctacttgaggaggagagtgggaggagggagaagatcagaaaaaataactattgggtactacacttagtacctgggtgacgaaataagttatataccaaacccctgcgacatgagcttacctgcacttgtacccctgaacctaaaataaaagttaagggaaaaaaaaatatttgcaaagaaaagggccttgaatttgcttctgatacatacgcgatataacctgaggaagatcctctcagcaataagactatacatgatggggcaagtgtcaactgcatacatttgtcaggaccaaatttgtagctcataatttttatgcaactgtttttaccttggcgagaatcaatgctacaaatactattccaagtcttagtatatggaaccaaactcaaaacagatgtccagctaaatgcattaaagatcacaagaaaggaattgacaaagctgaacaccatagttcttcattgctaagcatctgaggagcgtctggtagctcccctgggtcagtctttctattatgatttctagaactttattttttcattttttaaaaaattccaggtgttgagaactcaccttttctagtagttttccctgggaacacttggggatctacaaacatctgaaattggaggatgctaatgggcaagaatcaagagaaaggtaattcagagacgacaacgaagtgggaaagaaattacagggtcaaagcgaaagaaaaccaagctgcttgggtaggaaggtgcaatgcaagccaattgtttactgtatcttgtccgctcccagagctgcgcccgagctctcgcgttaactaggcaacatcgttgccacggtaactgggaggcgcgggagggcgacagctccctggactcccggtaacccttacgtgcccggggctggtccgtggggcggggtgagagatgccggaatctcgcgagagctcccgggggccgttgggtagcgtcttcgctgttgcccttagggacggctgtgggcctgctgggggtgggggcccgaagcgccagagatggctgctcagcgagggatgcccagctccgccgtgagggtcctggaagaggcgttgggcatgggtttgacggcagccggggacgcgagggacac

SEQ ID NO: 25391 - DNA, 2300 bp, Homo sapien
ggttaaaatacaaaatagcagtcagtcaaccaaagaaagaagaaaagcaaatgggttggataattcacacaacggttagtaaaatcctaaaaagttacagttgcttatatgtgttaaagttcaaataagtgtgattatttgaaaaagtctttgtaagacaggtttgcaaactgctacatcttggcaggtgtgactcagtgatctccctgcacattaagtaaacctgattttcattgctgaaagttgtgttatgttagactcctaccatttatttcacaaagatgtttgcaaaaagttacctcattgtgtcaatctcatgttaacaattaaactatgtgttcacggaaataattttaatgcaaacaaaattacaagatgcctggttaccattcagtagcaagggcactggatatagataagcttaggaagaattatgaaaatcgttgttaaagaggaatatcactggaaaagactgcctgttacatctacgaaaacagtataaaacctcatttatgacactaaagcacccatatatttctttcaaattcatttcaagcgattcaaatttctattcctgtaaaagtcgtttttgcacccaataaaatactacatattttctttaatctttcagctaaattcttcaaagctctctgtagtgtggatgtgtactgagcctgagtcaggacaggttaatcggcttgtcaaagctcacgaaatgaatcattgctggatttctgaaatcttgaattaaacctggagaggattacagttggacaaacaaataagatttggcagattttggagtttccttggtatctttaagaactgaacagataatcatctctttcttacctccctgaataaaggagttacatgtctttttctcatgaaccctccccgtctccctagtaggaattaatctatataactagaggaaagaagttctaaagccttacacaagaaatagtggacctaattatccacacattgttattcaatttttctggtacttccgataaaaatcgctaatcaccatctgctttattcctaatatctctgagctgtgtagctcaccagatcattatttatttgctcaagaaaaaaaagcaactatactattagtatttattattaagtagtcaaacttggaactactcaggaagataatgctatcaaaactaagcatttaagcattaactggaccatcgaacaggatcgtgggttgggtattctgagcttcagctccttaaagtccaatggcagaggtctttccctagtctcctaacgttcctccgttgaatttattgggacggctttctgaaagattgagggcttatttaggaaacccattatttgaaaggagggttgaagcaatttgttgtgctgtcttaacataaaaagcaaccctccatccaaaatgtactgagtggttactaagtatgaggccttggaaggtctcccaactcttctaacaggtacaggacaccctgggctactaagggcgagaaattcagtgagtggctctcaggaagactgtggtggcaaaaacagcaccttgaagtccaacagaggctcctccggagtggccccaaggctcaaaaggcgccgccagtgggaggccctcgccttcgtcccaacacccattacccgccagcgcagcgggccgcgcctccacgggaaggatacgttccaggtagtaggcgccctcagccgccaccgcgtccgccgtgtccctcgcgtccccggctgccgtcaaacccatgcccaacgcctcttccaggaccctcacggcggagctgggcatccctcgctgagcagccatctctggcgcttcgggcccccacccccagcaggcccacagccgtccctaagggcaacagcgaagacgctacccaacggcccccgggagctctcgcgagattccggcatctctcaccccgccccacggaccagccccgggcacgtaagggttaccgggagtccagggagctgtcgccctcccgcgcctcccagttaccgtggcaacgatgttgcctagttaacgcgagagctcgggcgcagctctgggagcggacaagatacagtaaacaattggcttgcattgcaccttcctacccaagcagcttggttttctttcgctttgaccctgtaatttctttcccacttcgttgtcgtctctgaattacctttctcttgattcttgcccattagcatcctccaatttcagatgtttgtagatccccaagtgttcccagggaaaactactagaaaaggtgagttctcaacacctggaatttttt

SEQ ID NO: 25392 - DNA, 2300 bp, Homo sapien
gccgggcaccgtggctcacgcctgtaatcccagcactttgggaggcagaggcgggcggatcacgaggtcaggagacggagaccatcctggctaacacggtgaaaccccatctgtactaaaaatacaaaaaattagccgggcatgatggcgggcgcctgcagtcccagctacttgggaggctgaagcaggagaatggcgtgaacccgggaggcggagcttgcagtgagacaagatcgtgccactgcactccagcctgggcgacagagcgagactccgtctcaaaaaaggaaagaaaagaaaaagttgtgttacttatactttatgcaactaggtaacttaagttctgcaagttagaaatcaaaggggaaaaaagtccaaaaaggatataaacttttgacagctacaaataacaaaaaaactgccagtgatcttcatacagaaatacttagctgtacacacagcaagtgctcaataaaaatgcttttcagaagaaatgaaaatgagacaaacctttcttgggttttacaaaccttcttggtttgtatactagaaagagctacacgaaaaaaagcaagaagtaacactcatgaaaatgtctttggacggaatgaaaaccctgagaggactcccataatgtgacagcatgaaggaaaacaataaacagcatcactaagagcggggacaccagacatacagtcttttgagcaaactaagaaaatgagaaattccgtgccatcttcaatctacaactatggtagatatccgatgctccatcccatctcactcgaaaaagctggcacggagaaaatgtcaaaaaggccagtttaacttagagtggcagctgcttctaatttagagggtctccggggcggcccgccagcccaattcgccacagctcccggaaagcagcggggtaatccagggccgggtaaaaaatgcagaagcctcagccccaccccagcccgattcaaactctggaggcgcgaccgggatgaacatttttttagccacacctccagacggttcttcagcccgctgaagttcaaaaactaccgtttcagttggattcagggcaaggggaggccggtaagtcgcccaaaaataaagtgaatgagaagcagaagttgttaatactatatcccccggcaggtgctaaccgcacgccgacccgactgcagcgcgggaacggaaggaggaaacggaagatttgaaaagattctgccgcccccagaaactgtgcgacccgtgccctcgcagccacccccaagaagctccgtctttaccaacgcgagcagcgcagcagcttctccaggcggtcgagcgcggcgcgactgtgggcccaggcaccgcgaccatccggttccatggcgggcgcggaacgaggctcgttcccggagcggatcctcggctgccggttcctcggctgccgattatccggcatcgtcccgccttcggatgaaaggctcctcgcagagcgggaagcaaggaagcctcgggaaaccacagggaagctgcaggccagcgactcgaaaccggccaagctcttcccgcgtctgggacggcgggccgccagaggggcggggcgcgcggggaggggcggggcacggcggccgcaatgctcccaaaatagggactcgcagggcacaggggcggggccgcgagagccagccgctggccgagtgggcgggacctaggggtggggctggaggctgaaacttgccaaagtcccggcgtgtgggacttaggggaggggccgcgagagccgtgggaccgagggggcggggccggacggctgaaacttgccaaagtcccggcgcgcgggtcctaggggcggagccgcgagaacacgccggggacagagggggcggggcctaggagcctcggggcgggacaggacggtcgaaaccgaagtcctggcgcgcggggcccaggggcggggcctaggggcctcggggcaggacaggacggctgaaaccgaggtcccggcgcgcggggcccaggcgccgtgcagtgagagcacgccgcttgaccgaaggggcggggcctgaaggctgagcgcagtcgcgaggctgtagttggcaggagagcgggcggggcctgaagcccctctgggctgcctggacggatgaagtccaggtggaaagccagtcgacgtttcccgggagctacgactccagggaccctcatccgagcttaaccgttggaacaatcacaaacccagaaacttttagctgagtgttatttataaaaagcgctgttttgactgctgttggacttggaaaagctttgcccacgatact

SEQ ID NO: 25393 - DNA, 2300 bp, Homo sapien
gttataacaaaatactataatctagatggcttaagcaacagaaatttgtcatatttctggagtctagaagtctgagattagcgtgccagtatgactgggttttggggagggccctcttcttttgcgttcttgctgtgtcctcatgtggtggagagagagagaactctctcttcttacaaggtcattaaccccatcatgggggctctgccctcataaccccatctaaatctaactaccacccaaaggtcccctccaaatactatcacgttggggttacaacttttaatatatgaatttgggggtgacactacagatactaatgcccatttcatagggtccctataaggcttaaggcaggtattaacataggaaagcacttaaagctgggtctggcttgggtaggtagttcaatgattcaacaaacactgagcacctacctggagccaagcactgcatgtgccacatgaagcgatattgggaaatgagtcacatgcagccaatctctggccttttggaggttttgaactagaaggggacacgcacataatcgtatgtgtgtgtatctacatacacaggtgatatgatgcacctgagagaatccagtctaggaactaggaaaacctttaaggagtgatacttcagctgtattctgaaggatgaggaatggagaggaggccaattccaggttccaaagtgaatctttgcgcaaaagccatgaggcagcaaggtgcaggggcttttaatgacctaagggaacgcactgtggggttgggaccatgatggccagaggaggttttgacaagaggctagtcaaagagcagagaaaaactttaaggagttttaagaaagggaagtgccacgatgagttttgtgtttggaaatgttttaggcggccacaccgcagtctcgggactggctgggacctggatagacacttggatatcagctagaaagctacgacaggaaaccaggcgaggacgaggcaactggggatgttgtggagcagagacggagagaaaatgggtgcattcgagacaagttagggggaaaaaatgcaaggacttggaaatgaacttggggcgcggcaggaaggcatgacgggttgctctgtaggtcttatctgtaaattacggcgatcagtgaaagatctggaggaggaaggtggacacactctctaacaaaaaaaaccctttttgaaattttataccaatattttaaaagtaaaccagatcttttcagacatgcctttgagctgatatttgttaactagttagaattagaaactttccttatttttactcagttacaatatacgccacagctgaggtgagaggaaagaaaaggttgctttcttaggaacaaagagtggtaccttcagtatcgtgggcaaagcttttccaagtccaacagcagtcaaaacagcgctttttataaataacactcagctaaaagtttctgggtttgtgattgttccaacggttaagctcggatgagggtccctggagtcgtagctcccgggaaacgtcgactggctttccacctggacttcatccgtccaggcagcccagaggggcttcaggccccgcccgctctcctgccaactacagcctcgcgactgcgctcagccttcaggccccgccccttcggtcaagcggcgtgctctcactgcacggcgcctgggccccgcgcgccgggacctcggtttcagccgtcctgtcctgccccgaggcccctaggccccgcccctgggccccgcgcgccaggacttcggtttcgaccgtcctgtcccgccccgaggctcctaggccccgccccctctgtccccggcgtgttctcgcggctccgcccctaggacccgcgcgccgggactttggcaagtttcagccgtccggccccgccccctcggtcccacggctctcgcggcccctcccctaagtcccacacgccgggactttggcaagtttcagcctccagccccacccctaggtcccgcccactcggccagcggctggctctcgcggccccgcccctgtgccctgcgagtccctattttgggagcattgcggccgccgtgccccgcccctccccgcgcgccccgcccctctggcggcccgccgtcccagacgcgggaagagcttggccggtttcgagtcgctggcctgcagcttccctgtggtttcccgaggcttccttgcttcccgctctgcgaggagcctttcatccgaaggcgggacgatgccggataatcggcagccgaggaaccggcagccgaggatccgctccgggaacgagcctcgttc

SEQ ID NO: 25394 - DNA, 2300 bp, Homo sapien
taacatttggaagtgtctttaatatttacttatttaaaaatgcaaggttcagaactatgtgtaaagtatattgccattcaagttaaaaagaaaagaaatatttatgcagacatatccatagactatctctaattgtgagtgcctctgctgatgagagatatatacagttgaagatgaccagtttttactgtcatcttcggtaccatttaaattttaatgacatgtacatgtatcacctattgaaaaatacaatgttaagtaaacaatgagaggaaataaaagagcagagatagagaaatatattaagagcatatttaagaaagaagtattacaatttaatcagaacagaataaatgtaatgaaaaagtaggagttacagtttaacatgtggttgggagattatggaatctcttaaatgcttggtaaagaaatatggtttgggctttattcaacaaacaaatggacattcattgagagtttttgaacagagagaaacatgatcaagttgtgcttgaagaagtgtaattttgtagatggagtgcagattggaatggaagagtcagagaccctggagcagttttagctcctggagaaatctaggtgagaagaataaaagcctataggactaggcagaaaataatccacgatagggtgttataaggtgcggtggctcacgcctgtaatcccagcactttgggaggccaagacgggcagatcatctgaggtcaggagttcgagaccagcctggccaacatggtgaaaccccatctctacttaaaatacaaaaactagctggacgtgatggcacgcacctgtaatcccagctactcgggaggctgaggcacgagaattgcttgaacccaggaggcggaggttgcagtgagccgagatggcgccactgcactccagcctgcgtgacagagcgagactccgtctcaaaaaaaaaaaaaaaacaacaaaaaaaaggcatttccagtatttggagactgactacatgattttggaataaggaagattagaagaaacattacagttggggtctttggggatctcatcagaagaaacagggacattgggaagaaagcctggattgatttctttaaattttttttttttttggtatttgttagccaatatatcaaggtgggtttgggacttaatgagtttggagggctgataaccttaaaatattggctaaatcctaggtgagacattagtaaaacaagtacagaataacaatagtattcatattattgatgattataaaagtagatatatctgcggtacaatattgtgcctatagttaacaatactgtattatgcacttaaaattttgttaaaagggtagatcttatgctgtttctaaaattaaaaagaagagaggctttttaaatttaattgaaaaaaacattcttttttgagacggagtcttgctctgtcgcccaggctggagtgcagtagcgtgatcttggctcactgcaacctctgcctcccaggttcaagcaattctcctgcctcagccttctgagtagctgggactacaggtgtgcaccaccatgcctggataatttttgtatttttagtagagacagggttttgccaggttggccaggctggtcttgaacttctgacctcaggtgatccgtcggcctctcaaagtgctgggattataggtgtgagccactacacctggatgaaaggatttttttaaaaggtgatcattggtcttaggtttgtagatgatgagttttcctaatgattctggagttccttagttcctctgttaggaactaaccttcaaacatatacttactgtattccttattactgaaattagaattataaatcttaacagtggatctgtaaacatttaaggcatggagaacaaaagctgtttcacaaatatagtgaatacagtgaggagggtctatactgatttaagttatctgagtagcataattcattacaaatgtaaaagaagtctaatgatgactagtacactgttagtgacatgaaaacccatcaaaacatgtcaaaattgaatgctgtcatttcaaaatcattgacgtaaaatcactgggtccatttttaggcttttcttcagaaaatttaattcttcacatgtaagggagacaatagatgaggatgaagatgtgcgggctgagagattaagagttgagagtggtgcagctgaatttgacttggtccaactttattgtctcacaaagacctaccaacttatccacaaaaagattatagctgtaaacaacatcagcattgggatacctgctggagaggta

SEQ ID NO: 25395 - DNA, 2300 bp, Homo sapien
tcagttcatgttcagcaaggtaaaattcttcttgtaatcggggctaacaatggacaagattaccaagtaaggtagttcactccttgttattagacatgttgaagtagagacaatagtcataaaaaaaaggaaaaaaaaaaaaaaggaaaaaaaaggagctgccgctctttatggtaccctcaatggaaaacatgtctaacctacgtgactctgagtctttcaggtgctgagaaactgcttttggggagagtttctgagttaattaatttggacttgatggctaagagtctgtaatagtagatttcctcccccaatccttaacataggatatgcttaaaaaatcatgttgcttgacacgactttgtgggattgggctcttttgaaaataacttttattgtctcttctctttctgacagttaatttatacctctggaaacaccatttacttaaggaagcatagagtaaaatgatatataaatcatggagtagtcatttcaacagtttttgcttacagaaaaaaatctctaggaacagaacttttaattaaacatttgcctggctctcaaagtcaggaaagataatctctgatgtttgtataattctggaactggaggctaatttgtcctctgtcatagttctcatttcttttcttttggggaatataattgtggcctccatggcattgaggacttttattagaaagtggtcatctgctgcaggaagcaaaggctaagtatgtgcctctgcatgtgtcttataatttgaaactattcttcagtccaaatgttcccttcattgacattatcttttagaaagcacatttatttcatttgatacacctgtaagtcatccacatataatttctcaagaaacagaaaagcatactaattaactgaaaatattcagctccttctacagttcccttttgcagagatatgagtttgcatttaaacttgttcactctgtttaattggaattcattttaaattaagcagctttgtattttttcttatcagctaaatgaagatcatgatttttgtgctgcataatttctgatggaaaacttaaaatatacgcagagttgatgaataccatcattttatcacctatgaaggtgtgcgtggtggcaggctttcggagagaatgctatatttgaacctgtttttagagggagtgctgaaattattagccacagagctctattgaggaagcaatggtttatggcctctatagctgctctgccatggaatttttctcagcactagaaaagcatttcaaagtatggggatggtagatattttttctaatgagttctttttttttaataactctagtggcaaaaatggagttttgaaaggccatataatcattccaaatttctaaagagaatgtaataaatatgtggttgaaccagaattgtactctggaagagaggatttcccttttcctactcttagtgtgaattaattggacctcatgttagaatcagagccaattagacttacagtcactaagttactcacaataggaacaaattgttagattaggttggtgtttgagtttgtatttgtctcacatgtatttagtctcttcatagaaactatctcttgagtattagtaatatatactgggtctgcattgagactttagggtttgaggtcaatattcatttatgaaattctaggtatctaactttgacatgtaaaattactatgcctgtgattaatactattttgtgtatagtgaattagaattttcaaatcactttacacacagttctatatgagatggatattatagttctcagttttcccaatggaaggtccaaggctaaggctgagaaataacattgctgaacctcaaatccaaatctttaaaagcttttcccaccacagtgtattataccatttatatatagtttctgaagttattttattgcttatcaagatttcccagaaccatatccaatctctttttcttaatcagacaaaatcctgacaagaggagagaggctggatggctttggactgttgctgaagaagatcatggctatactcatcaagaggttccaccacacccgcaggaactggaaaggtctcattgctcaggttatcctccccatcgtctttgttaccactgccatgggccttggcacactgagaaattccagcaacagttatccagagattcagatctccccctctctttatggtacctccgaacagacagccttctatgcgtaagtttctttctgttaactaaaagaatgtttccaaaatgcttccaggagtgtggttgt

SEQ ID NO: 25396 - DNA, 2300 bp, Homo sapien
gtaggtccatttataaatactgagttttgggagcagagattatgtttgtgactcactggaatttgctcttttgcaaaatagtacattatataaaattacatttttaggatgtaatttaggatagaaatccttactgataaaaagaggttatctatgcaccatatttctgtgtctgtgaatacaatttttttagctgtgtctatcccagtacatatatttatttttttatttttatttttattttttgagacggagtctcactccgtcgcccaggttggagtgcagtggcatgatctcggctcactgcaagctccacctcccgggttcacgccattctcctgcttcagcctcccaagtacctgggactacaggcacctgctaccacgcccggctaattttttatatttttagtagagacggggtgtcaccgtgttagccaggatgatctcgatctcctgacctcgtgatgtgcccacctcgacctcccaaaatgctgggattacaggcatgagccactgtgcccggcctgtgaatacaattttaagtatgcctaatcttacaaataaaaaagaagtaaaatctcagtttttaagggtctgtaacattttctatttcattaaggactgtttagtatagtatttctctcaatatactttatagtccttagtgaccaaagggaagagtctttatttaacttcagggtcaagtctgtcattgataatataaagttaattttctattagttacttattttaatggcttgacgaaaaagagaaactctataaccacatagtattacaaataccaattagcttgctgagcatcacataggagttcaaagtgagcaaaatttgatcttagaaaaagagttttatatacctttacattgcaaaggcataaatctcaacaggtttttgaatctatagttattctatatatagatgccaatacataataggtattactattgttaattaggtttgtttattctgggcatcccattcattcttggccctttaactcactgatgcattactgttattagagcaataatattcagctgcatcgtgaacagagcacagaaaaactctactctgctgaacagaaaaacctgagacagccactctgccagatagcaggggctgtacaaacgttacttaaacatgactgatacaggtgacagacaaggagatttttaattctgggatagtctttttacacacatactaatttaaataaagttaataatcaggaccagcaaaaaaatgggtgattgcatagttttgtgctagtacctttttagaaggctttaggttgcactaactagagacaatacaagaactattgaagctggtaataaaatatcccattgaaaatgattaggccaatgttaaaaatgacagcattgagacatactggattatttataaggaatgagtagagtctgaagagaagggaaataagtgatatcatttccctaaaggagctgaattaaagtattggatttatgatgtttttatttatgcaggggccatttaaagcattttcattttcaatttttatgtgaatgctgttgcacacttactcttttatgatacaaccttatgcagcaggctgaattagggacctatttaacttctgggggtaactcatggtgttgaattagatcttcgtatgtggtctccattagaccaaacttagtgactgccttccacactatgcaccctcatattatttgagaactctcagagcagttctgttaacatcagtcaatttgcattcacagctgcattcaattgagattagtggctgctttttgaaagatagaaaatatagattagtgatggcagatgtttcctgaggctacattctagacaactgaaggcaaaaaaaaaaaaaaaatccagtgacccataagactaaaattggcttcatttgattaacaaatcacgtggtagtcaatcttcattatagtacttagcagtcatctgcatatgcaggtcctgggataaaataatgtagtggcttgatgcacagacaaagaacttgttagaaatgcatatgcttgaccatcgggattattttgatcagtaggcatctatttcctataaatatcacaaatatttccaacaaaagagcatagatgtcttttatacaattcttttgagaatgattctgcagatttctgcattttctcctcattaatttgacctgggatggttttcactgaggaaaaaaatctttaagcaaacatgttaaatgtttacctatataaaaattattacttcaggtgactccga

SEQ ID NO: 25397 - DNA, 2300 bp, Homo sapien
gaggggaagttacacttgagtcagtcatttgagaatgagcacaatttcattttgggcagagggaacagcatgaccaaagcctgaaagtgaacagtcctcatctaaagtattctagcagatggcaggagggagggctgaaggtggagagacaactgatgaagctggcaagagccaggctgggaagtgccgtgaggctctatgaagaagcctaaaagagcagccttccttctcctgaattcctggagcaactactctttgtgaactcattttggccataatttttcatgcgtgtacttacaaaaaaatctctacaagtgatttatagacctgcctagagaaacagggaaaatccctgatgttcatttgtttctcagctcttcctgtgaagtgtaatacatgggactggagaaaacatagcacagagattaacagtacagaaacgaggttcgagttccttctctgctgttcccactgtcctcactgctaactaggtgaaatccagcaagttatggcacttctaaatatcactttctttcactgaaaatgggaataatgacagtttctatataataggactcctaggatgattcaataagtccttagcaaacattgctacccaattaatagaattaattgactacttactatgaggcaggacctgtgctagattcctttttttggaggggggatggaatctcactcttttgcccaggctggagtgcagtggcgccatctcagctcactgcaacctctgcctcccggtttcaagcgattctccctcctcagcctcccaaatagctgggattacaggtgcccaccaccatgcctggctaatttttgtgtttttagtagagacggggtttcaccatgtttgcgaggctggtcttgaactcctgacctcaagtgatcagcccgtctcggcctcccaaattgctgggattacaggcatgagccaccgcacctggcgaagggagaactcttaatgctttaacggattttgcaagtaaagtctggattagtcagggtaggtgtgaggatcaaaggggagcttcaccctactagccttggctccagtagtttattcaattacattcagcagcaagtattgaacactaatgatatgtaaagtactgtgatataaaatagtccatgtcctcaaataatttataatcttgtaggaaaaataagacatacacaaataaaaataatgcaaaaactttaagttccttgagagagggcaacaaagaatgattcaaaggcaagagaatctatcctatgggatatatccaaaaaggcttcattgaagatgtcaacttggggataactttgaaaggcaggatcttagagagggaggaatgtatcatggaaagaggaaatagaaatgtcttggatcagcctgtgtcccctttcactataagagcctgaaacaatgtggcttgtctgtaatagacacgtgaatctccactcacgaattgagggactccagtttgtaatttatgtcccctacagcctacctttccttttctgccctgtgcttaacctagtacattgtgatgaaaggtgggacctggccaacatagtttcttcccccaaaatcgaaacattcaactttaggttaaaggtggacactttccctagtatatctaatgatgggctgaggctcagagctttgcagctaagctctggccttattgacttaaatcattttaatgacactttaatattaaagagtcactgggcccagtgtctgtgaaatgctctctgtgccctgcctctgctagagcagacactgtgtgcaggaaagaagacaagagaatgtaggacaagtcctactggccttgcaaaggtcccaccccctagtccctgtgacgcatccagtgcaggtgacatgttctctaaggtgtggataggcaattaatttcatggagagtaggaggtgtgggttcagctgctgcttttttttttttttcagtgaggcattatctgaatgatgctcattctctcttgagtctggacttcgtgcaacaagcagcaactggatattattttaaaataagcataagccacccaaagatactgatctgggtccttcttttggaagaagagttgattgagaagtgcctcttggttaaggattaaccacagggaaaaatccagcagaaacagaagaactgtgggtttcttaccccagccctcaaggaagctatgccgtgaaaggggtactgatacactgacatacagcaagttggacggggcatcagttcttcatttgtggagtggagaaaagaagaggaaatctc

SEQ ID NO: 25398 - DNA, 2300 bp, Homo sapien
tggcaaacacactgaagacatgcgataatcttaatatattcctcgtaggaatgtgagaagtgttcagagcaaagggctaacatatttagaggtcaaaaaattgattccaggctggacgcggtggctcacgcctgcaatcccagccctttgggaggccaaggcaggtggatcacctgaggtcaggagttcgagaccagcgtggccaacatggcgaaaccccatctctactaaaaatacaaaaattagccaggcatggtggcacgcgcctgtagtgccagatactcgggaggctgaggcaggagaatcgcttgaacctgggaggcagaggttgcagtgagccgagatcgcgctactgcactccagtgtgggtgacagagcgagagtgtgggtgacagagcgagactctgtctcaaaaaaaaaaaaaaaaattgattctagtcaataggtatttattttggggagtaaagagatgggaagaattagagaaaggaagaggaaaaacaaaaataaatagcatgcagataatgagaaaatagactcatttttacagctgtgagctcagactaaaagataaacaatgctattactttggaatataattctaataacacaaaaaagactcatagaccacaatatgtatttattttgtggcaaaggtgtcatttttagaaagaaacaaatgtgttcaattttgctttccctgtttttaatgaattaagaaaggtcttctcttaccttcttttgactgtcatcattcctctcatccaggaatatttacaggtttgcaagaagacaccatctttaagtagtttttaggcacttttacaatactgactaaattgtataaaatagtattataaattaatatttaaattataattttatgacgtgaaaatcaacaacgaatgtcaatttcacttcgttttgactgtcatctgtggcctctggagtccctcacttaaatcattggtccttggttttattttttaagcctattaaaaaggaggatggggccgggcacggtggctcacacctgtaatcccagcactttgggaggctgaggtggacagatcatttgaggtcaggagttgaagaccggcctggccaacaccgtgaaaccccatctctactaaatatacaaaaaaaaaaaaaaaaaagtacaacaacaacaaaaaattagacgggtgtggaggcagaggcaggagaatttcttgaacctgggaggcagaggttgcagtgagctgagatggtgccactgctctccagtctgggagacagagcgagaccctgtctcaaaacaaacaagcaaacaagcaagcaagcaaacaaacaaaaaacaagttgggcatggtggctcacccctgtaatcccagcactttgggaagccgaggcaggcggatcacctgaggtcaggagtttgagaccagcttggccaacatggcgaaaccccatgtctactaaaaatacaaaaattagccgggcatcgtggcgcctgcctataattccagctactcgggaggctgaggcaggataaactcttgaacccgggatgtggaggttgcaggttgcacgtgacatagccgagatcgcgccattgcactccagcctgggcaacaaaagcgaaactccatctcaaaaaaaaaaaaaaaaaacaaaaaaaacaaaaaaacccagaaaaacaaaaaaacaacaaacaaaaagggaggatggtagataactgtccagatactttccagctttgccgctatatgaactattccttttgtttagttttcagcatgggagcttctggcacttttacgtactttccagcttctggggaccggctgcctagaataacaggcatttgccccagaggccgtggagtggcctcactttggggtcgtgggcagatcgctggctcccacgcctggacttcgggatcgcaggcaggatcccttccagcccaagcactccgcccaggcgcgccaggcagagccccaccccatcccgccgttcccttcagccccggggcgcggatcttgcatctgaaactgagcagagcagggcgccgggcagggccggcgggccacgtgataagcccggaaacagctccgccccctcgcttcctgagccgccacatcccggcagccctcctacctgcgcacgtggtgccgccgctgctgcctcccgctcgccctgaacccagtgcctgcagccatggctcccggccagctcggtgaggccctagcggagcggcgcggtctgcgtcctcgcctgcggccccccacgctcccgccttggcggcggccggcgggacc

SEQ ID NO: 25399 - DNA, 2300 bp, Homo sapien
ctttaaatgtttccaaacatgggaagtcccaacagcggtctttttttttttttcttaagagttgaattgtctcccttgaaaatgggattttttaattgtaacctgccacattccctatcacagtaatgggaacttactaaataggaagcaatttgagcacttaaatgtgctgatgtgatgtttcttaatcactttaatgagtttcataccactagaaatggaatagaagtttcaatggaaatataattaaatagaaaagtcatttcctgtacttgtaatttccccctgatcatttctttattcacctccatagaaagggtgccctacaggtgtatagtgatgttattatacagacttatttgcataattcacttagattattagagctgaaaacaatataaaatgtaacattttattacaaatcaagtgtagcaaggcaatgtaaaactttaaaacgatgatatttctttttaaagtctgattaacatttactagttttacctaatttttcttgcattgttgatttcttgcctaaatatagatttttcttttagtaatgccttttcaatcttgcccgcttaaaacaattctcgggggaagcaataacctgaatcaataaaaacggcaaaagatctttggaaatagttggttctcctgtttgagatcaggagtaaacaaactgtttagctgggagcttatcaagccatgctaaaagtgtcagctgacacaaagtaagacacattagattggggttatcatacaatggggtttccccaagacaaaactctatactatgctatttgctgagaaatgatcagtacaaaagaaagtttcatcattcttgcattgtgatgctaaaagaaaaggccttgtaaatgtgtttaatttgctattcgtttacttcataaatttaatgtatcactttggagaatccaacagacattttggaaaaggtggcatttttcctgaccttaagtggggaacttgaggttttttacatttcaacataaaagtaaaggggcttgctatccatttagttaatacagtccaactgtatttgcctaaactgcattttttaaattttttatttttgagacgaagtctcactctgtcgcccatgctggagtgcaatagcacaatcttgactcgctgcaacctccgcctcctgggttcaaacgattctcctgtctcagtctcccgagttatggggaccacaggcatgtgccaccatgcctggctaattgttttattttttgtagagacaggggtctcgctatgttacccagactggccttgaactcccgagctcaagcaaccctcccacctcggcgcctcaaagtactgggattacaggtgtgaaccacccttcccggcccttacactgcattttagggtaaatatttttaggtttgtagttaggcaagtggtttgaagcatcatcagtctcaacctaaagctgctctttccttatgtttttagatatcaaggctttaagcaagattcagatgaagggcctgctttaccagctcacctatgaatatggaagcatcagcttactttttgcagcacatgtgtctcagggggttgtcccttcccacagtgtgtagattggcatcgagatgacgttctctctccagggtgcagtgatgaccgacatatgtgagacagtcgtttaatatcacctttattttgtactttctgtgatttttaaaaaacatacagagcagctctcttggtgactattgggctgataaagcttaaagatcagtaataaatagaagtccaggggctgggtctgtatttcgctaaggaaacctcatctgagcttcatgccctgtaaaattaagctctaaaacctcccctaaatgagatagctaaatgtcaaagcattttataaactgtaaatcaattcaaatgggagttagtatttttttttttcaaatgaacatgaggaagtatctttctgtatttagttttaatattctttgccaggtgtttattgaaataccttctttcattgtacattagtatatttaaaaagtgctttgcatgtcttgtttattatgaactactaattttttactaataattatttccatttccactatttactattctgaatgtcacatttatttatttatgttttttgggatggagtcttgctctgtcccccatgctggagttcaatggcacaatctcagctcactgcaacctccgccttctgggttcaagccattctcctacctcagccttctgagtagccgggaccaaagacgcccactgccatgcctggtaacatt

SEQ ID NO: 25400 - DNA, 2300 bp, Homo sapien
atctgtatagcagtactgctcttagggatgattcacataaatatgtggtgtttgcgctgtgatgatacaaatttaggacagaaatagaacccacccctagatcaagtctgcagtattgttctcagcttatgcgtgcatctgtcttgtgtctatatgcagatgaggcaacgtgttatgatgatgggaagacataccacgtaggagaacagtggcagaaggaatatctcggtgccatttgctcctgcacatgctttggaggccagcgggtaagactggatgtgccaggctccctacaagttagataagataaagggtgggctcctgcaaggatgtgtcgtacacacaggaggggcagagacccttcggaagtattaaaataccacatttcctgttggcatacaactgctgacatagagctctagagcagctctatgtctaccttacatgccattcattctttctattactcttagtagaaagaatgaatgaatggcatgtagagtaccaaaaacacaagtcttgagtcattcttaatagcaacacctgtcatttatatgatgttagaatcattttcctaagctccctagcatgtcagagatactatttacactgaaaaatagtgaagcagagatactattcaaattaattagtggtaaatagaatgtgtttcatttcagccggttctccccatcctgggcagcctgagaccctcccctcccctactattctcaggctgcttctatttttcagcaaagtgttaagtgcagtgtagctctaggcctccaactccattctgatggacaggtgtcccatggcaacgttgttaaatattttgaataatatctcagatgtaagaaaatgccacttcttttaacctctctcttgattcagaacagatgcttgttataggtctagcactgtgctaagtagtataggaaaaacagaggaaatgagaaatggcttggctcttaatgatatagttgaagatgttaaattagcatacatttcaaagtcaagctaattaagttctaagtgggtctgacaaatacagttctgggtaggctggaattagcaagaaagagaagcatgaactggctgaggtttacgatgactaaggtttagttgggaggggagaaagcagagagacacaccccctgggatagaaaggagctggcccaggtgggctttggtgagccaaccctctgcctgctgtcttctggtaagaaaatagatgggaagaagtggcttatggagggccttggcaacccattatttaagccagtacttctcaaccatttctaaaatatgcccagtataacaaaaaataataagcctttctctaatatgatttcaaatttcaaaatgaaattatgtgtaactcaaaagcaatggaatgtgacagccctttgttttcaacgaagacatgccctcccagcaactccccaaatcctggtgggtgaggggcatgcttcacactcaagggtgagactcattggttaatgccaaatgcattaaccaattacaggtatccaagatgcaaagaaacatgatggaaaatagtctttgggaaaattaatctggcagcaggggtgttcaggggcctgtcttggctccaccaggggcagcccatggaaactactatgatcttgtttcacccccagtgattacatggggagggaggtgctcccaattctgatggaggagaattggagattggaatttagattgaattcagtatctctctctgtctctctctctctctctctcccattaacacttacaacgactgtgattgtatgaccttagaactcagtcattctggtatgaaattgtgtgatggagaatgaatttgctgggaagttgattttggtctcacttcagcatcttctcattatttatgcacatgaaacctttcatgtgcgacacttattctattctcaagtgctaaatgaaacatttaagacaggagtggaaactgttcactttctcatatgaaagcaagattcagtgattctgtaaggaggtagtcactggtattgtgttaggtattaaggggcatatgtgcttaaacagagaaatatgtctaaaatatttaaattctaatataaaaaagaaagtgactgtattatttagggctgcattttagttgtaagaaaaaagtccaactcaagcaaaaatggcccacacaatggaacagtcccaggacccaccggcttcaggggctgctccagcaatggcgcccggactccctcttgctccgcgtgccttcccatgcactggcttcgtgcttcagcggggtc

SEQ ID NO: 25401 - DNA, 2300 bp, Homo sapien
tttccagatcatggttctgaagaccctgtgacacgtcccagttcacctactgtcttgtgagtcagaatatacaaataactttttggtcctgactttccccacccctacaggatggtgccatgacaatggtgtgaactacaagattggagagaagtgggaccgtcagggagaaaatggccagatgatgagctgcacatgtcttgggaacggaaaaggagaattcaagtgtgaccctcgtatgtcatcacagatcatttttagtgccttattaagcattctcactttcattatcaggctgtaactctcattcacagaaatgattggagactttaggtctccttgaggagtgaacagtgggtttcttaatcttttgatttgggaaagtggagacaagcttcaaaaatgagtcatgatttaatgttattacaggacactttagcacttgtccaacctgagtattttgaccattatctgcagtaaaatgctacaaagaagctttattggtctgtagattcaacttttaaaatatgatttccatcttcccgttggaccctttccagtgtattaggtctaatttttggaagtgccaccctaagatctgtatagcagtactgctcttagggatgattcacataaatatgtggtgtttgcgctgtgatgatacaaatttaggacagaaatagaacccacccctagatcaagtctgcagtattgttctcagcttatgcgtgcatctgtcttgtgtctatatgcagatgaggcaacgtgttatgatgatgggaagacataccacgtaggagaacagtggcagaaggaatatctcggtgccatttgctcctgcacatgctttggaggccagcgggtaagactggatgtgccaggctccctacaagttagataagataaagggtgggctcctgcaaggatgtgtcgtacacacaggaggggcagagacccttcggaagtattaaaataccacatttcctgttggcatacaactgctgacatagagctctagagcagctctatgtctaccttacatgccattcattctttctattactcttagtagaaagaatgaatgaatggcatgtagagtaccaaaaacacaagtcttgagtcattcttaatagcaacacctgtcatttatatgatgttagaatcattttcctaagctccctagcatgtcagagatactatttacactgaaaaatagtgaagcagagatactattcaaattaattagtggtaaatagaatgtgtttcatttcagccggttctccccatcctgggcagcctgagaccctcccctcccctactattctcaggctgcttctatttttcagcaaagtgttaagtgcagtgtagctctaggcctccaactccattctgatggacaggtgtcccatggcaacgttgttaaatattttgaataatatctcagatgtaagaaaatgccacttcttttaacctctctcttgattcagaacagatgcttgttataggtctagcactgtgctaagtagtataggaaaaacagaggaaatgagaaatggcttggctcttaatgatatagttgaagatgttaaattagcatacatttcaaagtcaagctaattaagttctaagtgggtctgacaaatacagttctgggtaggctggaattagcaagaaagagaagcatgaactggctgaggtttacgatgactaaggtttagttgggaggggagaaagcagagagacacaccccctgggatagaaaggagctggcccaggtgggctttggtgagccaaccctctgcctgctgtcttctggtaagaaaatagatgggaagaagtggcttatggagggccttggcaacccattatttaagccagtacttctcaaccatttctaaaatatgcccagtataacaaaaaataataagcctttctctaatatgatttcaaatttcaaaatgaaattatgtgtaactcaaaagcaatggaatgtgacagccctttgttttcaacgaagacatgccctcccagcaactccccaaatcctggtgggtgaggggcatgcttcacactcaagggtgagactcattggttaatgccaaatgcattaaccaattacaggtatccaagatgcaaagaaacatgatggaaaatagtctttgggaaaattaatctggcagcaggggtgttcaggggcctgtcttggctccaccaggggcagcccatggaaactactatgatcttgtttcacccccagtgattacatggggagggaggtgctcccaattctgatggaggag

SEQ ID NO: 25402 - DNA, 2300 bp, Homo sapien
cgattattatcattgctgctacttcctggagcttaatgcgctttgcttttttggctctaacctctctcggctagacgagcttccccaactggtaacccttccacaccccaatcttcatggaccagagatcttggatgttccttccacagttcaaaagacccctttcgtcacccaccctgggtatgacactggaaatggtattcagcttcctggcacttctggtcagcaacccagtgttgggcaacaaatgatctttgaggaacatggttttaggcggaccacaccgcccacaacggccacccccataaggcataggccaagaccatacccgccgaatgtaggtgaggaaatccaaattggtcacatccccagggaagatgtagactatcacctgtacccacacggtccgggactcaatccaaatgcctctacaggacaagaagctctctctcagacaaccatctcatgggccccattccaggacacttctgagtacatcatttcatgtcatcctgttggcactgatgaagaacccttacaggtaattaattgttctcttcacttctcatggggcagcacagaaaggaataagttaggtaactgaagtgaccagccctcgaataaaaagtggcttcatggccgggtgtgatggctcacgcctgtaatcccagcactttgggaggccgaggcaggtggatcatttgaggttaggagttcaagaccagcctggccaacatggtgaaacctcgtctcttgaaaaaaaaaaaaaaaaaaaagtggctccacttttagaacctcttagaagatggcacatttaagccctgcttttttttttttttaaatcccaatatggctctactttggaggacataccagagagtcactagcttttatttcatagagaaaatgaaactatttctcttattctcacacatttgaggttcctttttgagtaagatagatgattctagaaaagaaagatattctacctgaatttccatttgtgtgcagaagtctaaaacactacctttacgatttgtccttgaagaaccccactatctacaacatatctaaagaaaaaaaaaaacaggcgaagctgtgcatagcagctgataagtgattgattctctaaaacgtatattatttaatttgtgttgacagtatccatttttttttttccccgagatggagtcttgctctatggccctggctggagtgcagtggcgtgatctcggctcactgcaacctctgcctcccaggttcaagcaattctcctgcctcagcctcccaaatagctgggattacaggcatgtgccaccgcacccagctaatttttgtatttttagtagagacggggtttcacgatgttggccaggatggtctcgatctcctgacctcgtgatccgcccgccttggcctcccaaagtgctgggactacaagcatgagccacccactacacccggcccactgacagtatcaatttttattgtgttgttacttttagaaagtggcagaatttaaaaactgacaacactgtaggaaatttatgagcttagaaacatgagtttgaggatttgcccaactgttttaaggactccacactggggtcagatgtcacctggaggagcatgaccgtgtctcccatatagcgcagtgtccaggttttatgtgaagcaaacatggccagggcttccagagggcttatgcagacctgcgactgaagcaagatcaatggcaggccgtctctagtattgtcgagggctcctgttaactacggagcacgtaggtagattgttggcaggaaaatctggcaggaacgatggcccctatccttgttccatttctctcctcagctggttaggaccactataccctccctcttttttttttttttgttttttgttttttgtcttcctttgctttgtttaaacagtgagggttattggtaagaggagagcccgtgtcattcctcactataatgctttctctctgctttggatgtaccgataattgcagttcagggttcctggaacttctaccagtgccactctgacaggcctcaccagaggtgccacctacaacgtcatagtggaggcactgaaagaccagcagaggcataaggttcgggaagaggttgttaccgtgggcaactctggtatgtaaacacgtactatttagacacaggctcccctctgctgtacaccagagatgggcttttctgttgactgtacctttgttgccattgtctttttatctttgggatttaatgcaacacatcaacatgaaataaatgagcaac

SEQ ID NO: 25403 - DNA, 2300 bp, Homo sapien
tataatctgcaggactctctttcaaatttatattccagtggtggtatatgatgctgatagattttcttaaattcaaaaaggcaaataagaccacgttaaaagaataccctggaaaggccaggcgcggtggctcacgcctgtaatcccagcactttgggaggccgaggcaggcagatcacaaggtcaggagatcgagaccatcctggctaacacggtgaaaccccatctctactaaaaatacaaaaacaaaattagccaggcgtggtgatgggtgcctgtagtcccagctactcgggtggctgaggcaggagaatggctgaacctgggaagcggagcttgcagtgagccgagatagcaccactgcactccagcctgggtgacagagccagactccatctcaaaaaaaaaaaaaaaaaaaaaaaaaagaataccctggaaaagttagccaaaaaatgtctattcaggcgtcagatatgatagtaagataattagtttgcgatgcggactttatatgcaggatatttgggtgtttatggaggaaaagtgaagtcgattttaccttcaagaggccaacagccagctggagaggaagtgcctgctcccagtagcgtctgctggtgagaccgacttccacttgactagctgagcccattgacataatgtgatggttctattctcccttcaggcctggaaccgggaaccgaatatacaatttatgtcattgccctgaagaataatcagaagagcgagcccctgattggaaggaaaaagacaggtaagagtatcttgcaggtaacaaggagaaagataggacaaaactaataacaaatgagcaatcttgcaatatgaaaaggttctccatgttttgatgcatttcttgtgattttttttatctaacagcatagtgtatatattgtattctttaataggagaaataatttaacatgcactgcagagtttggttttattttttttctttactacagccactcaatataaagccttgttattcaccttttaaaaattcaaacaagatgttaaaatgtaaaagaagagctatcattgctcttcttttataccttctgttgaattttaaaatgtttccttttttaaaggagggagagaaacctctcacatttatctttatttggtttctacaacttagagctaaataatgtcttacttttgcatccagtttcagttaatttcaagaaaatgtgtattcctgatataggaaaatttcaaaaatgaacatgtgtgttttatctatttttaccatttcaaaccatgaaaaactgttgagccaaacctctgtaattctcatacttatgacactgatatgattagtctggattctacttcctacaacttgcttctcaaatttaaaaaagaaagagagaaagagaaagactgcacatttcagttccattaggtctaatttgagcagaggcagcttctacggggctcagcggtttaaagctgtgtgtatgataaattcatactaacacttttttctttctaaactataaagaaacctttgagaaaaatcctaaagatttctttctggaaaaagtgttttgtgatctcagaactgctcattttctggtggcttttatcaaattgatgaacagtcattgttgcctgaatcgattattatcattgctgctacttcctggagcttaatgcgctttgcttttttggctctaacctctctcggctagacgagcttccccaactggtaacccttccacaccccaatcttcatggaccagagatcttggatgttccttccacagttcaaaagacccctttcgtcacccaccctgggtatgacactggaaatggtattcagcttcctggcacttctggtcagcaacccagtgttgggcaacaaatgatctttgaggaacatggttttaggcggaccacaccgcccacaacggccacccccataaggcataggccaagaccatacccgccgaatgtaggtgaggaaatccaaattggtcacatccccagggaagatgtagactatcacctgtacccacacggtccgggactcaatccaaatgcctctacaggacaagaagctctctctcagacaaccatctcatgggccccattccaggacacttctgagtacatcatttcatgtcatcctgttggcactgatgaagaacccttacaggtaattaattgttctcttcacttctcatggggcagcacagaaaggaataagttaggtaactgaagtgaccagccctcgaataaaaagtggcttcatggccgggtgtgatggc

SEQ ID NO: 25404 - DNA, 2300 bp, Homo sapien
taaaagtttcttccaaaatgtaaggtgggctttccacttcaagctccactatgcatatgattctagtgtattttcagtgcagtaaatatatcaaactatcatggttttggttgaccaaatacttttctaatcacttatttccttcccccagaatcaatgaattttaagaaagctttagctacaggtttatcttgcttacatccggatttccaggtatccttccctctggaagaaacactcggcttcccagaaatttaccaagcattttacaaggagctcttttatatttgaaaagagaaaactgttttgtcaagtgatgagaaattccaaaaaaatcctctaacccagacaggattctaaatttggggaaatccatggcactctttcaatttggagtgtgggtcacaaagattcctcaagaggtttttttacactatttgtaggaaactgatatttgctgggtgttttgctttgttttggtttggttttaaatccttgcatgaataaaaacaaatgctaattttgtgtctttaatgtgtcaggcattttatagaacacagagttctaattactcctgtggcaattactgaaggtgaaacttttggagaaaataggtaccttgccgaaataaatatattttattagtagcttcttgtgttttaaagcaaatggaacctctgaactcctaacacaaggagaaggcaaagcattcagttcgggtctctctggatctactgtggaagtggtggactcctccttctgaagatctttaaaagcaattgtgcctgtgtttatctgacaaaaaggactgatgtgatgtgttgctaaatgagagacttttcagattccctttccactctgagtttagagttcaaggcgggggaatcttaaaggagaactttccacactcttggagtaaataacaattgaaatataaaaaatctggcggcgggggatggagggggcattctgtaatggaacttgtcagcaaaaagaaaatggcaaataaatgtgagaaaggggccgaaggagggcaagacagtacatagggtgccccccacccacccggcttttaatgattcaagcaaaaaaatctctgctttgtgtgtaactggcacggtgaacgtgggaaaggacacgaagacctttctctccccacagctggtccaactttccaattttcaggttgttcacagtgatttcactttcagtggaaacgggcgtcccatccccaggaaaggaaggctttcctgcatgtgtaaaaaagtaaactgttactttgtccttgcaaaagaaaacttcattctctgaacttccccgggatctgcaaagcgccccgcggaactcccggtacttagtagaagctcattaaaggtctctgttcccctttgctccccgttcgcccgctggccctttctcagagccagacaggcacagcgctgagaagggaagaagtccgaacagggagctgtgaagacaaaataagggagtcccgagtcagtaccctttagtccaaagaaagggagcgggatggggggaaaggcagccccgccctgggactgaaaagtctggattcttaacagctgcaaggtcgtggatattttatgggttttcttcctcacaaaatacactcctataagcagagattccccccctccaccccgaagagaggtgacgcaatgtcctcaaacactaccaccacccccaataaaaaagaaaagggaagggggagcgtcttgcaaccccttcgcttcacacaagtccagccactccctttcctcccagccgcttcccatcccttcccccatcccctaaaaagtttgatgaccgcaaaggaaaccgaaaaaaagttgtcttgccccagtcctggcgggccatcagcatctcttttgttcgctgcgaacccacagtcccccgtgacgtcacccggagcccgggccaatcggcgcgcggtcggctgcggcggccggcgggcgggcgggcgggtggggtggggcggggcggggacagcccggcgggtctctcctcccccgcgccccgggcctccagaggggcgggaggggaccgtcccatataagccccggctcccggcgctcggacgcccgcgccggctgtgctgcacagggggaggagagggaaccccaggcgcgagcgggaagaggggacctgcagccacaacttctctggtcctctgcatcccttctgtccctccacccgtccccttccccaccctctggcccccaccttcttggaggcgacaacccccgggaggcattagaagggatttttcccgcaggttg

SEQ ID NO: 25405 - DNA, 2300 bp, Homo sapien
gaggagatgcaggtaccgcaaatgacttggctgatggcagggcagccctgaagcaggcacagtccttcagttgtctatctcctcattgatcagtgagtggataggggccacttcaggaaaggtgtgacttggagcatgcaactcccccgctgagagcaaatcccacggacgatgtctcctgagtaccacggtcgctgatacggtttggctgtgtctccacccaaatctcaccttgaattttagtttctgtaattctcatgtgtggttggggggacctggtgggagataatggaatcatgggggcagtttcctccctactgttctcgtggtaatgaataactctcacgagatcctatggttttataaggggaaacccctttcgcttggctctctgattctaccctgtctgctgccatgtaagatgtgccttttaccttctgccatgatcgtgaggcttccccagccacgtggaactgcgagtccattaagcctctttttctttataaattacccactcttgggtatgtctttatcagcagcatgaaaatggactaatacagccactaacaccacagccattggtggaattggtttcggtcctgaaatcgcagtatccactctagcgccatattttttttctctcaggtaactgggcaaggatgggagaaaagaggaaaaactgtgtttatggaggtgtgtaaagatagggggaaaaaagacaagctgtggaggaattaaccaaattgagctttggaagacagagggcagcagggagcagctcttgcaacacctttctgaggggaagaggaggtgagagggaaggcccggctcaggctacaggctgctcttgccagaacagttgagctgctggtgaggatatgctgccctaggggaaggagggacagtagactgacctgatattcaaggcagggaacagttgatgacattttatattctaccttagggggtcctgcacagagaagcaggtgagggctgctatggtaattcccaacgtgttttatttattttattttatttttaatatggcaatacagatcagttttgttttgttttgttttgtttttttaacattttgcatctttctacaaagtgttatacgggcaatttttcttttcttttctttctttcttttttttttttttttttttgagacagagtcttagtctgtcgcccaggctggaatgcagtggcttgatcttggttcaccaggttcaagcgattcttctgcctctgcctcccaagtagctggattacaggtgtgcaccgccatgcctggctaatttttgaaatttttttagtagagatggggtttcaccacgttggccaggctggtctcaaactcctgacctcaggtgatccgcctgccttgacctcccaaagagctgagattacaggtgtgagccactgcgcctggcctaggcaattatttttgatgccaaagtagaattaattgttttcattaatttttaaattaaggccaggtttgatggctcacacttgtaaatcccagcactttgggaggttgaggccagaggatcacttgaggccaagagttcaagactaggcaacatggtgaaaccccctctctacaaaaaataataaaaaaaattagctgatcatagtggcatgcacctgtagtcctagcaactcaggaggctgaagcaggaggatctcttgaatccagaaatatggggttacagtgagctatgatggtgccactgcactttagtttgaggaatggagcaagatcctttctctaataataattaatagtaataataagttttaaaattaactgtgctttaaggatttttgtgataccttcctagacatcctgtttattgttgcagaactgattggattctctttcatagagctctgaccatagaggatacaaagcaaataaatagaacaatccttgctttcaaaggagattttgatacaattttgaaaaaaaaaaaaagaatgcaaagtatgctgctcttcctaatgccaaggagtattttactttttagcaaaaaccttctcttaaatgtggagaacactcagggggaggtggaagagagaaagcagtgaacagattcatcttcccttctatatctgaaaggataagcaggctgtgctttccagagtgagttagcatgctattttatacaaattctgggaaatgtcgggcgtttaagtgttgctttcttgtttgtttagttttcacggtactccggaatgtgtgtatctcagacatttgaaaggcattctgtaacctatattccagatattat

SEQ ID NO: 25406 - DNA, 2300 bp, Homo sapien
tatctcaattactccccagatattttctgacacagctgccagagctggcagaatttgaggtgggtgaactccccccatccctgtcctcactacttacagtagcccatattgaacttgcctcattctgctctcttctgctgtttatgaaacccatttagcgcttaattacacattgcctagaaccactgcctgtattaggcagagctctttcaggcaagagtcaggaacccaaattaacctacttcagaaaaaaagagaatgtatttgttcacgtaacaaaaagtccagggggtagttgatatcaggcacatctagatcttgggactcaattgatgtggccaggattcatcacttctcctaagctgcttctcctctatggtttgacttaggcaggctcttgccatgtgttagcaagatggccccagaagaaagatcctctttcataaaagttccaaaaatggagttgattagcattcatggaaagtttaatatgtaccaagcatggttttaagcactttgcctttatcgtcttacctaaactgtctcaccatcctatggctagaaattattttcccaatttcctacccaagaaactggagccatcaaagagcagataacttgccaagttcttacacctggtaattagtgaagctaggatttgaacccaggtagtcttctgcttaactactatactgtatttgaatctactcatattgggttggtttggattatatgcccatccctgggccaattactgtggccatggctgggatgctctgactggccaggcttggatcgctgtttactcgtacactgaacataggttcaattctacccaaaacaagtggactgagagtggaggagacatgtgttttcccgaagggaaaccagaagggaaaacagattctgtgcagaacaaatcatgtgatgtccactacactgtccattgtttcacatgtgttggtttcctctaataagagaaacatataacccaacattgggtacacattagatgttgaatgattgattcattgatgaactattcttttagagagacggattttgaggttaagtaaatgttctttgttttttttgatatggggtcttaaggctctgttacccaggctggggtgcagtggtgccatcttaactcactgtagccttgacctcctgggctcaagtgatcctcatgcctcagcctcctgagtaactgggactacaagtgcgggccaccacatctggctaatggttttttgttttgttttgttttgttttgtttttgtagagatggggtcttgctatgttgaactcctggcctgaagcgattctcctgctttggcctcccaaagtgctggggttacaggcatggctaccatgctcatcaagtggctcttgttgaacttgtaatatgttatgcttctggcaaaagaactggagataaaaagtgttaagtcaccattgatttcacagtggatcattttagggaccatgagcttgttgcccagaattctgtaggaacatttcaaatgccatatttgtacatatctaagtgactatcttagtatgcaatatgaggttttctaaaatgtctataagcaagccaatatagtgaacaataacctcactatgtttcatttaagaaattcatgggaaaagacctatggaaggtgaagggaggaattgtcgggctgtcaggggaaagagtgaagaactgtggaatgagctccctgcctggggccaggaggagggctgggtagtacaagctgggatggagtgagggggagactcaacagtagcctaatactgaagtggaacttcatgttctgaaagcaagttggctgtgtgacttggtttagtcactggctgccagaagaaccatgatgagtaatagaggtggaaatatgacacactggcagatggaggccgacaggaatgccaccactccattcactcatgttccatccagcaaatgaagtatcacgagcacacgccagaggaaccaaattctctagggtgagtcaggtatagctttttgaagaggtgacctttaaactgagactaaagacaagtaggattttactaaatgaataggattttactgaatccaggaattggaaggaaaagaaaacagttctctattcatgctagttaactaatcaattcaatatgtattaactgagcacgctacatgctaggcactcttctaagtgcaggggagacagcagtgaagaaagcagacaaagtctctgaactcctgtgtcttctattcaaatggggaagatgaacaatgaacagataac

SEQ ID NO: 25407 - DNA, 2300 bp, Homo sapien
accacctcgactgctaccacccaccaccctggtgtaaaccactgtcatctgtcacctggacctttaggatggcctccatatacatctcccttgacacttaggtttttctcaagacagcagccattggatcctattaccatctcagttagaccatatcgttccctctactcaaaaacctctgaagattttctcagctcatgtggagcaaaatccagagtccttgcaatcaatgtcctgcaacgtcccgtgttccgctatctcctataactcttccctttccatggcccccttctctctagggcccctagagtccatattctcccacaggtaccctatagttcattctccctcctctggggttttgcccatattcactccgcctgaaatactcttcctggcgatatcatggctagcttgctcacctccttcaagtttttcttacatgtcacagtctcagcgaggccttccctgaccacctcatttaaaagtgcaggcatcactcccctccacccaacacacacacgcacacgcacacatacacgaacacacacgcacgcgcgcgcgcacacgtacgcacgcacagacgcacgcgcgcacacacacgcgtgcacacacacaccccgctctccctggcacttcttattcccttccctgccttatttttctccatagtacatatggactcctaacatattgaataatactttgtctgacttcccactagaacgtttgctccattagagtaaagatttgtatttgtttcattcactgctttattcccggctcttagaaaatacccagcacataacagatgagatgctccataaatatttgttgaataaatcagactggaaaagacaaaactttagattgaaccttgcatttggcgagggtatagggaagtagatactttcatatgttgctggtcagagagtaaattcggattatttctttggggagcaatttggcaagatccatcaaaattaaaaaggcacctgaccaatgacccagcaattcaactgccaaacatttatccaatagatatatatatctttaattttatttttttttttttgagacggagtcttgctctgtcacccaggctggagtgcagtggcgtgatctcggctcactgcaacctccgcctctcgggttcgagcaattctcctgcctcagcctcttgagtagatgggactacaggcgcccgccaccatgcccggctaatttttgtatttttagtagagacggggcttcaccatgttggccaggatggtctcaatctcttgacctcatgatccgcccgcgtcggcctcccaacttgctgggattacaggcttgagctaccgcgcccggcctatccaatagacattcttgcagacgtgttcaaatactttggttcaagaatgttcactgcagcattatcttaataatgaaaggccggaatccacccatatgtccatcaataggggtctgagtaagtaacatgtgggcatccttaaaactgcttagcatgcaactgttaaaatgagaggaggatatccacgcgctgacaagggacagcctccatgatacactgagtcaaaaaagccaggtgcagaaatgtgtggagtatgccgctgtttgggtcaaagggatgaggacaggcacatatattaacaagtttgtacaagcacaaataaatacaactatatataaatagctctggaaactcacaagtggttgcctcacaaataggggctatttaaggactaggaggtttgaaaacaatttttcaaatcattgtaaatatattatttaaaaaaaaaccctacgccgatatgcatcaatccatgctcttttggtaacttttactctgtgtggagctgacatcaaaaacatgcccaaaactctgctttgaaggcctgtaggggtgggggaggatctttaatttcctcgcgcagtgaagccaataaaaggtacgaatagattcagcccaacctcgtgctctgtggctccagggctttcccctccccgccctcccccagcccggctgccagcctccggtgccctgggattttgaggactggctggagtccctgcttcacccttagagggcggtagcggggcgtctcgtggacgcatgcgccccaaattgcgctcggggaattaaaagaggggaaaaaaagcccgaagaaaactcacgccccaaacaaaacgcaaggagaggagggcgcgcggcctgcagccctcgcccgcgtccccggccgcggcgtgatgcgcgcggaccagcccgcgacgcccgggctgccgctgtccccgca

SEQ ID NO: 25408 - DNA, 2300 bp, Homo sapien
tctactaaaaatacaaaattagcctagcaaggtagtgcgtgcctgtaatcccaactactcgggaggctgaggcaggagaatcgcttgaacccaggaggcggaggttgcagtgagccaagatggcgccactgcactccagcctgggcaacaagagcgaaactccatctcaaaaaaaaaaaaaaagtaaaattggaatgctattaggtttagaattctacttttcccaataatatggtatgcatttctccaagtaagtcttcaatagcaagatatttatttatttattgagatggaatctcgctctgttgcccaggctggagtgcagtggcttgacgtcagctcattgcaacctctgcctcccaggttcaagcgattcttgcgcctcaacctcccaagtagctgggactacaggtgtacgccaccatgcctggtttgtatttttagtagaaatggagtttcaccatgttggccaggctggtctcaaactcctgacctcaggttatctgcccgcctcggcctctcaaagtgctggaattacaggcgtgagccactgcgccaggaccaatagcaagatatttaaacggaagcattatatttcattgttattgatttaactattttccttatattggatttttaggtaatttccattttttcactactcaagactacatccttgcatgaaaatctttgcttgactccgtttccttaaattcctgaaaaaggaattactgtcatagagcataaacattgtgaaggtttttggatctttttttccaaattgccttccagaaagtttgtaataatttacattcctgccttctcattcctgcatcaacactttaatttttcccaacatttcaaaattttgttagaaaagttaaatcttactgtttcatattttattaccaataaagttgattattttttcatatgtttcttgcctgtctgtagttcttcttttggaacgcttagtccataccattagtctaatttttctatcagtgtgttggattttttctttatttgtaagagctctttatgtataaggctgttggccgaatctagtggctcagcctgtaatcccaaaactttaggactcagaggcaaggcaggaggatcccttgaacccaggtgttcgagaccagcgtaggcaacagagtgagaccctatctcaaaaccaacaaacaatttatcttatgttgcaaatatttttcttcatatgcctttaaactttatatatttttttaattcaatgaggatttacactttcatacaggtagattgatttatgttctcctttgtggtttattccctcacttatgtgtttacaaaggccttccttcacccaagttaaggtaaatattcagcatatttccttgctgtggttaagagatgtgagaagatactatgagagactcactatgttcacaactttttccagttaaatgaagtcttcccacgtttcctaatcactcacattaagcatatagaatggattaattttaaatctgaatataaaactaattgcacagcatgtttcactgctcttcttactgcctacctggggcacagtctctttggcctgagtggtctcttcagtttttaacgagtggctccacaattccttaggaagagctgctctcttctgtctccctggtggtcgtaatttcgcccacacctgccccgtctttgctctgcagctccacactccctcagccccgccgagagctcctggctcccgtctccaggttaccccaggtcaccacagccacctctctgcaccagcggcccgctcacgtacccagctccaggagctccttcacgatggcttttccgatgcccgtggccccgccggtgacgatggccacttggccctgcagcaaaccaggcgccaggtagctcctgcccttagcccaggaggccatccctgcagcggggtgccagagcagctgagcgcaggcccttctgggtctcagggacattcgaggcgggcgggcggacagggcggtgctcgagcccacgtgaccaccagaaccccgcaccctccccggcccggccccgccccgcccgccggccgcggcaaagccgcatcctcccggagcagaaccgctccccgccggctgtccgcaacctccgccagcgtcggtccctgggcaggtgtgggtgagactgctcgttcgtttctttaaatttcgatgccattggggagggtggaagggaaatgcaaaaaaaaaaaaagaagaagaaagaaacaagcagggtgtgctctatttcaaaaattcaatcctcagggctga

SEQ ID NO: 25409 - DNA, 2300 bp, Homo sapien
tccatctcaaaaaaaaaaaaaaagtaaaattggaatgctattaggtttagaattctacttttcccaataatatggtatgcatttctccaagtaagtcttcaatagcaagatatttatttatttattgagatggaatctcgctctgttgcccaggctggagtgcagtggcttgacgtcagctcattgcaacctctgcctcccaggttcaagcgattcttgcgcctcaacctcccaagtagctgggactacaggtgtacgccaccatgcctggtttgtatttttagtagaaatggagtttcaccatgttggccaggctggtctcaaactcctgacctcaggttatctgcccgcctcggcctctcaaagtgctggaattacaggcgtgagccactgcgccaggaccaatagcaagatatttaaacggaagcattatatttcattgttattgatttaactattttccttatattggatttttaggtaatttccattttttcactactcaagactacatccttgcatgaaaatctttgcttgactccgtttccttaaattcctgaaaaaggaattactgtcatagagcataaacattgtgaaggtttttggatctttttttccaaattgccttccagaaagtttgtaataatttacattcctgccttctcattcctgcatcaacactttaatttttcccaacatttcaaaattttgttagaaaagttaaatcttactgtttcatattttattaccaataaagttgattattttttcatatgtttcttgcctgtctgtagttcttcttttggaacgcttagtccataccattagtctaatttttctatcagtgtgttggattttttctttatttgtaagagctctttatgtataaggctgttggccgaatctagtggctcagcctgtaatcccaaaactttaggactcagaggcaaggcaggaggatcccttgaacccaggtgttcgagaccagcgtaggcaacagagtgagaccctatctcaaaaccaacaaacaatttatcttatgttgcaaatatttttcttcatatgcctttaaactttatatatttttttaattcaatgaggatttacactttcatacaggtagattgatttatgttctcctttgtggtttattccctcacttatgtgtttacaaaggccttccttcacccaagttaaggtaaatattcagcatatttccttgctgtggttaagagatgtgagaagatactatgagagactcactatgttcacaactttttccagttaaatgaagtcttcccacgtttcctaatcactcacattaagcatatagaatggattaattttaaatctgaatataaaactaattgcacagcatgtttcactgctcttcttactgcctacctggggcacagtctctttggcctgagtggtctcttcagtttttaacgagtggctccacaattccttaggaagagctgctctcttctgtctccctggtggtcgtaatttcgcccacacctgccccgtctttgctctgcagctccacactccctcagccccgccgagagctcctggctcccgtctccaggttaccccaggtcaccacagccacctctctgcaccagcggcccgctcacgtacccagctccaggagctccttcacgatggcttttccgatgcccgtggccccgccggtgacgatggccacttggccctgcagcaaaccaggcgccaggtagctcctgcccttagcccaggaggccatccctgcagcggggtgccagagcagctgagcgcaggcccttctgggtctcagggacattcgaggcgggcgggcggacagggcggtgctcgagcccacgtgaccaccagaaccccgcaccctccccggcccggccccgccccgcccgccggccgcggcaaagccgcatcctcccggagcagaaccgctccccgccggctgtccgcaacctccgccagcgtcggtccctgggcaggtgtgggtgagactgctcgttcgtttctttaaatttcgatgccattggggagggtggaagggaaatgcaaaaaaaaaaaaagaagaagaaagaaacaagcagggtgtgctctatttcaaaaattcaatcctcagggctgaagctctcacgattaattaaaattaaatctccagtgcagctggaaaaagaaaggctgctgctcggcgccctcgctgcgcccgcctgccggggtcggacgtcggcgatgctgtggctccaggtgctgtgtgccgctggctgggaaggggagaaagggcaggc

SEQ ID NO: 25410 - DNA, 2300 bp, Homo sapien
ctgcttccaggccttttggcctggaacttagcggattagtggactttcaaaccctgacagaggtcagaggcagaggcaaagagatcatgcctcctaattttaaacaaaagatcgcttgaagagaccccaaagctctcttaattgcaggttctgcctggatcatgaaaaatcgccttctgactgttcatcctgcaacttccttgcagctgaggaatggcaccttgtcatcctcagtaggcataaccggtttgcaggccccagtccctgtttcactggaagacatcagaatcccactctcagtccgctcagcagccacacggaagctgcagcacagccagcttcccactgacccaccctggcacacctctaagaatctataggtccagaccagggcataaatcatgttaagttatatcttcaataaagttatcatttaaaagaatttaaagtgtccccacccacaagaaagaaagtctggacttctcttgaataagatacccctcagaactgaatcaatatttcttttccttaaaaaaaaacaccttgtcattgggatcaaaccaagaggagttatatgtttctgcaacaacactttgagctttcctgtttgaatttactttgttttaaaggaggtgatggcgttgtaattttaaaaatttggtcctaactacagaattgacttaagtagtagagttaagtgattcctggataaactatctagcaaatggtaaccaggagatttattcctttctttaacgagtgtagatttgaatctgtcagcaacaaagatagagggagaagtgattctaaaaagagatcagagaaggacaagaggatggagcaacagggaagtgtagctgtccaacaagaactgcagcctcgctggtgggtgggacctggtggaggaagtgatggtctgattcctctgtcaaccagacccatttccaattggctttgtgaatcctaggtggtaggtccaacaaaaggatgatggcatttatttgcctttatattattttaatacctgtccggggaaaatgcaacactctgacaacagccttagaaatagcatcccatctggattgttaagaccacagcaactggcacattcgaccaagttcttagggtgaagtctcagtaggccagtccaggtgtaatctcactctggtgggttcagagcgggaagcaagatgaaaaataaggagcagatctgaataataaatcactgttactgggcaccataacacagacgagaaattttccccatcctcagcgggctcaccctcctgcacaaggaatgaactacaggacatgatctcaaacacctacagatgcatcttgcaggaagcgtgcacccttcaaggaaagatcctcttctggactcgctatgcagctcagctgaaatggatcaggtctcaaacctggtaaagatgatctttccccttgattcttgggtggggagtgggaggtgagacggaggtgggcctgagtttattttttcaaatcgtttattctcttggttctgtggaaaactgcaaccgcatctcctcttccccttcactctctttcccgggctccctcccgaaggatgaaaggatctgaaagccgcatttctccccctcagctaagcctgccctttctccccttcccagccagcggcacacagcacctggagccacagcatcgccgacgtccgaccccggcaggcgggcgcagcgagggcgccgagcagcagcctttctttttccagctgcactggagatttaattttaattaatcgtgagagcttcagccctgaggattgaatttttgaaatagagcacaccctgcttgtttctttcttcttctttttttttttttgcatttcccttccaccctccccaatggcatcgaaatttaaagaaacgaacgagcagtctcacccacacctgcccagggaccgacgctggcggaggttgcggacagccggcggggagcggttctgctccgggaggatgcggctttgccgcggccggcgggcggggcggggccgggccggggagggtgcggggttctggtggtcacgtgggctcgagcaccgccctgtccgcccgcccgcctcgaatgtccctgagacccagaagggcctgcgctcagctgctctggcaccccgctgcagggatggcctcctgggctaagggcaggagctacctggcgcctggtttgctgcagggccaagtggccatcgtcaccggcggggccacgggcatcggaaaagccatcgtgaaggagctcctggagctgggtacgtgagcgggccg

SEQ ID NO: 25411 - DNA, 2300 bp, Homo sapien
aaaaatagttgataaaaatattccttatcaaaatagttgataaaaatattcctctgaggccaagtgcagttgctcacacctgtcatcccagcactttgggaggctgaagcgggaggatcgcttgatcccaggagttcaagaccaggctgggcaacataggaagaccccgcctccacacacacacagaaaccccacaaaaattagctgggcttggtggcacacacctgtggtcccagctacctgggaggctgaggtaagtgaatcgcttgagcccaggggttccagggtgcagagagctatgattgtgctactggactccagcctcggccgagcgacaccctgtctgtttctttccttttctctctctctctagctctggatcgtacaagaagggagacaaggaccactgacaagatatggtatgtgatactaatcagatttggcttctttctgtcctgcttcaccagaggctggactctccttgtttcagtttctccgctttccacagataaatcttttgtttcccggatagccacttggcctgtttgccctttgctcccatttttccttgtttgcttctttgtctgaaaatttatgctgtcctgctgcctccgctgggcttcgtttccacctttgctggaggagatttagctgacaacctcacagatcttccccgccccttctgccgagctgatctttctcttggaaatcttacccgcagggaagggcgagtgtccgtgcctgcctgcctgcctgctgcagcccgcgcaaagctgagcggccagggcgctgctgttcctttaaagtattattaaaaataatatttcagcttttaagtaactccttgagtttgaatcaaaagctggaagaacctcctgggctctatgagcacctctgaatatgtctgactctacattctagaggcttcaatgtatttataattttggctcatagattctccacatcttttcagcttcaattcttgcttttcccagaaacaattttcaagcaggagagaatattgattggacttgattttctcagtttgggcagaggtttgcagacactttgcaggttgccagacccttcgtccagccacctgtcagctgggggtcatatggtatagaaagcagtcatttctatgcaaggtactgcttgggcctgcctccctcaaaggggtaggggatgcgggctggacaaagggctcgtgatcaagtaaagcactgtgatgacagctgctatttctatatctccctagacttgtcttctaaattaaaccttgactcctcccttccaagctggagccactgctaactactgggagagccttagcagataaagtctcatgcctccaggcgtttgtgcatcccattttctctgcagagtagaatctcccttctacttttgtgctcctggggacgtcctactcttcttccccagttggctctaaggttatcacatcggtgaagtgtttcattatcactttttagaagaaactgagtcttttagagaagttaagtgactttctgcattcatactcatactcaagaaaatctaactccacaataaccaaaaataaaaagtagaaaaaaacccacaagtgatgagaaaaaaaaaaatcaaaagttataaaaaataaatgaaaaaatgaaattaaaggaaaaaagattttttaaaaaagtaaaaaaaagaaaagaaatctaactccagagctctgacacaaaatgccttaggtgttattctcaatgagagaaaagggacgtgaatctttaagtgattaagtgaatctttaagtaaatctgtcgtactagcgtttcaggcggctcaaacaccacacgctcccgactacggcggaatggagagaatgtgcgcatgctcggcgggaatctgcgcatgctcggcgggaatctgcgcatgctcggagagaatctgcgcatgctcggccggaatctgcgcgagctcggcgggaatctgcgcaagctcggcgggaatctgcgcatgctcagagttccggggcacggtttccccgcccctttcaggcctagcaggaaacgaagcggctctttccgctatctgccgcttgtccaccggaagcgagttgcgacacggcaggttcccgcccggaagaagcgaccaaagcgcctgaggaccggcaacatggtgcggtcggggaataaggtataaagaaagccatggacttgggctttacccggactggggatccggagagggtggttcggaagcaggaatcgtgggatcgcggtcaagacaaagaatggggcaagagaagatcatggtgg

SEQ ID NO: 25412 - DNA, 2300 bp, Homo sapien
atggtgaactttaactggtataaaagctgcctctgggggcgctcgaccaataatgccgagttgccgctactgagcatgcgcatgactagtaaccacactacgcatgcggccccctcttaagcagtagcagggctagtgcgcatgcgttgattaattcgggctgctcaagggaggaacaaaggagactggaagcccgggaaaagatggcgccggtggttggggggcggggcggtctaaaaactaaacaaagaagggcgcagggcacttgatttttcacgtggccctcttggttctcttccaagtgtactctgctttctccagtaaactctcactttgcttaaaataaatttttcctcctgctttaaaccttgcttatgtctgtcgtttcaattgtttacttcgagaagaccaagaaccgagattactgcggagtcgccactccggagtttctctggataactgccgacttacaccccagtaacaagagtataggtgtttttttgtttgtttgtttttgttgtagagagaaagagtcagaatcaggaagtcagaatcaggaacttagtgccagtcccatactacattcagaatttcctcccctcccatgactgagattttgtctagggcaagattaccttgccttaagatggatgcttgtctaggcggcagatacctgcccagccagtatgctacgcatgcttgaatccagcagcaggcacccagacaccgttagtccatgtacaactgggaattgttgtgttgtttacagactaaaggattaaacagaccctacaaaaatgaagaatgacagaattccattatctctccatacagcactcttccccatcaatgtaaaaaggcttatgttaataattagacaggactgtcttttgtgtcagatactattttttgtttttatatttcattatgaaatatttcataaaataggcaaatatggagaatatacaggtaaccaattttcccattgtcttatgctgtaaatcctaatgtttcatatttgtttgattttttttttaataaagtgttacagataaacctggaggcccttccttaccctttttttctcttctccttttctcaggattttggtagttattaccatgtatattttatacttggacataagtatatattcataaatacttagtattgtataaagctgtcaaaagtgtaaatggttttatatgctacatgtaattctgcagcatatcttttatcaacttattttagatctattcatgttgatacgtgttgcacaaatttattcatttttactggagtatgatatttcgttgtataaatattctgcaatgtatttttgcattctcctgtttgatagtttgcttccagtttttgccctatcataaacagtgctgaagtgtaaacttcctatctgtacataatttttctagggtatactgtatatgcctgcccctgaaattgctgggatataggctatcctgcacttttttttttaacctctggaaaatttaaaccttagacattccataaagacatactaaaatcttttcacattacccatttttggttctctcattgagaattagagtttgatttcgctggaaatcatcaagaacacttactaccctcctatttccacacctcaacttctgctgaaatgaagggtgagacttatggtcaatgaaaaacatctgttcagaacctaagaattgtcattgtctgtaagtctcatgtttcatcccgcccaatactatatggccccagggacctgccatagggaggtctggttgtcctgctccctgaaggttaggtattttattgcttccagattgttctaatatggttttcagccatctgacatttttttctaggtgtttgctgagaacaaggatgagattgctttagtcctgtttggtacagatggcactgacaatcccctttctggtggggatcagtatcagaacatcacagtgcacagacatctgatgctaccagattttgatttgctggaggacattgaaagcaaaatccaaccaggttctcaacaggctgactgtatcctttttctgccagagaagactttaagaaatttcctttattctgggaatcgtacagcagtttgatgagacacccccagagtttcagctatgagtatatgggtatattttgctctgaggagggggaggtaatgtgttaatagggtttaatgtgaaattaatcagtttaaaacagtgcctgggctcccagccctccactcacttccctgttctctgcatgggtgatactgagaggttggg

SEQ ID NO: 25413 - DNA, 2300 bp, Homo sapien
catctcctttctgtacgactgtggaaaaagagttcagaataacccatcaaaccaatacttgttaagatggtacttcagagaaattaagtgcttttaagtgacacttcttactgagttgaggtttttctcagtacttcagaagcccagcacagcttctggtcctttttcataatctcaggatgcctttacatgttagaagcagactgcatttcagtgaatgtcattcgaaagagctactctttttttccatgagcaatacagaaaagtgcagaagaggaagcatagcctttgcttctatttgctttttatttggttgtatttttttcttggtaatatgctttcttcctgtgctacaaacctccagcatacaaagtagagttcatagttttactgtttggtgtattccatgtacagctgattgttgtaattggactaaaaaaataccagcagctcagagaagccctgtgttctgtttttaatttatttttaatttttttttttagaaacgtcttctgtagtggcatagttatagctcactgcagcctaaaactcttgggttcaagtgaacctcctaccggagccttctgtatagctgagactatagatgcatgttaccacacccagcagtttttagtttttcttggttgttgtttgtttttgagatggagtctcgcactgttgcccaggctggagtgcagtggtgcaatctcggctcactgcaacctccgcctcccaggctcaagcagttctcctatctcagcctccctagtagctgggatttcaggtgtgtgccaccacgcccggctaatatttgtatttttagtagagatggggttttaccatgttggccaggctggtcttgaactccggacctcaagtgatccacctgcctcgccctcccaaagtgctgggattacaggcgtgagccactgtgcctggcacagtttttagtttcttctactgactactgaggaagcttatttctgatctaacgcagaatagacagaacagttattatttctttttccaggataacttcctttctcttcacttttacgacatttgtccttttctggttattgctttgaaaacaggagtaacctgatgcaaaccctgtgtctcacactttcctccctggaaactttttacctgataaatgcaggacatgcaaattacatcatgctgtatttgctaagtatatgaagaaaaattgtaaacagccttattttaagtgtagcaaataaaatgagaaatcaccttaaaaacaaatttatttctcacagttctggaggccgggaagtccaagatcacagcactaacagatttggtgtctgctgagagatctttgctctcaagatggtgccttattgctgtgtcatcccatgtcaaaagggctaacactgttctcacgtggtggaaggacataaaaggcaaaaatggcaaaaagcctctcccttcaaccattttttttaaggtcgctaattccatttatgagttccccaccctcaggacttcattacctcctaaagggcctctgtcttaatagtatcatattggtgattaggtttcaaaataatgattttgggggacacgtgtagaccattacagtgtggaagaggccagtcggagagagtgaagccagcataaaggcaaatgaaggtaaaatagagacagagagagtaatccttgccacagttgagaccctgggtctggacttcctaaggccttgtgccaccctgccctttcagttacttggttatgtagtagccagtgattttccccttttacaaaccaaagaggtttcagtcacttgaaactgggagaatattggctaaggtaggtaagagtcgtttgacagatgagaaatttgaaacttgaaaaggttgactgatgtgctcattttctcatagctgatgagttacagttacaggattagaacactaactactgttgatctttcttaatagcttgcctttctcacttggcaaggaagatggaagtggggacagaggagatggcccctttcgcttaggtggccatgggccttcctttccactaaaaggaattaccgaacagcaaaaagaaggtcttgagatagtgaaaatggtgatgatatctttagaaggtgaagatgggttggatgaaatttattcattcaggtaagaattgaaaacattgatgggaatttttaattgtacccacgtaaatttctcttttgattagaggtctcccaaatgtttcctttttctgggccactctctaattagtcattgcttaatattctgagttttattaaagaa

SEQ ID NO: 25414 - DNA, 2300 bp, Homo sapien
agctatagttatggctggtagagttcagttagtcagcatctggtagggctgcaagtgttttattagtgtttatggtgaggccactgcttgtttagctgctagagagaaagagaatccttgttgcagttagaacctagtttattctttaagcgtaggggtgcataacttaacccttgcctggcatggtaatttgttatgttgctgccacaaagaatctgttctgtcaatcttaggatctctattttaactttaatgcgggtcaattgtctgtaaaccagaaaagggaggggagtataacaagtcgtgtctaacctgctgtcctgtcatggctgggaactccgtttttaagaattttctggggtccccttggccaagagggggtccattcaatctgtaggggaggagtcttaggattttatttttagtttacattctccccttttagccaagatgtgccagaggcaacactgatgaccaaacatttattttgtctcatgtcactgccagggtggtgtcgttacctgccccaggctcattttgttctttggtgggatccctgtggccaagggacttggaaccaaaagacttaaaactaattaaacattggaggccagatgaagatggaggttcacaggcacgcattaacccttaaaaaccttttgagcaacataaccaaaaagcagtgttacaaaagtgacttgtctatgagttctgtgtgttgagccatgagctgtttggtaatctgtatgcccatctttaatttggagggtctgaactaattttatctgttgaaactggcccttacaatctcatgtgcccaccccttctgtgatagtccatgggcctactgggagggtgcttgatactgtattgctttagcagtagtgccttggcaatggaaagcagattggcctagggggattgaatagttttcaaattctagagatactaggtagagagaaaggtaatcttcaatgttttacccaatttctgtaagctgtaaatagtttaaaagaaaaaaggttttattgactctgaaaagcaaaacatgaagaattagcaatgtttatttgattttgaggacatttgtcaaagatgttcaaaggctcaaagcttttaatcaaaatggaattacaggtcattgtaatagttattcattaaaccaagagtaataatcaaaagactttaaatgcaatatggaaagtcacatggatgtaaaaaccttaacccttttaaagcttagttttcctaagtaataaaaaatctaataaagaaaacatgggaattatcttgataaaatgtaaaatctttggttcttaggccagttaccaaaaaggcaaagaaaaacctacagtgtggttgcttctcctatgagaagcccatttagataacttggaaatcaaactgtaaaaagtttacttgaattaatcagacacaagaagagtgtgtctggggtcatgaatgaactttatgttatggaggaaacaggaaactagaaaactgtaccttgagccggggaatacatgactcttaataacagcatgggaagttttctggttatatggaacaattcggatatcaggaaaagccaagagtacagaatcaaggtatactgtaggaaaacattgctcttcgagaccttcaagataaaacattttagcatcaggccacagtggcagttagaaccagagggaaaaagttacaggagctggcaaaacagttgaagggaaaagttatcatctcaggccttctcaaagggggagaaaaacaaagtagcaagacgcagcaaaagtggaacttccaagatactaatctgagaagttttcaacaagaaacaggtttagaattaaaaatcaaaacctcttttaattgtattaagagtaaatcatattttaagacaactttcttttaaaacaagggaccaaaatttagaaagacttttataaataattttaattatagccaacttaatcccacacaaaatgcttttcataagtattctctcacaaaccttatcacaacttagaccatctataacatgcttgtactttctgatttgtactaaatttcccctttccttaataaccagtcattttactttaggacagaaatttaccctgcaagatactttcatatatgaaattattctcttttgaaccttccttaccaaaaatacatcttcatagctaacttttttcacatctctcctacttactggttttctaccttctttcataactaacctttaaataacatccaaattaaataaaattattctttttctccataagaacacattt

SEQ ID NO: 25415 - DNA, 2300 bp, Homo sapien
aacccttaaaaaccttttgagcaacagaagagccaaaaagcaaggttacaacagtgacttacctgtaagttctatgtgacgagtcatcagctgtttagtaacctgtatgacctgttaaccatttttgtagcctgtgaatatcagatgttcatttaagtcagaaccttaaacatgtggatatttttgccaacaactcagaagctaacaaaacagctaacaacttagctgttttcattgaaccaacaatattaaattagtcttatttgtcaaaaaattcacacaaagatcattctctttttgactgggtttatagtcttataatcttttgtgccaaatcctgataccttaaaacacctagcggaggcaaatataaaataatcagtaaacccagactaaaaaaaaaatgtatgctgacaattctgaagacatttctagttttattttaccaataattttaaaaccattttatttaccagattactaagttcacatgaatctgaaaagtatttggacttacttaatttatgagtataatttacttataaaccagtttggtaccatgctagatacaacacaacataatacatgttcatatacaaacatttaaacacatacacacaaagatcttacagcttttactctggaaccttagccatgagatggtaatacagactcaccacttaacaaaagacagctggatccaaattatttctgacaaaattgggacctgttcacatggctaaactttatttgtcccagtaggtaatccaatgaaggctatggaccaaagtcttgggaaaagtagttttcatggcagttttatttttaaaaaccttttaccccttttttttttcctgaagtttcaaatgagttttcagtgtttacattttagctacaattggctgaactgtaaagaaagctccaagtagccttgaattagtagtatcataaacaatgagttttatcttaacagcagtagcttaataacagcaaattcaaagcaggccgaaaacaaaaaagagatagctttagaaaactctacattttaattgtatagttgcaggttgggcatttgagctctgaattttccttgctgtaatttgcccgttcagttttaaaatgtgcacaagaacaggccacaatatgcagctagctgaagtgctggaaaacctggcatgcctttgaacttctacaggagttcctgcccctagtgggtaagttacctattgcactgactttatgaagatatctcttccagtgcccttagtgtgagcatccccacaaaccttatgaaccagttgaatccaacctgaatgcctctccataagcccggagcccacaaatgcattttctccagggcccttggatggagggaatcaggaaggcctcctccaaacccaaggctaggagagatgttccctccggggtccagggaggagaacagaaaggactgagaagaactaggaatgccctcccaaacccaaggccagcaggagggtctcctccggagttccacagatggaggaggcctaaaagaagaaatcaagtctgcaacctaaaagtgggagatcttggattttgatagcacttacccagatcctttcccagcatagtcaggaacaactggactttttcaaagggaccttggctgtacctggtgtcctgggtgacacaggaaaaggaattcaggggctgcttcagaatcccatctttgccagatacgttaactttaaaaaaaaaatcataagatacaaatttagaaaaatggagacactatttcttaagggtgacagcctgccaggtggccatcctgcaggccaggaagcacagcctcctccagcagaagcccagagacaggcacctccaaggaggaggggttggggtaggagttttatgcttttatgctgaatgggttggcttaacacatattcaacaggttacaggaggagctatgaatattaatgaaagtggtcctgatgcatgcatattaaacatgcatcttacatatgacacatgttcaccttggggtggagacttaatatttaaatattgcaatcaggccctatacatcaaaaggtctattcaggacatgaaggcactcaagtatgcaatctctgtaaacccgctagaaccagtcatggtcggtgggctccttaccaggagaaaattaccgaaatcactcttgtccaatcaaagctgtagttatggctggtggagttcagttagtcagcatctggtggagctgcaagtgttttagtattgtttatttagaggccagtgcttatttagctgctagagaa

SEQ ID NO: 25416 - DNA, 2300 bp, Homo sapien
ctctgtggctgggccaccccagtcatcttccacagaagaaggtggcaaggggggtggaggtggcacaggagggggctccctgcccaccacttctcgggggcccctccagcctgcccaccccccggcgcccagagccggaagggtgttgttggccgccaaaccggggggctgggggtcgccgtgcatgggcaggggcgcttgaggagggcgccgcagtaagaaaaccttcaggtcattgaagagcatgcggcagcggcacttgaggagaccctggtggcgcaacatctggggggctggggcacacaatccatagcagtaccagccggagcagcagcaccaccaccaccagagcagcccacacaggggcatcagcatgtgccccgtggaagtagagagcccaagaggggtggctggagtcttaaaagagggggacaggacaggttttgggggtccacagtggatctgtgttgtggggggagtctgctttctcactggcttttcttacaacccctccaagtagcaaataaattgctcccaggactgagaagtgtgagtcactggttctgaactccacctggaaagcccaataacaaaaaagtttttcttgccctcacacacccaccccaacctccaactttgttcagtgtgtctcctttctgcttttgacctgaggacactggtaggagcagagggattgaagaagcgtggtggaggggccactagagcctctgtcgaattgtttaaatcaatgtcgaattgtttaaaagttccccaggaaaggattattgggttcttctcaaattcctacgcagtgagaaatctttcttttatataaaagggtggggacaattgtaaatcaaatctggagtggattgagctgggcttagagaaaactagctcaatgaagaattgaggactgcatgtgtgagagagaaaagatcgtttttctcaggtggtaggggttgggggagtcaaggtaggggaggagagaagattgggagaagttttaattctcctgggcagaaaactggggcaattaacccccagaagcaccagagttgcttttaagagagcagttgggtgggggaggggtgttgcaggtgaaactgggctaggggcttgtgctttgcctccgcagccaaagggttacaccgaagaggggaaagccaattaggagaagggaggtaaaatagaggtttgggaaggaaaaaggatgggagaaaaagaaaagatcgtttaacccttgcagaggcgcctccttcctgagcatgaagatcctggctagaggaagggtgtgtgtaccggggtgagagggcagtggagcagagaataggggtagaggagaggggcgtgtgggagagaacaggagaaaggagtggttacattatctcagcccccagcccacccctgctgcagtcggcaaatccgtggcgccctcccctcggttccatcaaaggtcccttcggtcgaggggcaagagccgagagaagggcaggtccgggcgggcgagtggcctcgccttctcctcctcttcctcctctgggtcgcggtcgccctcctcctccggctccgggtcggcccgcgcccgcagctgctgctgcggcggcggaggcgactgctgctcggcgtccgggtgtctccggggcgggggctgctccggctcgtcctctggctgctgcccgccgtccggcgcggtcgcgactccggccttcatgatcctcctcctcctcccccttccctgggggccagccctgagcccccgcgcccgggcagcgctgccatgcaaccagaggcgaggccggcgtgggggtgggggcggctggggagtgaggagggggagtaataaaaaatgaaataatactagtggaataattcggttctcaggcaagagtgcttctggagggtgggggcggaggagggcggctgccgggtctgctcggcagctctgcccccgctacccccaccaagggcggcctcggcccgctctctgcccccccaccccgccccttcctcctctccaccgcctctggctggctaggctcgctgttgctacctctcctcgcagatgcaacgaggtaaggcttgtttgcggtgccagctgaaggtggggaggggggagcgaagcagtgtggccgaggtgggaggcagccggcacttggctccagcttggtcctcgcgactccccaaaaccgtatataaatatatctcttataaaagccgagaggaagcaaatcagattccaggctgctgccaggtgttgtctcgtcttccgccgttgctcagcacccgccgctgccccc

SEQ ID NO: 25417 - DNA, 2300 bp, Homo sapien
tgggaatcgagccagtgggggcagcggcgggtgctgagcaacggcggaagacgagacaacacctggcagcagcctggaatctgatttgcttcctctcggcttttataagagatatatttatatacggttttggggagtcgcgaggaccaagctggagccaagtgccggctgcctcccacctcggccacactgcttcgctcccccctccccaccttcagctggcaccgcaaacaagccttacctcgttgcatctgcgaggagaggtagcaacagcgagcctagccagccagaggcggtggagaggaggaaggggcggggtgggggggcagagagcgggccgaggccgcccttggtgggggtagcgggggcagagctgccgagcagacccggcagccgccctcctccgcccccaccctccagaagcactcttgcctgagaaccgaattattccactagtattatttcattttttattactccccctcctcactccccagccgcccccacccccacgccggcctcgcctctggttgcatggcagcgctgcccgggcgcgggggctcagggctggcccccagggaagggggaggaggaggaggatcatgaaggccggagtcgcgaccgcgccggacggcgggcagcagccagaggacgagccggagcagcccccgccccggagacacccggacgccgagcagcagtcgcctccgccgccgcagcagcagctgcgggcgcgggccgacccggagccggaggaggagggcgaccgcgacccagaggaggaagaggaggagaaggcgaggccactcgcccgcccggacctgcccttctctcggctcttgcccctcgaccgaagggacctttgatggaaccgaggggagggcgccacggatttgccgactgcagcaggggtgggctgggggctgagataatgtaaccactcctttctcctgttctctcccacacgcccctctcctctacccctattctctgctccactgccctctcaccccggtacacacacccttcctctagccaggatcttcatgctcaggaaggaggcgcctctgcaagggttaaacgatcttttctttttctcccatcctttttccttcccaaacctctattttacctcccttctcctaattggctttcccctcttcggtgtaaccctttggctgcggaggcaaagcacaagcccctagcccagtttcacctgcaacacccctcccccacccaactgctctcttaaaagcaactctggtgcttctgggggttaattgccccagttttctgcccaggagaattaaaacttctcccaatcttctctcctcccctaccttgactcccccaacccctaccacctgagaaaaacgatcttttctctctcacacatgcagtcctcaattcttcattgagctagttttctctaagcccagctcaatccactccagatttgatttacaattgtccccacccttttatataaaagaaagatttctcactgcgtaggaatttgagaagaacccaataatcctttcctggggaacttttaaacaattcgacattgatttaaacaattcgacagaggctctagtggcccctccaccacgcttcttcaatccctctgctcctaccagtgtcctcaggtcaaaagcagaaaggagacacactgaacaaagttggaggttggggtgggtgtgtgagggcaagaaaaacttttttgttattgggctttccaggtggagttcagaaccagtgactcacacttctcagtcctgggagcaatttatttgctacttggaggggttgtaagaaaagccagtgagaaagcagactccccccacaacacagatccactgtggacccccaaaacctgtcctgtccccctcttttaagactccagccacccctcttgggctctctacttccacggggcacatgctgatgcccctgtgtgggctgctctggtggtggtggtgctgctgctccggctggtactgctatggattgtgtgccccagccccccagatgttgcgccaccagggtctcctcaagtgccgctgccgcatgctcttcaatgacctgaaggttttcttactgcggcgccctcctcaagcgcccctgcccatgcacggcgacccccagccccccggtttggcggccaacaacacccttccggctctgggcgccggggggtgggcaggctggaggggcccccgagaagtggtgggcagggagccccctcctgtgccacctccaccccccttgccaccttcttctgtggaagatgactgggg

SEQ ID NO: 25418 - DNA, 2300 bp, Homo sapien
cagccttaaagaagctctgagtcagacaaagggagatgaatgtatggtgagataattattatatagactatgatttctgcaataccagaaacagatacagagtgatgtggaacacaaaatattttcttgaagaacaaatagaatttttgaaataaagaggttttttgttgctgcacagtatttgtgctgatattaatcaataaatattattttgtagttattaaaaatattagtatcatctttaaatgagcaccttgggctgggtctcagcatccatggtgagtcctggggcatgattcagacaagtagccatgctgggttaaccaagactgagatgtaggtcctttctccttagagcttgtaggaatgaatcatttcatagagatggcagcaaaggggtagttttcttatgactcattggactgaacttcgttccaatgatattttgctgcagaaattttgcatgctactctgtctatggctccaatatttgtaaaggcattaccatggctgtttggatgaatcactggcatatcttctctatggccctagaggggtgtgtgtgtgtgtgtgtgtgtgtgtgtgagagagagagagagagagagagagcggggtgggggagagaggtttataaggaaaggcaaaaaaagcaatcctaagttttcagtgaccaaagtctacagctgcaaacactgaggttttatatagaccactttaagtttccttctttttcttgctcttcacatttaggggcactttgctgctcaagaaactccttgagaaaaatagggtagggtgacatgagtcagtagcagaaataggagaggaaattaaaatccatttcaaattacctcttgtcagcggctcagtgaaaggcttgaatagggaggaggctggggatgttggtgaagacgaagctgaaatattgctctggattcttatgactcacaattgaaagagcactgtgacttatagtaatgatgactgtggtgatggtggccacaagccattcaacaaatatgcattgaacatttactagatgccatctctgacttaggcacacgggatcaaatgaattaaaaaaattatctctgtcaattggagcttaaattctaggcgaagaagctgacaaaaaaatggtactagcaacctcctccctgtttgaaaatttgaagcatttccttctcatgtctcaagcctcaatgaaacatttccttctcatgtctcatgtctcaagcatttccttagtcatgaggaatttaatctccatcaagtcccagcttcattgtggaagtcacaaaactttatctcctcgaaagcttgcagactgagatctactttaaatgtttatgtgaacagagaaacggtctctggttgacaggtgtctgtgtcttgtatgtgcaatgagaggagctgtgatagtggacagtgggcagagagtctacaaccagaccttccacaccgacacgttcctgctgaggtgaaatgcaagagttagtgcctgaatcgctcccctccctccccgtggcctttctccttctttcttttactcttcacttcgctccctcctccttcccttcctaaatccctccctctcctggttacctccctttcccttggtccctccccatccccttccctcgcacagttctctcctcctcttgctccctctccctccagcttcttttcctctcatcccctttccctcctccatccctccgcggcgtctgcgtcaggcccccacgagcgtgacgcgcggggtctgggtgggagctgtccactcgcccggggtgctgaatgcagcagcggcggccgcggcgccggcggcggagatagccgagagcctccctcgctgcaagaaccttgtttccagttctcggacggtcagctcgccgccccgccacctcccttccagcaccacccctttgggaatcgagccagtgggggcagcggcgggtgctgagcaacggcggaagacgagacaacacctggcagcagcctggaatctgatttgcttcctctcggcttttataagagatatatttatatacggttttggggagtcgcgaggaccaagctggagccaagtgccggctgcctcccacctcggccacactgcttcgctcccccctccccaccttcagctggcaccgcaaacaagccttacctcgttgcatctgcgaggagaggtagcaacagcgagcctagccagccagaggcggtggagaggaggaaggggcggggtgggggggcagagagcgggccgaggccgcccttggtgggggtagcgggggcagagc

SEQ ID NO: 25419 - DNA, 2300 bp, Homo sapien
caaagtgctgggattatagacatgagccaccacacccggcctcaaaggcatattttaatttcctattcttagaattttagaatgttagagctagaaaggtaatcacatcttctaactcaattccagacttactgaattggaatttctggggtaagatctgtgaatctataagaattctagtatctaacatgaggatccactggtccacaggccctcttagcatatgtcaaagcagggtatcattttacaggtgagacgactgaggcccaggaaagcgaagtgatggtcatatgaatcggtgacagacatgagtcaagtgcacggcacccagctttcttagtaaattaactgactgttgggagacaggaagggcagggacaggtgttcattaactagtttctgttcacactatacagtaggaaatgagcgctaggtatagagaaacggacgatataagagatttacctcaaataataacaacatccctctcttacctgttctgggatttcacagttcactaagcacttcccctcataataccttgctttgattctaataacaagatttaccaaggtggtattgttttctacatttactttacagatgagaaaatggaggcacaatcactgggtatgtcaggtcaataaaaggggtagagctgagatttgaatactttctactactaaacctcacacagatcccctaagacaggcaatgtctttgtcatttaagacaaatgggctgggcgcagtggctcacacctgtaatcccagcactttgggaggctgaggcaggtggatcacttgaggtcaggagtttgagaccagcctggccaacatggtaaaactctgtctctactaaaattactaaaatcagccaggcatggcggcatgcacccataatcccagctatttgggaggctgaggcaggagaatcatttgaacccaggagtcagaggctgaagtgagccaagattacaccaccacactcagtctaggcaacagagtgagactctgtctcaaaaaaaaaaaaaaaaaaaaaaaaaaaaaaaaaaaggaaggaaggaagaagggagattatttattgtttcaaaagtcacacaaattctacattattattttagaaaattcaaatcattctgaaaaatagagattaaaaagctgaaaagtgtatttcatgccactctgctcctgaacagtttggtgactttttaagtttccttcccagacctttatgagtttacatacatgtacaggtaaggatgaaaaaaaaaaaaatcaaactacacacattgctgtgcttcctttttcttagcatgtctggtccattttttcaaatcctttagtagacttgtttgtttttaaatgagccatgtttgaaaatagaacaatagcaacattcatatgcacactgatagagaaatgttatatttatcaccaatggtgctcaggatggctcaggatgttggtgctcaggatggggtaaagtgactctttaagtctcatgactaatcttctctcaagaggaggggctatggaatcagaatcacaagctagcttaataaagccttgagaaatattatcaaatagctgtcttagtttccccctctgtaaaagggggacaagaatgtgttccataggttgtagtgcggttaaatgaggtaactcatatttatgctaaacacaatgactgatgactacaatgatgacgatgatggcagccgggcgcagcgggtggggcttaaatggcaagtatagcaataccaggaatggatgccccggggagatactttttattaagagctgccaagttagtatggctgtctgggatgtcctctggagacagccgactccgggtttggaaacctcaacgtcctaggctttcaggacctagtgtttggctaaacctctggagaactacaacttccagggtgcaccactttcgccccgcccatgacgttgcagctcccgtttctcgccaggctcccggcccgaactacaaatcccagaagacactgcagccccgctcgcgttctcgtctcatcattcttacttttggaagcgaaactgcggccgcgttgcctgctgggaaatgtagttcagcggtggcctagcccttcaggcctggccgctacaataaggctggcgaactcgcagcgcttgaatacccgtggcctaaccgtccactcggaagaccggtcccgctcgggaggctctgcagtcgcgcctggggtcagggccgggggcgaatgtggctcgcgttctaggcctccctgggtgagaaagtggtagactggcagg

SEQ ID NO: 25420 - DNA, 2300 bp, Homo sapien
gatggtcatatgaatcggtgacagacatgagtcaagtgcacggcacccagctttcttagtaaattaactgactgttgggagacaggaagggcagggacaggtgttcattaactagtttctgttcacactatacagtaggaaatgagcgctaggtatagagaaacggacgatataagagatttacctcaaataataacaacatccctctcttacctgttctgggatttcacagttcactaagcacttcccctcataataccttgctttgattctaataacaagatttaccaaggtggtattgttttctacatttactttacagatgagaaaatggaggcacaatcactgggtatgtcaggtcaataaaaggggtagagctgagatttgaatactttctactactaaacctcacacagatcccctaagacaggcaatgtctttgtcatttaagacaaatgggctgggcgcagtggctcacacctgtaatcccagcactttgggaggctgaggcaggtggatcacttgaggtcaggagtttgagaccagcctggccaacatggtaaaactctgtctctactaaaattactaaaatcagccaggcatggcggcatgcacccataatcccagctatttgggaggctgaggcaggagaatcatttgaacccaggagtcagaggctgaagtgagccaagattacaccaccacactcagtctaggcaacagagtgagactctgtctcaaaaaaaaaaaaaaaaaaaaaaaaaaaaaaaaaaaggaaggaaggaagaagggagattatttattgtttcaaaagtcacacaaattctacattattattttagaaaattcaaatcattctgaaaaatagagattaaaaagctgaaaagtgtatttcatgccactctgctcctgaacagtttggtgactttttaagtttccttcccagacctttatgagtttacatacatgtacaggtaaggatgaaaaaaaaaaaaatcaaactacacacattgctgtgcttcctttttcttagcatgtctggtccattttttcaaatcctttagtagacttgtttgtttttaaatgagccatgtttgaaaatagaacaatagcaacattcatatgcacactgatagagaaatgttatatttatcaccaatggtgctcaggatggctcaggatgttggtgctcaggatggggtaaagtgactctttaagtctcatgactaatcttctctcaagaggaggggctatggaatcagaatcacaagctagcttaataaagccttgagaaatattatcaaatagctgtcttagtttccccctctgtaaaagggggacaagaatgtgttccataggttgtagtgcggttaaatgaggtaactcatatttatgctaaacacaatgactgatgactacaatgatgacgatgatggcagccgggcgcagcgggtggggcttaaatggcaagtatagcaataccaggaatggatgccccggggagatactttttattaagagctgccaagttagtatggctgtctgggatgtcctctggagacagccgactccgggtttggaaacctcaacgtcctaggctttcaggacctagtgtttggctaaacctctggagaactacaacttccagggtgcaccactttcgccccgcccatgacgttgcagctcccgtttctcgccaggctcccggcccgaactacaaatcccagaagacactgcagccccgctcgcgttctcgtctcatcattcttacttttggaagcgaaactgcggccgcgttgcctgctgggaaatgtagttcagcggtggcctagcccttcaggcctggccgctacaataaggctggcgaactcgcagcgcttgaatacccgtggcctaaccgtccactcggaagaccggtcccgctcgggaggctctgcagtcgcgcctggggtcagggccgggggcgaatgtggctcgcgttctaggcctccctgggtgagaaagtggtagactggcaggaaggcggcggaggcggacgagaccaatgccagcctggaggaggaagtgggccaatgggaagggtgaatccaagtggagatcgtaggggtgggagtggggcgtggcgcccgcttaccttgaggctgggtgaggctcgccccgaaatgcggggcgtggggggcggggggcagaggtccctgcctagaggggaagaggggcgtccatgtggcggaatggatttatggtttggggctgatcagtgggtcttatggccgagtctctctggttagtggagacagctt

SEQ ID NO: 25421 - DNA, 2300 bp, Homo sapien
tagaacaatagcaacattcatatgcacactgatagagaaatgttatatttatcaccaatggtgctcaggatggctcaggatgttggtgctcaggatggggtaaagtgactctttaagtctcatgactaatcttctctcaagaggaggggctatggaatcagaatcacaagctagcttaataaagccttgagaaatattatcaaatagctgtcttagtttccccctctgtaaaagggggacaagaatgtgttccataggttgtagtgcggttaaatgaggtaactcatatttatgctaaacacaatgactgatgactacaatgatgacgatgatggcagccgggcgcagcgggtggggcttaaatggcaagtatagcaataccaggaatggatgccccggggagatactttttattaagagctgccaagttagtatggctgtctgggatgtcctctggagacagccgactccgggtttggaaacctcaacgtcctaggctttcaggacctagtgtttggctaaacctctggagaactacaacttccagggtgcaccactttcgccccgcccatgacgttgcagctcccgtttctcgccaggctcccggcccgaactacaaatcccagaagacactgcagccccgctcgcgttctcgtctcatcattcttacttttggaagcgaaactgcggccgcgttgcctgctgggaaatgtagttcagcggtggcctagcccttcaggcctggccgctacaataaggctggcgaactcgcagcgcttgaatacccgtggcctaaccgtccactcggaagaccggtcccgctcgggaggctctgcagtcgcgcctggggtcagggccgggggcgaatgtggctcgcgttctaggcctccctgggtgagaaagtggtagactggcaggaaggcggcggaggcggacgagaccaatgccagcctggaggaggaagtgggccaatgggaagggtgaatccaagtggagatcgtaggggtgggagtggggcgtggcgcccgcttaccttgaggctgggtgaggctcgccccgaaatgcggggcgtggggggcggggggcagaggtccctgcctagaggggaagaggggcgtccatgtggcggaatggatttatggtttggggctgatcagtgggtcttatggccgagtctctctggttagtggagacagcttaccaggcctgggatctggggagtttggaggtgcaggagatccctggttggaaacttaggcaggagtgtgttacccagagagactgagggcttctgctgtgcacctccaaaaccttttcctaacctcttcaccccttcctaactgctaatggttggagaaggtggaagttctctggggatagatacttcgtggtgggggaggggggaggggggttgggttctggccaaagggagccccagcagggaaggaaggctttgaaccctatagctgcccagaggcctaagcaatgctactggagtacccctacatcatcattgtaaccgttacacagcattacattagatgcagcctatttagtctgaaccaagccagacaaattggtgtgtcctgcccgctgcttctaaaatattgtaaacatgtctcagctcataggaaaataaatgttccgggtaaattcatggaaaaaaataatcagggtgcaatatggaatgtttacaatgatcctactttataataaattcttatatctcctaaatatgtgccattttgttatggatgaaaaaaaatccgaactatatactctaaattattaatttcaactgtggttattgatggctggtaagattacagagtaattttattcttttttgtttacatctttatgtagcatcttaatttgcacagtgaacacataatttttttttttctgctccttattttcccaggagagtcagtcagttgctccgtgtgttgtgttggaagtcaggtcctaaggccagctgctctggcttgcactgagccacaggcagactgatttgccaggaatgataaaaaggggtgaatgtgaggggagaattcagtgtgcaggctatgggaggctaatgcttttttccttcttctaggttggaaaaagactatgttagcaagtgtcacgccatggtatgtggttggttggtctatttcagtctaatctattatgctttctggttaaaaatgtcacctttctcattatctgatggatttacgttgcaatgcataactttcttaggttctgataactcaccttggctgggccatgtgagttatcagaagagttactca

SEQ ID NO: 25422 - DNA, 2300 bp, Homo sapien
caggagtgtgttacccagagagactgagggcttctgctgtgcacctccaaaaccttttcctaacctcttcaccccttcctaactgctaatggttggagaaggtggaagttctctggggatagatacttcgtggtgggggaggggggaggggggttgggttctggccaaagggagccccagcagggaaggaaggctttgaaccctatagctgcccagaggcctaagcaatgctactggagtacccctacatcatcattgtaaccgttacacagcattacattagatgcagcctatttagtctgaaccaagccagacaaattggtgtgtcctgcccgctgcttctaaaatattgtaaacatgtctcagctcataggaaaataaatgttccgggtaaattcatggaaaaaaataatcagggtgcaatatggaatgtttacaatgatcctactttataataaattcttatatctcctaaatatgtgccattttgttatggatgaaaaaaaatccgaactatatactctaaattattaatttcaactgtggttattgatggctggtaagattacagagtaattttattcttttttgtttacatctttatgtagcatcttaatttgcacagtgaacacataatttttttttttctgctccttattttcccaggagagtcagtcagttgctccgtgtgttgtgttggaagtcaggtcctaaggccagctgctctggcttgcactgagccacaggcagactgatttgccaggaatgataaaaaggggtgaatgtgaggggagaattcagtgtgcaggctatgggaggctaatgcttttttccttcttctaggttggaaaaagactatgttagcaagtgtcacgccatggtatgtggttggttggtctatttcagtctaatctattatgctttctggttaaaaatgtcacctttctcattatctgatggatttacgttgcaatgcataactttcttaggttctgataactcaccttggctgggccatgtgagttatcagaagagttactcaccattttggcagtgcttcgaaccattgagttaccatgtgagttaccatgtgagaaggagagaaatattgcctctgaaatgcctttttagctttggatttgctttttgcttttttttttttctttgagagttttgttcttgttgcccaggctggagtgcggtggcacgatcttggcttactgcaacctctgcctcccaggttcaagcaattctcctgcctcagcctcccaagtagctgggattacaggcgtgcaccaccacgcctggctaattttgtatttttagtagagatggggtttcaccatgttggccaggctggtctcaaactcctgacctcaagtgatccacctgcctcagcttcccaaagtgctgggattacacccgacctgctttttgctttttgatcagggtctttatttcagcatatgctgcctactatttcagtgtgtgtgcaattataaaagaaactttaatacatcctttagttgtgctcattatgcattttctgggacaaaagcttgttaaaatcatggttggagtatgacaattaatacatgtaatgttcatttcattcttcttactttcttccacagcttttgccaactttccaattaaaggttgacattcctgcataagcatttctctgtgaaaatgtccttgcctcttacagaggagcagaggaaaaagattgaagagaatcgacaaaaggctctggcccgcagagctgagaagttattggcagaacagcatcagaggactagctcgggcacctccattgctggcaacccattccaggccaagcaaggcccatcccaaaatttcccaagggagtcttgtaagccagtgagccatggtgtcattttcaagcaacagaatctcagtagctcatctaatgctgaccaaagacctcatgattcccacagttttcaggcaaagggaatatggaaaaagccagaagaaatgcccacagcctgcccaggccacagtccacgtagtcaaatggctctcactggaatctctcctcccttggcacaaagtcctccagaggtccctaaacaacagctcttgagttatgagttaggtcaaggtcatgctcaggcttcacctgagatcaggttcacaccctttgctaacccaactcataagcctctggccaaaccaaagagttcccaagagacaccagctcattcctctggacagcctcccagggatgctaagttagaggccaagacagcaaaagcctccccttcggggcagaa

SEQ ID NO: 25423 - DNA, 2300 bp, Homo sapien
ttcagatgaatttttctaattgtttggctcctctgcatctttaccaatgtgttacacacttgagcttttgcctgctgagataaaccttgaaattccttgccataattatggatttgtgaatttctccttgtatttctaagtttcagataggttcatgattgtgtctcatgattggctttttattggtataacatataaaattgtctctgtgtcagtctttctgtcattttgctttaggtatatctctggatttggcttcattaaccctaccacatactcactgtagaacatattttgacgtgtgaagaagaaaaaccatcccccgtaatctccccactcaactaaccattattaacattttggtttcattccctccagccttttttctatgcgttaaaatataaagttttatatatgcatataatttgtattttgcccttttaatttaatactccagcataaagcatatttactttactgaatgttaacagttaattctaagtgatgaaaatgtgtccattatcataatgggccattttgaccttcaagaaatggtttcgtgttgttgaactacttttgtcttttccagaatttttaatacaaaataaattttgatagctgtataacattctgtcttatgaatgtgtcatacattgcttaaattgttgttgtttattttttcctgcttgattttaattggctgccagtttttccagttttaaagctgtagaggaacaccttcgtacctaagtttttgtctgtattttcaactggtagttgggatagattcccagaagttgaatcattattcttagagctcttgctataattgccaaattgttttccagcaggttttattcccaactagcaatatggatatctaattgtttctcatcctgcaagtttgagaagtaaaaaagtatcttatttttctgattatttgtgaaggtgaacatttcttcaaatgtttcttagtctttttcctcctgttttgaattggctacactaccctcttcttttgtggtcttagtacttttttaaagcatgggttctttttatatttctttactcagggtttttttcctttcactccagtgtgtgtctgttgacagcttagtgttacacagctgaatttgttcattataaaatgcatctgtagtagatgaaataatgttcagaactgtgtgtttgtgacctggtgatcctggtcctcactcctttgttctctgagcagtagacagagtagcgacctaggagtgggcttaactgggtgatttgtggtgtgctgacttcagtggcttctccgacaccgtgccagaaattatctaataagtttattcatcctggcgagcttcctcttccccttgttaatttctgaattttaaatgttttgatgtgaaaaatgtagggaggccaggtatggtgcctgatgcctgtaataccagcacttcgggaggctaaggtgcgtagatggtttgagcttagggatttgataccagcctgggcaacatagcgaaaccctgactctacaaaaaatacgaaaactaaccgcatgtggtggtgcacgcctgtagtcccagctactggggagtctgaggtggaggataacttgagccagggaggttgaggctgcagtgagccatgatcacggcactgcactccagcctaggtgacagagcaagaccccgtctcaaaaaaaaaaaaaaaaaaagaaaaaaaaaaaagaaaaacttacggagatggaaagttacattcagcaaatattgaaattcccaaagccccaactaaaaaacactttcaagtcttcctaatctaacagtgccttttcttgccttcctgccaaacctagtgcctcttgaccatgtcccttccccactttctccctcttcccttgcctgtatttcaaagccacatcatagtcccctgctttatcacttctgttcgattcttcttctttggcagtgaaagcagcccagagcctccccacggtcaacctgcagcctctggaatgggcctatggcagcagcgagtcaccctccaccagcagtgagggacaggccggccttccatcagctccatccctttcatttgtcaaagggcgatgcatgctcatctccagggcctacttcgaggcagacatcagttattcacaggaccttattgcgctttttaaacagatggattccagaagatatggcaagtaattggtctttgtctgattcccagaatgtgtagtggtctgtgatctcaacatagggtgtttttctctacctcgaatattcaaaaattactttcttggg

SEQ ID NO: 25424 - DNA, 2300 bp, Homo sapien
tgatttggcgtagtacaagctagcaattaggagaactaactttgggatcagacagaccagatttgagttctaattgctgtgtgacattgagcaagtttcttaacttccctgagatgagtttcttttttctttctttttttgtttttgttttgagaaaggatctcactctgttgtccaggttggagtgaaatggtgtgatcatagctcactgtaacctctgaactcctgggctcaagcaatcctcacgtttcagccttttgagcagctagaaccacagatgtgtgtcaccatacctggcctattatttttttgtgtgtgtggagatggggtctcgctatattgtccaggctgcctagaactcctggtctcaaagaatcttttccaagagagactctgtctcaaaaaaaaaaaaaaaaaaaaaaaaaaaagaaaaagaaaaaagaaagaaaagtatataataacttgtcagaggtcccacagctggtaaatagcagagttctgttttgaacccatactgaatccagagcctctaagttcctaatcattacatgagacttcctctctttttcttagtaatgaagataataatcattcctatcataaaggataatggaaaattaaatgagaacatccacataaaatactcagtgcctaccatgtgttaccctccaacaattgtaaccatatgaagtacatagctgtttgcaagttgctttgatttgatttgattcatatatattttttgagacagagtctcactctgttgtccaggctggactgcagtggcgtgatgacagcttactgcagcctcaacctcccaggctcaaatgatcttcccacctcagcccaggtatgcaagttgactttaatacaattgtgaggaaaagtgaacaggtgcaaaattatttgagacagttaatattaagctttgggaacggaagctacttgttaccggacttctgattggaatcagggccacacaatgcctttcagctcccatggtctttcttggccctctaatcatggattctctcttacactcttattccagtagttttctgagcttcttattctctggattagccatcccctgaaaaaaggcaaccaaacttcctagtgtgtgtgttctacgtgaagaaagaagatcatgtgtctagttccagaacacaccctccccacccccggcctcaaccagaaatccaattcttccctgctgacccctttgagagacctggagggacagagaattgacggtgggtaaagggtaagatgttggagtttaagggttcaggcctggaccaggaagctgtcttaacagcctagtgtggggccatggaagtgagttctgaaatgaagtggaaggcaggccatccgcactgagatgcagcagctggaacacaaaactccaaggtgactgttaacttttccccagccttccaatctcagactttcctcaggaaacaccaggctcttctgaattagtcgcgagcagaaccatcgtcctttccttcagaactctgaccagtttgaaactgtctaacttcttaatgtggctatatgatcgtttgcagctggcctgcaacttgttctgggaatggaaccttggattttagtcaccactgtcgctagcatcctgcacagtcagccacttttagagagcataatgcagagggggaaataaatgagatttggaatagagacggggtttcaccctgctggccaggctggtctcgaactcctgacccaccccgcctcccaaagtgttagaatcacaagcgtgagccaccgcgcccggccccacaaatgtaagatttatgcacttctccaagccaagtgctgtgcatcgaatggaggaactcgtacctttgcaggattttgtgatatatgtgaaataatccggacatgcttctgctatggttgtttgtcgccatagtttgcgaatctgggtaaacctggatgagagagacgccttacaattgcaaacatttctcaggaggccgcctgaaaacgcccaaaccatagagctcagttcctagctaggcctctaccagccacttccgctcgtccgcctaataccgcgcctgcgcaccgcgtctcttcctttctgggctcggacctaggtcgcggcgacatggtgagtgtgggtctctgtgcggcctagaactctatctgcctgcatctgtccttgttttcttctcccgcacccatctcctctcctgccttaccccgtgttctctcctgtctccatgcctttgcaggagacaccattgtcggaagctccccaaggcggaggggcgggg

SEQ ID NO: 25425 - DNA, 2300 bp, Homo sapien
tgtggcataagcctgtaatcccagctacttcggaggctgaggcacgagaactgcttgaacccgggaggtagaggctgcagtgaactgagatcatgccactgcacttcagcctgggtgacagacactctctcagaaaacaaacaaaaagcagtacttcactgattataaaaaccgaagttttccatgcctaatcatgtaacatagcagctttgtaagactccaaattaataatccaaacacccagcatatactccattctactaccaagaattatacaggaaactgaagcagagaggttaagtcacttaacccaagtcacccaactatctaggcagtttggctaagttggtgttcttaaccgcagcattagaccatctaatgctcattcaattccctatgcttacatgaaatcctggtcactcacctggagatcctatggagaattctccaggagattcacctggagagctgtgtcattcctatgaagcctgaaaatcctgacttgtcactcctggtcctacccctactgacccacagtacttgcttcacattacaaaatcagtaggagtaccattttgtgacacaaatgagatccacagatgagttactgctatggatctagcaaatgcctgacccagtgaagtattctcctggggtagcgatgtttctgccagaggcaatgcaggaggtacaggtgaagggagacatccgtgcaaaggccagtaatgagcaaaaaaacaagttatagaagataggggtcagaccaagtgaaataaaggtttttactctgtcctaaagatgaagtaaatccacattcttatcgaattaaatttgcatccttaaaggactactgactctgggatagataaaagacataccaattaggaggactgagaagtccataccacagatggttgaggagttagactaaattggcagtgaattaagtgcataaaagtgtcaaaggcaggcctaaaataactcgaattctccaaggcaattcatttttttgttactacaaccatctgtcaatctgaaatcaatcctacgaatccttacgtgcaaactaaaaactggagaattgcagacgtttgcaacatttaatgtgaaattagtttcatactgtttcctgaagatgctgatggtgtaggtcaaatgaaacatcatagaagaggcagtatatgtatatcctttagtatatcttttaccttcagaaacttttttttggagacagagtgttgtcctggctaaataaagtgcagtggcacgatcctggcccactgcaacctccgcctcgtaggttcaagtgattcttgtgcctgagcctccaaagtagctgggattacaggcatgtgccaccataccaagctattttttgtatttttcgtcgagacgggtttttgctatgttggccacactggtctcaatctcctggcctcaagtaatccacctgcctcagccacccaaagtgctgggatttcaggcgtgagtcaccgcacccagcctagacacattataaaaatattaaatgcaaggctgggcgtggtggctcacacctgtaatcccagcactctggaaggccaaggcaggtggatcgcttgaggtcagttcaagaacagcctggccaatgtggtgaaaactccatctctactcaaaatacaaaaattagccaggtatggtggtgcgtgcctgtaatcccagctactcaggaggctgaggcaggagaatcgcttgaacctaagaagtggaggttgaagtgggccaagactggtatactgcactccagcctgggtaacagagactccgcctcaaaaacaaacaaaaaaactaactgtaatttaaaaactaaagtttacagttggctccaatgtatctcaaagtcaaactggcaggagcagacttataaaaagctaacactcatatctaacttggaagacttatattcttatgctgcattttaccatttgactactaaaaaagacactgaattacaataatccatcttggcatgcttttccaatacaacagtatttacacaatgcaaacatcagaatgtctaataaagttaacaagccaaggcaattttgttacataaattaacccatttattataggccagtgatgtctcaaagagtagaggagcgtctactggtctttcaactccttcagtcttctgatggcggactttaccgtgacagcggaagtggtactggaaagaaagattcagtttccaacataattaagcatgttaacatagaaaatggcaaataagtaaatctgcctcgtttttgtgttaaagt

SEQ ID NO: 25426 - DNA, 2300 bp, Homo sapien
cagtgatggtggccatagctaggttggcttaatcctgagcaaaccgttcctgactttgcgaggttccagagagttccctcagcgaggaggaggagggccttgcagggcaaaacagccctccaggaaaacatcttccgcagactgagccagtggtgttgctgggctgagcccctgcttgccccagacatcacttccagccttccccagtctttccttcacctgcacccaggctgcttctcttccccagctggctcctgaagaacattccttgcctcctgtttcagggacttctctccaggtagtctttcagttctttctctcctcttcatcctccctccagcttaatccctctctcccctcagaaacgtctttccctcacaattgaccccaggcctctgactttgctttgtacataacctggagcatgctctgatgataaaatgccaaaccgcatcccttggtcgccggctcttttcctgccagccccagcaccaccagcatctgtggcagctcccgggctcccagcttgtctggcacccagagcacctttctggcaccctacactgggagggtgggggaggaggagctgggcttccagggagagaaaggctgggcagttttgattctcagaggcagggaggatgaaggaaggggtgaatacagtgtgaggaaggggaggagaggaaggggaggggaggaggaggtggaggagggggaagtggtgtttgcttgaaggtcagaggggaactggagtgttgaaaagcatgaagggcagaattatggggatggtgatttaacctaaagcagtggtttcaaatttcttggactatgacacccggtaagaaacacattttacatcacaacccagcaaactacactatgtgtgtgcacacgtgtccacacatacaccatacatcctgaaaaatcaaatttcacatgaggatacttatgcttactacatgcgatacactaatatttctattatattcttttttccatatgcttatcttttgtatataattataataagtagtcattaaacaaggatactattatacctattaaagtgatttcataatccactagtgattcataaaccacagattgaaaaaacgataaatataggcagtgagagtgaatttattactggctcctaaatctatgaagggtgattaataaataatgatatttataaataatgatagcaaatagacatagttctcagcagttttacatgcatgattttattcagtcttataaatctattaggtactattattattcccattttacaaatgaaggaacagacacgcccgagagttcaaataactttgctcaagatggtaagtggcagaaccaggattcaacccttccagcctgacgcaacagccacagtccaatattcagacattcctgctgttaaagacattattcaatgacatttgctaaaccagagtaaggaagactttactcaggactatccctatacatttagggaccactgcaatgaggtctcacagcaggggagagagactgggctcacctgggcaagtggggatttgtagccaaggagcagggtgggggtcagtggatggaaaattactgagagtaaacattagaggtaagggggattctggccaaacagagctaacaggattcttgctgaagacaggccagggtgatcagacagcacctgggggatggtagaggatgaggaacctgatcagctagaaacagtgtccagatctcaaggatcagggagcttcttgctagactgatttagcagggctctttgctaaaactggattttacaagaaagaatctcagaggagattcagaagcctaactgaagtttgtccaagcaaagaatctttgtcactgcacaaggtgacctgtatacattcatccagtcattcatttggagctttgagcttggtgctccagagtgacaaatgactgatggtagctcctgccacttggatagctgtcagcagtaagagggaagcagatctggaacacagaagtactgacatcacagaacctgaggaatcacagagtgggggcagagatcatcaaggccacccctcacttcacagatgggaaactgaggccccaggacccccagagctagaggctgaacctggcatgaacccaagagctctaggcaaccaaatctgttctcttcccttcaagggcctccctgcaggattatgagaagccaagatggtaaagagatatttgtagttgccatctggagattcttttgggcaacatcatgatctcctggaaagagaggtgag

SEQ ID NO: 25427 - DNA, 2300 bp, Homo sapien
tttacttcttttttttttttttttcagatcggcaccctacatagtgctaacgatttttttttttttttacttttttttcagatcggcactctacatagtgctaatgatttccagaagtccagctctgtccatctcttcctctgctcaaacatggatgctgtatccttactgcccagcatattaagccaaagcgccacagtcaactggatttcctgcctcccctgctgctctctgcaagcatcctgcactctggctgaagtggactttctgatccccaaactcattttcccatttctctctctctctctctctctctctctctctctctctctctctgtgtgtgtgtgtgtgtgtgtgtgtgtgtgttttgagactgattcttactctgtcacccaggctggagtgcagtggtgcgatcttggctcactgcaacttccacctcctgggttcaagcgattctcctgcctcagcctcccaagttgctgggactacaggcgtgcatcaccgtgcctggctattttttgtatttttagtagagatgggatttcaccatgttggccacggttggccaggctggtcttgaactcctgatctcaggtgatccacctgcctcggcctcccaaagtgctggaattacaggtgtgagccaccgcgcccggccccatttctgtgtttttgcttcaggtggtccctctgcctgtgcccttgctaaccgcccatttcctctggtagaattacaagcttcaatttcagctccgactcacccaagaaactcccctttcctcaaccaccacatcacctctctaccaaaatatttcttttcttcaaagcctctgataaacatttatttatttattttttatcttaccaaagtctttcccgataactcttcccagcttggcgtcttaagaccaggtacttgccttcctggaggcatctaggtcaccttcagagccaggtggccattgggttaactagctgttgaactgaatcaaacaggctctgagccttgaagtcagaaagagccagagtggaggggtctggggggaagaggggcgctgaggtatagggagatgaaacctgcggtggaggcagcttaatggtccacctgtcacccaaggaatctctctgacaggggtctttgttagggtcacaccccaggagatggttgattatggctgagtccagcctggaatgatgggggttgggggcagcttgggtagatgactcagtaaatcaaacagaacaatgaaaggaggtcatgcttgtccatctgcattattgaagacagccataaatggccttaccccagagcgggtctgtcacacctggagagctgatctgacctctccaagacccctgcaactgagtgttctgggatctgtcctgcaacaagtgcctcgagatttgtaggtgggggcccagggtgctaagggattattttagcgggcggagaagggagggggtctgcagacgaagggggcaggttttgcggggcacttagggttctcataggttgtagtcacgagctcccaggtttggaaaactgcaatagtcactaagaccattcggggctgtttgggtctagcttggtctagacgggtctgaaactccgcaggacccacccaacaagaagtcattgttccaagccacgtgtcagtggtgggtgataccccaggatggaaggagttggtatgagccgactgaaatctacttgaaggtcaaaacggagccttatgtcttttgtgttccccagcggttagcccagtgccggccacaggggaagcgcgcaaacgaagtcctcgcgaactgaactgagagcagacaaaagcacgcgctcttctccaccgccacgccggtcctacccaaacccgcgagttatccgtattctccttcaggagtcatagtcaggccagaagagtgcggagggacggggcccgggaagagcagggaacccccagagcccgcagccaacgcggaggtgggcgagcgggcgtgcgcgcactcacttgccggcgcgagggagtgtcgggggggaagggagtggtctccaaaagggggaggggagaaggcagggggcggggagaagccggccctttaggacccggctgcggcggcgagggaggaggaagaagcggaggaggcggctcccgcgctcgcagggccgtgccacctgcccgcccgcccgctcgctcgctcgcccgccgcgccgcgctgccgaccgccagcatgctgccgagagtgggctgccccgcgctgccgctgccgccgccgccgctgctgccgctgctgctgctgct

SEQ ID NO: 25428 - DNA, 2300 bp, Homo sapien
ttctcctccccccttctctctaccctttttatcttttctgtgaatgatcccccctccttttacctgtcttcacatattgtattatccagccattggaagtcggctacacaaaaagaggtgtcactagaggccatctctctcagaatacagggtgactggaacgaggcaactcatgtttctttggaaggagtaccacaatttcccccaatcatcttaaaagctaccagtgtgcctgaggcaggctgagctgctaagggtgtgcagaaagaaataggagcagggaagagaacatactgcacacattctgctgccactcttgtagtctgaacttgacacaaatgacaaaataacacatgatttccctcacttctaaaatatttccaccaaagttttgaatattgatttgttcctaccttaccaagccctcagactgagaaaagaagaaattaagatgagccttgctgctattttttgttttaatcattacacacaatgctcctccctctcccagccaccacgtggctaaaccccctttggcaatacaggcaaagacataactttagacgttaaccttgttttaaaatgtgcctttcggcaaatagataagtgagaagagagatcaggatctgggggtgttaacggcataaagtgagatgctcctgaactgaacgagcaagaaaaaatattttcttgaaagcagtcctccagaaagaattcttatcatagataagggtgcagtctagtggcaaacttcatgaaatgcagccccttctccaaaggaaagttagaatacttctcaagggaggaagcacaatgtaaaaggtgtaacagcccacaccaagtccacccagcaggggcagtgacattggtcatttctctctgacttgcctgtgaggctcatggctcactcaggtcaatttcagaaaaagctaaaaccaccaccttcctatttcaaggccttagttttctttcattttattaaagaggttctagtggcatgattcggttcctggtcaggacctcttccaagcaggtcctgtggccctgtcagctcatattcctgggatgtgcctataagcaccaactaacctgtcaacctatcacaaggtctcctccagctactctgccacccactccctccagggatgtggccctgcccaatagaaatacctctgcaaagtgacagagagggaagtgtcactccaatccacctttcttccctctaagaaccccacacacaaggacactttaggccaccatgcaaggttttcagacttagcatttcctccaaagtgtccatctctgcaactcactgctctcaataatgctgttgtatgaatgtccattcctgcagatacacaacacacacacatacacacacacacacagagagagagaaagagagagagaacctccctggccaacgcagctgaaggcaactggtcacctcttcatcatgagtactgaaaccccctgattaaatcctcttctccagacttttaggggagaaattcaattttttcttcttttttaaatttagctcaccagacatcactggccattctacactacctgtcccccaaacacacacacacacacaccccacatggaaacagacaccagcatacagtcaattgcagaagcttaggaagatttcttgggcacggtatatccagttggctaataagaaaatacgtctcccttcagcctgtgccttgactacttaaaggataggagggaaggggagacgaagttactctcctcattgtgttcaccctgctccgaagaactctgtcttccactggcccctccacctcctccccattctcggtagccccagcctgtcccccttgcccctttcttacattccggggggaggagggcgctgttcagaggggaggagggcgctgttcagggagcgaaggggagcccccttgtgtctagaaggcctctccccacccccaccccgtgtgagtttgtactgcaaagctccttggcatccttgcctgagttgggtgttgggaagctcaaattgcagctacaaactggctggcagccaggggccggctatttaaaagcgcctgctctcccggagccccgtagtctctttggaaacttctgcaggggaaaagagctaggaaagagctgcaaagcagtgtgggctttttcccttttttgctccttttcattacccctcctccgttttcacccttctccggacttcgcgtagaacctgcgaatttcgaagaggaggtggcaaagtgggagaaaagaggtgttagggtttggggtttttttgt

SEQ ID NO: 25429 - DNA, 2300 bp, Homo sapien
gactaccaacaagcaagccagcagcctgttttatagaacttcttcatgtgaataaaagtcaccaacaagtcaccaatagaaggtctccagagagacctgcccagaagcaggaaaatggaaagtgtcacatatggtggctatacaaggaatctgggtttcaaaactcaatttgccatctatagatatcagaaaaccagggagtgggacttgaactactttcgctcttctattcaaccaacttttgctaaggatctcctgcatacaagatgctcagttcttgaatgagggtaatgacaatggagagaggagagacaaatggaagaaatagcaaacaagttctatagaaatccgaatgaggcgggcacagtggctcacgtctgtaatcccagcactctgggaggccaaggtgggcagatcacctgagatcaggagttcaagactagcctggccaacatggcgaaacgctgtctgtactaaaaatacaaaaattagctaggcatggtggcacacgcctgtaatcccagctactcagaaggctgaggcaggagaattgctggaacacaggaggcagatgttgcagtgaaccaagattgtgccactgcactccagcctgagcaaaagagaagactcggtctcaaaaaaaaaaaaagaaagaaacattttcaaaagcaaagcatttactatgaggtgtaatggaggaaaaaggaaaggctggatgacttatacaccaataatcattcaatatatctatttgtaagtgtcaaaggcacttcaaagctggtatgtcttataccaagtacatgatcatcactctccccatgtctggcctttatccccatgaatggcaccagcatccagataactgcattatacagaaacaaaagccacacccttgacaccatctgctttcacctcccaaattcaatccgtcaccaagccttggtctcttgtctactttagatctcaatcaacacctttcctggccagacctaaaccatcatcaaatctttctctctgctgaaccattgatgttgacagtagcatctccctttacacagctcctccagtcaatacatcacccacttggcaccctctaatctcacatgccatcctcttaacatttttaaaggcttcccaatgtacttgatcatggtttgatctctgtctctccctccagcctcatcctgtaccatgtagggagtttccctctgcccttctccagccaaaatgactccgtaagtacttactcactgatttatgtagacatctgatgaatggctttctccccagtgggctgagagttccatgagcacagtatctacgtgtgtttatcctccactaattttctaccacctaaatgtatggcatatgctatgtgatcaatatctgtgactgaattttaaaaaatgattaggttaattgttctgaaccagagccattttttccctcacttccccagcctcccaaagaaacaggtggcaatgtttgggaatattttgggttgtcatagctgccaggcttctctggtgtccagtgggtaatggccagggatgttgccaaacatcctagggtgcacaagacagcccactgaaagttaccctgcccattgtgtcaacagtgccaagactgagaaatcctgacctagatgaaaaagaaggaatatttctattttgatcatattgaattgggttctgtagagtcaagtccttacagaaataaatttattatctctggatgctgtgagagacttaaacagtcatgcatacacacacactcaatgactgttacatttcctacaggcaggagaagcatatctgaatggtctcttgtactcatccaatgcctggcacagggctgggattcagtttctcaataacacctctctgggaaagcctcacttaacataaaaaggacctcaaaactgagggcagcccttgagctgcacgaaaaggaccaccttatttcacaaatgtgaccaaagtgcagcaaaggtgagtgacagcacagtagagccccgcccacctgctgagccatgccccttccctgtcacaatggccaaggccttaaatacccagactcctggcccccgggccttgcaaagcccctcattttggcagaacttaccatgtcgaccagccgcaaattaaagagtcatggcatgaggaggagcaagagccgatctcctcacaagggagtcaagagaggtggcagcaaaagaaaataccgtaagggcaacctgaaaagtaggaaacggggcgatgacggtgagtgagggatggggaggagattgccaaacttag

SEQ ID NO: 25430 - DNA, 2300 bp, Homo sapien
caagaagcttgatatctggccagagaagccatcttctactggtagatataaaatgtgaccaaatgaagaagtaaccatagagtatagggcctttgttttgagtcttgaagcacatttggaagtttaataggtgaagatgaaaaaaatagtacaaatcactgaatttcctatgaagacctgtactttttctactttttaaataacccagtttggttagaacagaggttgcctgaaggaaataatgaaggacatggctaaaaagccaggttggggttggggatggggatatggaaattgaaatgctgtagtcaaaatgtctacatcttgtttcactgggcagcagtttgcatgaaaaaagagactccagccacctccacagtgatgtagtccaaaggctgatgaagggctgccacctggcatcatggaaacatgggcctcataaagggggaagagcccaacaacacacctgggcttcaggcctaagtaatgaagctctgggtggtgccaaccagaagggtcaggttggcaggaaggtcccaagaaatgtcgtctcctctcttccttaaaagcctggtttcaaacacacttcctgaacaagggctgtagtgattcacccacttcaagaaggccaacttcatgttgaggccatagtgggtggaggggtggaggtgatcatccaagcatcccccagtgtccctctaatatcccacctcttgcagatgcccaagaggcagagaatgctacagttctcttgtcattcttttaacataagacctaaggttttaatcctgggtagggcaacaaaggcaggaaagaagagaaagaaagagaaggaggtggagttgtattcaaactacatatgtgatgctgagcttaatgtattctaactcttctctgattgtcaggtgctctgcaggagtcacctaaggtaaggacagagaaatgagatgaggttccctcaagcggtcacacagtgcctggcgcttagtaggtcccctaaaagtgctctgaccacctcaagtgtcgcagcttccagttttgcatgccttactttcaaccccattctttcctgagttttcttctgttctctcggtctccttgccctgctctctcctctgaaacacccaatggctgataaatcccataactttgtctctagagcatcttacctgcccctggagattcaaccacacaaaactctaccttgccagtgcccaaaactacatccccagcctcaattgctcttctgagctacagatgcctctatccaatttgtctacagggcatccttggggacctctctggtagacattcaacctatgcaaaactaaaaccagtttttttctgttcacatctatttcctgctcctgcatctactcagcagtcattcactattcacttaggacagaagactaggattaaaactttacccctccacataaatcacgtcagtattttataacttatcccttcttcaactccattgctggcttgggttaaatggcttaatatcactaaagaacttaccatattgcaggcactttcctgcaatagataacaagttagaattcaagtcttttgttgatagctgtctttatggtgaacattaagtcaaagatatcaccctctgggtaactgaccgtcttcctctgcatcccttctgtggcagcagttagagcatacgcactaaaattaagtagatgtggatctaaatcccagctctactgtttagtatttgcacatccttgagctatttcctgaagctctgagccagtaaggaggtgatctccaactaggtgtttagtctcctcattggtaagataacaggattgccattaagcctgagtcctctctttaacttattgaagatttttaaggctgggagcaatataatgatttgcccacatttggtaagttgagaaacttggatccagaaaatcagtctgactaaatattggagaaaatcatctcaggtcccctgctcagcccttctcttgtagattggttcactgacctcatatggcctttgtgatatcccagagaggggaagaccaagtcacagtggcctagattctctgcagctgggctccttctgtctcagagctgggaatacaatcttcaggcaaatgactggaaagcctccttcaggcccctaacatctcccagcagtaagtatgagcactaagtgtgtgcattcagccacactaggatacagcagagctgcatgtaccccaggactcagccagtttcctacgggagcatagaagaaagtaccactaaaggagagcaaggagaaggaa

SEQ ID NO: 25431 - DNA, 2300 bp, Homo sapien
gcaattgaggctggggatgtagttttgggcactggcaaggtagagttttgtgtggttgaatctccaggggcaggtaagatgctctagagacaaagttatgggatttatcagccattgggtgtttcagaggagagagcagggcaaggagaccgagagaacagaagaaaactcaggaaagaatggggttgaaagtaaggcatgcaaaactggaagctgcgacacttgaggtggtcagagcacttttaggggacctactaagcgccaggcactgtgtgaccgcttgagggaacctcatctcatttctctgtccttaccttaggtgactcctgcagagcacctgacaatcagagaagagttagaatacattaagctcagcatcacatatgtagtttgaatacaactccacctccttctctttctttctcttctttcctgcctttgttgccctacccaggattaaaaccttaggtcttatgttaaaagaatgacaagagaactgtagcattctctgcctcttgggcatctgcaagaggtgggatattagagggacactgggggatgcttggatgatcacctccacccctccacccactatggcctcaacatgaagttggccttcttgaagtgggtgaatcactacagcccttgttcaggaagtgtgtttgaaaccaggcttttaaggaagagaggagacgacatttcttgggaccttcctgccaacctgacccttctggttggcaccacccagagcttcattacttaggcctgaagcccaggtgtgttgttgggctcttccccctttatgaggcccatgtttccatgatgccaggtggcagcccttcatcagcctttggactacatcactgtggaggtggctggagtctcttttttcatgcaaactgctgcccagtgaaacaagatgtagacattttgactacagcatttcaatttccatatccccatccccaaccccaacctggctttttagccatgtccttcattatttccttcaggcaacctctgttctaaccaaactgggttatttaaaaagtagaaaaagtacaggtcttcataggaaattcagtgatttgtactatttttttcatcttcacctattaaacttccaaatgtgcttcaagactcaaaacaaaggccctatactctatggttacttcttcatttggtcacattttatatctaccagtagaagatggcttctctggccagatatcaagcttcttgaagttgaagctatatttctgtggggctctaggggatagggcaggggtagtagatttaaaaaatgaactggactagagctttaattgtactttttatcttgatttgtagtaatggtttatgggtgtatacctaggtcaaaacttatcaaattgtacacttaaaatatgtgcaggttattgtttatcaattatacttcaataaattcacttaaaaagtgtacattgttcaaatcctccctcaagatctctttctagaagtaaggcaatgaaaccaggaatgtatgcctaaatgtgtcagcagacaaaggctttaaaaatgctagacttggagatcaaaatatgctacatgtacaataagagcttctataattgtatatatgcctttcatgtattttcccctcaagattatcaactgtgtgtttgacagtgaatattaaatatgttaccagttgaaatttttggttataaatgtaatacgaattgtttcacaaacaaaacatgtaaagcagtattaaaatttggccaaacaagtgttctgtatctactttaataaatggttattctttaaaaaaaaaaaaaagctagacttgggtttgaaaggcatagagaattttgcttggtttctgtaattcttgggggttcctatgggctggctgataggcagccagctgatttaaggagtcctactaggcattttcttaattttatccaacatttcagtactgccccaaccactcaaccaagctctcatgttgactttcagccattgtgacaaggcaccatcaatcatcatgtccctttaccaggagggcccgtgtcataagccactatataaagggaatgatgggtggactgctttggacaaatggacctgcggtaggagagagggacaacagtaggagcaggcagatcttgctgtttcaaccaaaacctcatgctgaccagagttgaggaacagaagaagatggtgaaggcctgcaggtataggtgttcagcatgtcatctgaaatattccccacagaggcaaaaagaaaggaaattatctctgaaaaggaatgg

SEQ ID NO: 25432 - DNA, 2300 bp, Homo sapien
gcactactgatgggactacaggtcaatgaaacctctctgaaaagcaatttagaaaaaacctaacccctttgaccctataaatccacttttataagctgtatcctaagaaaatataaaaaacacaaacaatactgaataaaaatgtaaattttcatatacgttttaataaaaatagaactacagtaaatataagatgttggttcatagattatataaaacaaaatgatagaatattatgtagtcatacacatacatacaacaatgttagcatgatgcattttgtgtctccgttttggctgaggccctaaaaaagcagagaataatacatcagggaccaagtattcctacctatcaaaggtgctaggcagcccaggaagggggcagttaacattcctagaggaaaccttcaactagtagaggatggaaatccattacatgtcccagcctcccagcatcgggagagataattccaaggtgcattccacagtttcttagagggtctccagcaggattgaacccccgttgctgatgacaatactcagctcagtaacatactctttattttcttccttccctgtcccacatggcctgtcccctcccttctgcttcctataatctacctcccattacaaagcccagacacaagttcttatctcaggctgtattggaaggtgagataaaattaagttgcccccaaaacataataccaataatatcaaaaactcagcaagggaattatggattttggataccaaaaatcaggacgggaattatgtacaaagagctcatttcatcccccacccaaagcaaaaaaacacaaaatcaaaatgtggctctctgcttcaaagaagggaggggaaatatattgagaatatacacaaactaataatccagtgagttatcctgctccaacattatcatctcatcactgccattgttattgtcacacaccaacaatacaggtagaggtcagtcagggtccccgcccttcagggaatcacaaaactggaaaaagattcacaggtctaggacctgtttaaggcaattcctctgcctaacacaatgttcttgctgtcccagctatcaagaaagctttagagaacacagtgttatacacaccaaaaaataataatgagtgtcaggggcaggagataatgtgttatgagtcttctgtcccaatttggagcccaagtcacatccagacagacaactgattctcttctctgtggttataattcctttaatttcctcatggatttcaaactattcttcaggaaaaagaagggattctgaggctagcaacaaggtaggcttgataatgtgtggtcccagcgatctgaataaagatccaaaaagaaggttgccctgtatacaattccagatgcttgtccttggatcccctgcctagaatatcaaactgtcctctttactgtttgataactgtgggcaagagagcaatggaaccaacagagttggtagtgctagctaccaaaagtttaggacagaggttacaaaatcaaatgtcttcagagctcaggcaggtagtataaagtaaggatttgtggagatagacaaattgacgtgtacgtgcctcttccgaaagatgcttctgagctcaagccagttaaaatccagtattgatagacattgcacatttttaagagcaaccaagatgtcaaatatctagattttacatgaaagctcttttccatggtggcaactaatccaaatgttttctgctcactccatattggcctgcataggatgtcaaagaaaacatatttgtgggccgttttggctcttgagccaccagtttggacataagttatgagagttatcttctgttattggagaatgtattggaagtgcaccataatgggcaactataaaattttgaaaagcagaaagactagagaaaagtgttaggtcatgagctgtaagtgagcaagagggactgtactcaaattcacaaacttatgctctctaatttgggaccagtttcagcacctgatatgatgaggtataaaggataatggtggctgtaacattatgacccttactgcatcatacaaagcactgacccaatagctgcctcctcctgtcactgacttaactgcctgagtagcatctggcttagaactagtggttctgtcctctagccctacttccctatgctccttaaaagacccttttaccagaaatctaaaattaccagtcccatcaagacaagtataaagatagcctactgcagaaaggcatccagaaagaggaagaaggccctgagtagaaggaacaaggta

SEQ ID NO: 25433 - DNA, 2300 bp, Homo sapien
tggcaagagcaggaccctcagaggctctgtgtgtttttccagggtcctaagcttggcaggatcatttgttgacatattaatttgtattgttcttgccattgcagaagaatcagaataaatcagagttgtttttgttttaagacttttaaaaggctccctcctcaacctgctcagcctttaggggctgagacaaataagaagtgtgtggggcctttctcaggtgccagcggccactctcccacctcatgccataatgactcctttgctgaccacagggaatcaccacgtgttagacctgagtctgttccattttgcctaaaagagcaaacagggctgggaatcaggtggagaatggggattttgttttccaaaggagctggttggtgaaagcaaagggggctcagagagtggggaagcacaggagtttggagttgaggagtaacttttcggaaagggaggaaaggaattgtatccaccagggtccaaccaaggaaacagagtcacatgaaatatttataacaaagagaatgtgacaaggggaattggttagtaggtgatggaattgctgagaagccaaacagcagatgaaaaggcagccctgagattagcaagagtggggagtctggttgccctaagcttgaaggacaaagggaggagagcctgagggcagctgaaaccagggctgacctgtgcaatgggagctgggggcacagaggagaagtggcagctgctggagatgctatcttcagaagcagagagagagggagcaaggcttggcttctctcctccatatccagtcttctagcagtgccttacctgggaatcagctggagaactgtgccttgtttctcagcagagatgaagaggtgaggtcctctgatgggcagcatggggtaccagggttggaacactgaagaggagccttgggaacctcaaagactcccatacctccataggcactgagggatggagcacccaaaggagcttgcctttgggtgaagcaactttaaggatgatgagtaccctcagagaccatgtcctttgcctatgtctgagtaccgtctaggcagcacccccccgcaaaacatgatagagactgaaggaaacaataaggaatgtggcactattttatactcaacttgtggaataaaattgattcctgctagaagaattaccaatgttctccgcatcctgtcttcacagcatgattttctggtcagactgcatcagctccctcttctccaccaggacagtagggatctacagcccaagaaccaaagactttggacattttgttctacttgggaagtttgtaatgttatcttctgctgtggagcatagtgcaaagaaatagggggaagaaaggtgggtttcttctgtctccaccccaaagaccaaggatactttcttccctgagggttgcctctgcattgcaagttttttctgacccttcactacacagatggacaactcaggtggccagaggacttcaactgaatggaattacacaatgatttgttgaacatgtattgtgcaccagggagtatgtgaggctatgtggtaggcatgagatgaacaatggaagattcttgccccatggaaggtgaccactggaattagaaatcctagcatcacctaaggaaaggctcagatcttccctggtggaggttggggatcttcccgaagggaccttttggacccagagctcttgtatcattgcctcttggcaagaggtttagagactcccttcatcatgaagtttcacagactccttcagcctttatctttcctgagttctatggggaaaagctaggttagatatgtggagtgactcaccgagacctgagaaggcatctgcatgaggctgcgggggtgtccttagagaaaagggaagctgcagtgtggaggctgggggatgcacaagatgatctccagagtctctcagccttcagaagcgcaggctctctgaggccacattccttcctggtctggctcagtggaggctgtgtttccccactgttgctttttgcatggatttgttcagcagttgaatgggcagagaaggaggagtctctcccttcctgttctcacacagctctgcttcatggacacccacacagattcactggagagcaaagcctaccagagtccctgtcagcagcactgtttctagaagcttccacatgagcagacagcatggagtcctgggggctaatgaagcagcaatgtcagcatgagcacaggcagggagaggcaagaggagcagagtaaaggggaacgttctcttcattcttccacct

SEQ ID NO: 25434 - DNA, 2300 bp, Homo sapien
aagtggctatttctacaaggagctctggtttcttttagcacagaatggtatttagaaaccaaggaatgtggtcattgttattagggtgttgccatccctacatcttcgcagtagagatagagaatatatgcctgttctcactcataggtgggaattgaacaatgagaacacatggacacaggaaggggaacatcacactctggggactcttgtggggtagggggagtgggggagggatagcattaggagatatacctaatgctaaatgacgagttaatgggtgcagcacaccagcatggcacatgtatacatatgtaactaacccgcacattgtgcacatgtaccctaaaacttaaagtataataataataaaaaaaagagaatatatgtatctctacatatatcctcatatatctacatatgtagatatagatatacatacatacaagcaaactatacacacacacattccaactttatatctagagtcattttcttagtcagtctgggcttctataacaagataccgtagactaggtggcttaaacaacagaaatgcatttcttacaattctggagtctgggaagtccaagatcagggtgcagagtccatgtctggtgaaggcccacttcctggtttgcagatgaccatcttctcactgtatccccacatagtagagacaacaagctctagtctctctgtcttattaaaagacacagtccaatcatggggatctctaccctcataacctcatctaaatctaactgccttccaaatgctcaacttcctaatattatgccgttgggggttagggtttaaatatatgaatttgggagagggatataaatatgcagtccacaatagttctacatacaaacatacagtccatatagtccttcatgcatttatatctgtatttttatacctctacatattgcaaactgagctcacaccaatatctctaattccactgggtttattcttcttttcttttttccatatttcctactctcatttccagtaatgagaaacgtggctcctattatccctagtacagttgtccctcagtatccatgggggatttgttccagaactccctcagatgccaaaatccatggatgctcaaataccttatgtaaaacggtatagtatttgcatgtaacttacacacatcctcctgtaacctacacacatcctcctgtaacctctaggttacttgtaatacaaaacacaatgtaaatgctacataaataattgtcatactatattgtttaggaaataatgacaagaaaaaaaagcctgtacatgtttggtacagttgtaaccagccatttttcccccaatattttcaatccacagttggtttaatccacagaaaccacgaatgtggtgggtgactgttttacctgttttgttccatctctctatatgtaagcagtctccatcaccacaaccccccaactcccacccttttgcacagacactctcctctccttgcacggaacatatttatacaaaaaactttcacatgtatctgaaattcaaatttaactgggcatcctgtatttttgtttgctaaacctgttagtcccagagggccaacctaacttccatgctcccggccttcaggtgactgtgctgcagcccacgttctctgcccagccctggttgtgtcccttccttggaagaggtgttgatctctagaaaccccccccaaaaaactttcctgttgctcatctccatttcaatcagcttccaggaactaaacttgcaacatcaagcctctgctttattattttcctggttctaagatcccagaggtccccacccacacccgtgtaagcccagttcccagagcagcctcgatcctggccccagggcctgggggtgattccagagaagcccctttgagggattacgggcgcaggacgctgggcctgcgggcctcccgagggctcccgcccaccagggggcagtcttcacctgcgtgtgagcagctccggaggcccgggcaggggaaggggtgggcgcagggatagctcgctgggggaacccatgcggggcatacgtgcgtgagggcacgtgagggccgtgccggccagagcccagcgtgcgcggccttgcgtgcgtgcacacgcatatgtgtccaggtgcctacgcaggtgcctgaccctgggcaagtcgctccgtcatgcggacctcagttttctcatctgtccgacgaaggtatctttccatctctgactgtcggtgttctttatccaagactgctcagcacattgggtcctctctttagagcc

SEQ ID NO: 25435 - DNA, 2300 bp, Homo sapien
agtcacttctcatccctgaattcctccttttatgtaaaattaggcagttggactgtgtcctgtctgagctccctccagaatctaatgttctatgacaaattcccaaggtctgcagagtctgggcatgggtgtgtgtgggggtgctgtctgcctgagaagtggggtgcctgacatgcagtagatggcctctagattctaggccagccatcacctgtttgatccaaagagaagtgattttttttttgttctatgtgatgcagaacataggccttccctgtggaaagtgaggagaggcctggggaaaagggggaagaaatggatctttctgccctcatcttcatggtgggtatgctgaagttgagaaactgaacctgtggagaaaggttctagaagcaagtgttttaggccatgggagaaaagctgtaggaaggctttagtcacagtcttctagggaaagggggacacggggtggaggaaggctttcagtgggctctgtgggaatgcagtgccaggccctccaccaggaggtggctcagccacccagatggcgggcaggggataggggatggatgaggaggccgaaggtcccttccactgtgttcgcatggtgttcgaggacatcagcttttgatgtcagtttcctggggctgccataacaaaggaccatgtgcttagtggcttataaatgacagaaatatgttctctcacagttctggaggctagaagtccaaaatcaaggtgttggcaaggttggctccttcctgatgttctaggggagaatctgtcccaggcctctctcccagtttcttgtggctgccagcatccttggtgtcccttggcatgtagacgcatcaccccagtctctgcctgcaccttccatggtgctctcccctgtgtgtatctctgtctcctctccttgtaaggacaccaggcatacaggcatactggattaaggctcaccctaatcctgtgtgacctcatcttaatttgtctacatctgcaaagaccctatttccaaataaggtcaaattcacaagcactgggggccaggactttgatgtatgttttgggtgaacacaatttaacccataacactttcttcccttctcctgctttagacaacagcccggagacgcgggctaaagtgaagtttgtccaggacacttctaagtattggtacaagcctgagatctccagggagcagggtgagtgctgggctctgtggtgcatcagaggccatagctggctgaggcctgctgtgtcttccctgggcaaggaacagaggcaaattcagtcctctttgtagcagggggtcatcacagagggggctggggttgaagctggacagtaggaagcacttcctgcagtgaagtgtgggaacacagaagcagtagttgtagacacctcttggaagggttcttaaaaacagcaaagccttggttttcctgggcaaagtaaaaggtctgctaagataatatgaaaccttagctctctgtctgcctgatgtgggaggtttttgcattttacagggagagagaacaaagttgggaataggggaatgattctcaggggaaggctgggtgtgggacaggggtcagcaacggcagcccatgggtcaaatctggatgctgcctgcttttgtaaatgaagttttactggggcgcccccacacctgctggcttgcatcctccctgtgctgctgtcctgctgcagtggcagagtggagtagttgtagcagaggctgcatggcctgcgaagcctgaaatatttactctccggccatttacagagtaagtttgccagccaggtgtggtggtgcacacctataatcccagcacttcaggaggccaaggcagggggatcacttggggccaggagttcgagaccagccagggcaacatagtgagatcctgaatctacaaaaaacaaaaagaaaatgagccaggcaaaatggcacacactgaatagtggcctgtggtcccagctactggagaggctgaggtgggaggatcacttgagcccaggaggttgaggctgcagtgagccatgattgtgccactgcatgccagcctgagtgacagagtgaggcccggtctcacaaaaacaaacataaaaacccaacagaataagtttgccaacctgagtacaggaagacccgtaggagtagttaaattttaactttaaagaaaatttgtctcacctaagaaagaacgaaggtcggtaggctcaatgagacttaagtaaaactagcgccaccgaggtcttgcttcctcctctctccttgtcccttccccatgcag

SEQ ID NO: 25436 - DNA, 2300 bp, Homo sapien
taggagcttattagatagcctaagtggtgcggggctggattagggtgctgaccataggaatgcaaatgaagagatgatgcagtggatactgtgggggtagaaccaatgcacttatgtgttgattggctggagcggatgagggagaaggatcatcaaaaatgattctgagctccatgaatagaaatagaatgatggttctgttaacaagcaggaaggcaggaggaggacgttgggtggaagatgaagccttggtgttagacatgttgagtttgaggggagagtggagcctccagggagagacatatggaaggcagctgaactttggaattgagtgtgaaagaaaaggaagagctacaggttttggaatcattctcacaaaggtgatggttaaagctttgggtgtatgtgagatctcaatgtcagagggcttggagagaaaagaacttaggatggaatggccatgaagggaggtagaggctgtaaaggggctgagagtgagtgttcgggtggtggcaggagaccaggacagcatgtcatcatagaagtcaagatggtaaagggtttcaaggaggaagggcaggagattagcagtgtcagcctgaagagatcatgaggaggactgagaaaaatccactgggcttgcaaattaggcagccctgtgtaaaacatcaaaggcatatttttagtgcgtgttggtgacagaaaccagactgtgggggattgaggatgagtggagaaggagtgaagacagcaagccaagtactcttttcagtggttttgtgataagagaggagagagtggtagctaaagaggatagtgagtgattgggaacttttttgtaaatataagagtcatgagaatgtttgtatgtagaagaggaggggagtaggttggacatggggggaggaaggatgagaaaaagaagagaaagaaagaagttgatagaataaggtctctaaggaggtaagaggggacaggcctaggagcccatgtaggtaaattaggctcaaccaggaggtgagatacctcttcatgaaattagaataaaggatagataaagatagagggaaatattgatgtcaagctttgggagcttgaagtgaaaactcttgtgtttttttttttttacattttgttctgaaaataggagatgagttgaaggctcattcaatcattcgattcaacatgaacttctaatgggtgctgcttgccagtctaggctttgtgaaaatggtggcaaataaagatccttgcccttacagcagagatggatactgagcaaataagcacatatacataggatatgtcagataggtgatacgtgccattgagataaagcagtgagaggtagggggtggctggctgcactttacatgggatgatcagggctgggcagcgagagatgagccccatggagcaacaagtgcagaggccccgaggcaggagtgtgcctggcatggctggagtagagtgatcaagggaggcatagcaggacacaagttcagagaggaaatgggaacagggacagcttacagagggtctttgaggtgattgtaagaatggtggcttttactccgtgtggcatgagaagccttaggaaggatttgggcccaagagtgacatcatctgacttgttctgaattgaccagggtgggcaggatggaaggagggagagcagttaggtggctgctgctattgatctgggcagtggccatggaaaggggagaagtgctcggattttagacatattttggaggtagagccaacaagattactgatagattacacatggaatgagagagaaagagaaaagtcagagacaacgcttaggtctggggcctgagcaactaaagaatggagttgctctttattgagatgggtaacaatttatgaagagcagtttcaggggaacactagaaacatgacttttggacacattaagtttgagatgaccatgaaacatctgcagtggttggataaatgagtcaggagtttaaggagaagaggctggaacttagagatatgggaattgttgacgtgtacataccagattaagcatagcactgggcaatgtcaccgaggggttgaggacaggtaaggagaggtcccaaggatggagtcctggaacctcccacattccaaggctacagacaggaggagggaaccagcataggaactggcatggagcagcttgtgaaggagaggaaaggtaacatagcttgaactctgggggccagggcaggggcaatgttggccactcctgtggcccctgtggtgtgaaggtgggttagaagtcaaca

SEQ ID NO: 25437 - DNA, 2300 bp, Homo sapien
gcaagctccactgtgtggcttagatgctattggttcaggaggaggctgggagatgggtccacgggtccccatgggctcctcctgcctcccattttggggagaggggaaggggcggatgcctgaaatggaaggatcccacagaagggctcggggtctcttccaggacgtgctttgagccccgttcggggttggtcttgtctccacaccccaggggcagactcccagcacagtggggctttgtcttttcttccctgcccctctctgaccgtactccctgtgctggcccctccgtcttcacccgccctgggctgcagaggaacagggagtggttttggtggttggcacaggggtagatgttgatggcacgaggccctatcatctgacagctgcctgacccacggtggggagggccctggagggagtgctgcgggagcaggaggggcagttcctataggcagcctgactcccatggtgagcccactgccaccaccacattgccctggggcagccctgcatgtccagccctacaaagcggcagcatcccatggaccgcatggggcctctccaggtggagcagggagcatgcctcttaaattagtggggaaggttctgctcaaggtatgcatgagttcccctgggcgtggggtactcatactggggaggggcccttgtcccgctttgtgatgtttctgggactggggtgcagggggaacctaattttttgtgtgtacctactaccaaggatgtacaggtttaatgtactcaaaatatatcatacgtgctcaataaatgtaagccattcttattactgttattttgactaagggctgggagctgtgttgggtgttttgcgatcctcctgacacccctgtatggcagaggctatgaatccactttatagatgaggaagcagaggcttggcgttgctgaatgatttggtgaatgccactccatcccttcctgggactgctgctggggtctggtgttatcctgaactgctaacctttggcaaggggacagggtgatggtgtgtgaaccaagccttctaggcaatggtctgggcacactcaggagccacatcctagagctgctgtccccacatccccagtctgggccagatggatcccgtcaactagagctacagcaagagacagtgaagttagacgtcacgaagaacttttgattgcaagagtgtgcacgaccttggtcctagggaagaaagaggtggccgtttagttgtgactgaggctctttggctttttttagaagaaagtattggtgatctgggatggatgtgtctgtgcctgtgtgtcggggtgggtaagtgtgctgtcttgtctggctatgggaggagagacaaaatgagctttggaaaggtaagcaagtgagcagctaccagaacggcctgtgtactgtaaaagaggagagaaaacctaatttgtaaggctcctgtcacctgtctcaggttgggttggctccagggtcattgagccagtcccctgcccagccacgggactctccagcagtccaccccgggggaggaggacctgggcctgctgctgtgataatgtggctgtttgtcaagctgtgttgctgtctctggcccacggcccaggactcacaggcaggaatggctgttttcctcctgccgagttggtgtgtagtggagtttgtggatagtgtgctgtgtcgcactttgttttggaaaaatccaggctagtgggcaggaaggagaggggaaggggtgtggctgaagggggtgctatgtgggggttggccacagcccccagaggagatgtaggaatggggccgggcccctgacgtaggttggtcaccaatctctggctgcctgacaaggcccctggtgttcgcttacagaccctcctcccaactgtgcccctctggggatctgggctcaggaaatggcttttcttttggtcctgagctgttgtgtttggtctgtggacctcaaaggaaagcagggctcttcccacagaggcattgcttcaaaccaaccccacccaaggctggaggttcgtgctccttgcctcatgacggggaagaaggcagcagataacagaacctggggtcatagaccttgagccacccagtagtgtctgagtggtgatccactcttgcctgcaatgaggaccaaggcaaaaagagttggctgaatctgcagcaggaaggatgagggttagataccaggaggaaattcctgacagtgagaaaagtaagacactctgtctgggaggctgtcgaatttcctttcatggtgccctttcagcaaaggaaggatt

SEQ ID NO: 25438 - DNA, 2300 bp, Homo sapien
tgaccgtcaaagttggaggatggaaggagacaaggttggaaaggctgggatgttccactgcagagcttggactggaagtagcaggcagtggggagctgggacgctttgatgtccgttgggataatacggatgtgggttggaaggaagagaaggggaagatggaggattctgctgttccggatacctgctagtgggaggggttctaattttatagcacaatccccacatccacctctagagagctgaaactgacccgggatcccctaacttccctcatctaagcagagctgacccaagccccagaggagcccttagtctgcagtgggggtggcaggtaggggttaaggaggataatgttgttggggtcacctttgccgtagagttgggaccagtgagtgggagacttggtttgaggctgggccgacggctagggaggactaggccaagtgtccccatagtccatctgctttcaccatccttgccatttgtggacagcatccacactctcacagattgaggctgctgttgaagctggtgggttctggatgctggaatttgggactcagaacccagaccctctttccagctaggagaggacgaaatcttgctctggaggcagaggatgagtggagcgatgcttctatctctgccctccccatataaggtcctgagaagctgtccttctctcccctatccccaagggtttcattgtctctgactgggggcgaggcagccctccaaagtactggccatctccctgtggctctggccccacatgctccaaaatcatatcccctctcagggactcccctgtcattgtacttctggggaaaactgaagcctggggaagggtttggctgaattaataaaattagtgtgtgttaagaccggaaaagttcttaaagacctttctgtcgcagaggaaactgaggctcggaggtgcaggccactgacccagatgcggaagagaaggaagggcctttcaacctctggatgtctgagtggtgtggagcttggctgtggagccagccaggttcaggtgtgaggtcctccgcacagtcctgcttggacttccacaagtcacctctgtgctccgaggtcacgatcttcagctataataaccgggtgattagaagactaagtgagagttaatagtctttagtggccagcatctgataggtgtgtagcaaataacttttccccttcctttctaaataatcctatctgcttcttcacttttatctttcatatggtgctctaaacttttcacatcacttcccccattatttttatcatggaaaacttcatgcatgtacaaaagttgaaatgattatatggtaaactcctacaatgaacactttgatatatttgctttatcacatttctgccaatccatcttattttttgatccatttcaaagagagttgaagcatgtatttcattaactggagctcagcttaaatgacttttgaatgtacagtcacaaatgtcctaactcagcccagagaaaacagcagagattactatctcacatttgacagctaagaaaaaagcaggttcagaagtgagattcctggcctccagtcacaaaatgagttggaaacagcggaaagcagagtgctgtagaaaagctgagagttgctatattattattattatcatcatcaccatctcagcaaacattcttctccacccagaagccctttggccatttctctgcacctgcgtcttttctatagagtcttgacccctccctgcccgcttccccacccctgtcccccaagccttctggcccttcccgtcctgtccccagggaagctgctgggccagtggctgaaggaggggcagccacattccctggtgatctcctgccccaggtgtctgtgccctgacacggccttcccagagccagctagagtgcagccagcagagcactgcaggggttaaaggaggccatggctggcggagggggcccactgctggctggctccgggaaggaggcggtgcactgttggcccgccccctgggctggcctgggagggaacccgactagcagagccctctgctcagttgctcccagcagtggccctgggaccagctctgctccttgcaccccgctccctgcctggacacaggctcactcgctgccttcttctgggggaaaccagcttcttgccagccacagctgctgcctccgccactggccaccgcccctgtcctgggagtcccttggcccagacacccacctgacttagtggctcctctgcaggaaaggtgagtgaatgaatgtgcgtgtgtga

SEQ ID NO: 25439 - DNA, 2300 bp, Homo sapien
gtggattcccaaaggataagagggatttggtccagggaacgatggggtgctggggtgagggggagtgtaccaggcagctgacacagcaagtgccaaggccctgaggcactctgggaactggcagagcagggagcatgctggagggaggtggagtcccggcccccattgtgtccctcatgtctagactggggtggatgcttagagatgcctttttggttgaacatgagatgttgaggtggcggtctacagctcaggaacgatctgagagtcggggggacatgactaaattggggtgcgcataaaccacaggggatatcttcagacaggtccaactcagcaaacgtttattaagcctctcctgtgtaccaggctcctctctctctctctctctctctctctctctctctctctctgtgtgtgtgtaggagagagagagaggcaggtccccctggaaggagcccacactgttggaccaacaaaggggacgtttcctctatttggatggggtggggcaagggaggctgctggtgtccaagagggaacacctttgcgaagtgagggagttgctacccgggctggtggtggtgctgagggagagggagaagcagaaagaccagagtgatgggtaacgcttgtgtggctgagtggggagtatgtcctgctgtggccagggtggagatgtccctgagctaggctgggtggctggtggggtcaggaaaaccttgctcagcaccggtgagtcacaggcctgggctgggccaggactaggttctgagagaagaagatcccatgttagggccagtggccaaggtccctttccaggcaccacccagtgtgcttcccagcttctcccccttccccatgcccagccccttctgcctcagacaaatcagaagaagccttagtgtggggaaccccggagcctccctgggctgctccgggcattcatctgtgcctcaacctccctttctgcagtctgctgagaatcaggttggttcaaagctggaagggggtggggtgcaatagatccaggagaaggaggtggatggctgtggtcctgggctgtggctgttgaggatttggagtcagggcactcccctatctccccctccccagttctctaaccagagttcctaaccccccagccttagcaggtcctgggcagccaacaagacccaaagcagtgcaaaacccaactcgggagacccctcgcccacccatgagatctgcagggaggtcaccaaatcccttggtggagtcccagagccctggggggtggggcggcagggctggggacattccaggcttcgggaaccttataggaaatttgattccagcttctggtaatgggaggaagagcaagtcctgtgtgtgtgtgtgtgtgtgtgtgtctgtgtgtttcaagtcatgcacatgaagtttatgtgagcatctgttcacgtgtctgtgtccacaaatctgtgtcaggctgcaactgatggtgtcccacaaaattgtgtgtgttggtgccctgagtcagggctcttcctggatgaatctgtgtgtgtgagactgtgtgtgtgtgcgtggatggctgtgtggatgggtgggagtggttctgggtgagtgtgtgggtgtgggtgtaatgtgtatatgcgtgggcccgctcctggactctgaattgtgtctgtgtgtctgtctctggggcagagtaagtgtgattgtggtttgcgatgtcgtctgcctgcctggtgtgtgtgtaaggggagaaggccccccttattccttggtggggctggcgtggggcccgggtccgggctacctctgcccctggcaggggtccagtgggggacccccccctttgctccccccaccttcccgcacccggaggggctctggctctgggagccccctgcctccccggccgcgggtcctcagtcccgggcactcccgccccgcaggcccggcagccgctcccctccgtcccctccctctctccctctctccttccctccgtccctccttccctccttccttcccgagcgcggattgcgggctggggtgggaggagatttcgcggagtttccatttcatacctcgcggctaaaactttctttctgtgtctcgccctcttgcagtctgcagcttctcctgtcatcggaaatgccaggccaaggtaaggggccgcgggctggcgggcccgggaggacttgggacaggcctggctcggggtcccagattggagcgggggcgccggcggggcgggggcggtgcccggggcgtccctcctcctctctttgtttatgcaaagcgcctgggcc

SEQ ID NO: 25440 - DNA, 2300 bp, Homo sapien
ccctctccctgccactgtcacacaccggcacacacaccctcccctctttctccccttgatcatccacctccagagccccggctcctccctccatcacagccccactccctgtccctgtccctgcccacctttacctggcccaacaggcacctgccccatgtcaaagctggctgtgtgggaggtggggaggcagggacacagggtgaagaaagaagacccaccaacagcgagtcctgaggtcacagggacctagagaggagttacccatccctggtgaccccaaacacctcctcctactctcccaggaagaaaccagcaccacacctatcccaggcctgatggttccctggcagactcctccagagcagacacctgcctcccagctcagacctgtccccactgccaggtcagctccccacttgctagtctctgagacttacccagcacagagaaggcaggggtgagaggccagcctgtccccaccatcctggggaagtccttgctccagtggggcccccaccctcctaactccagagtcctcctaaatgaagggacactgccagagctgccccttggtccagctcgaggaagattaactctttccctaccttgccccagcactccaggcctgcccctcctgggtgactcctaaaccaacctcacccaacctatttgcccttctaggggtcaggtcctatatcaccctcctcccaagggcacaagagacccaggggagccctctacccaactggaggccccttcacccggtcgtggtccttcctcccccttggtccacctgccttgccgcacttcccaagcagactagcaccgtcctgggctggctacttaacctgtgtcaggtgccctgggctctgccaaccgccagctcccgactcggggcgtcgtccctcacccattcccgcagcccctacctgaagcggtagctgccttctctctgcacaggccaaacccccggactcccagcactcagcccgcgccgagacccagggactccccgggggctggggaccgcagagtggtccgggccgcagctcttcgcagcacaccaggctcacagtgcagcccatccggcctggcgccccggcgggcaggggcggagacgcgggagccccagaagccggcccgcccccagcccttgcgacagctcagcccagagcgcctgcgacattggcaggcgagcagcaacgaccccagcctggccccgacagagtccctgcctttatgtccagcagcgacaggagcccccactgtggggcctgataagggtctgcaatacaggtcccgaacacagccagtgaggaagcccacctcagggaggggagaagggagggcggcagtggtggagtccttgggacagggacttcagacagtctgacttggggggcaaggtgagaaacacaccaagaacgtgacagagggacagggagaagataaaggcagacaatgaggaagaggcagagatgagggacagagatgggggaagcagcctccgcatgggggatataggtgcaggacggagccgaggatagaaaccctcgggcatccgttgtgctggtttttagatgcggttcctggggtttgtgaaaacagccgtcctcccaggcccctgctccacttccctaatactagcccctggagcagccgagcctggagaaacgaggacccggcatggaaagaccccaggctcaaggaggcagagcacagccagggtgggggaccccagcccaccggggaaacccgcccggcccattgctgcgcacaggatctcactggtggtctcacatccatccttttgggaatgggatcaggcctggggggtcggcactgatgaccagcactcagggggaccgcctcagctgactgaggtggagacaggaaggaggagcgtggtggggccctcgacctcccctccccactctggagcgctgcctcacagcccaaccaagcgacacggaagagacaaccacaggaatagcagctgcggagctccatggcctccctgtgccccctggtggcgagaaggaagaaaagcaagagcaggtgctgaaaacgaaaaggaaactagcagcagtcccagctaccacaatggatcagcccccatttggccaacaggtgactctaccccaggtgggcctgagaggacccatcccccatctcaccattctgccccagcgccctggatcctgcctctaccacttcttccctgcgcagtcactagggacggactctggcagcagagccgcgctgtcgtgccccagccagccaggctctcctgggtg

SEQ ID NO: 25441 - DNA, 2300 bp, Homo sapien
agtcgtggccccacttagccccctccctggctcataatgtctctaaccccagccactggcaccaccccgcagatggctgccccacctcccgggccccttgctctgccttctgccctcccaatccatatacacacagcacacatgggagggctccaggagagccaggagaggaataggggcatggaagtagcaggactggcagtaggagtgccctggcaggcagcccagatgtccgggtagccactgagccttggctcctgaggggatcagcacccagtagatgtttatccaccccaagaacgagggtatcacacctcctctagtgagggcccaggtgatgggtgcaggctgctcttccctaagcccctgaagaggggagccccaagcagcagcaacccccactggagccagagtcagggcacaccagctgggatggagcttgttccccacagttagaggagggagggagtcacaggcaagctccaggctctcccaagaggccgcttagaaaccagctcatctgatgcagatagacactcatccccatccctgtccctgccactgttgcacaccagcacacacaccttcccctccttctcgccttgatcatccacctccactgcccctggcacctcgctccatcccagccccactgactgtccctgctcctgcccaccctagcctggcccaacaggcaccccctcatccgtgtcaaagctggctgtgtgggaggtggggaggcagggacatggggtgaagcaaggagacccaccaacagggagtcctgaggtcacagggacctagagaggagttacccatccctggtgatgccaaacacctcctcttactctcccagggagaaaccagcgccacacctgtaccaggcagagtggttccctggcagacacctgcctcccagctcagacctggaggagggcagggggctggaggacagcaggggactggaggagggcaggggactggaggagggcaggggactggaggatggcagggggttagaggagggcaggggactggaggagggcagggggctggaggatggcagggggttagaggagggcaggggactggagggaggcagggggctggagaagggcagggtgctggaggagcgcaggggcagggatcctggacagggcctcagacagactgaattgggagggcaagaaagagaccaagggtgcaaagtgagacacagggaacagagaaagggaaggaatgagggaaagacagggatgggagacagggacatgacacgggagacagagatgggggtttcagcctctgcatgggggatatagggacggaggagagggcagacgggctggggcatcccttgtgctggtttttagatgcggttcctggggtttgtgaaaacagccgtcctcccaggcccctgctcctctgcccccatactagcccctgcagcagcccagcctggagaaacgaggacccagcatggaaagaccccagcctcaaggaggcagagcacagccaggaagggaagccccagcccacctgggaaacccacctggcccattgctgggcacaggatctcactggtggtctcacatccatccttttgggaatgagatcaggactagggattcggcactggtgaccagcactcaggtggaccgctcagctgactgaggtggagaaggaaggaggagcgtggtgggaccctcgccctgccctccccactctggagcgctgcctctcagcccaaccaagtgacagagacgagacaaccacaggaatagcagctgcggagctccatggcctccctctgccccctggtggtgagaaggagaaaagcaagagcaggtgctgaaaacgaaaaggaaactagcagcagtcccagctaccacaatggatcagcccccatttggccaacaggtgactctaccccaggtgggcctgagaggacccatcccccatctcaccattctgccccagcgccctggatcctgcctctaccacttcttccctgcagcgtctgcggttcccccaccgctgtgagccaggttccccctccaggctgctgggctgggactgagttacttcttcccaggctgtaaatcctgggactgctgtgcaaggcagagtcactagggacggactctggcagcagagctgcgctctcgtgccccagccagccaggctctcctgggtgagtagcagggagacccctggaacttacggggatagaaggagtgtgatgccaggagccaggggaggaaaatgcctggcagagacgagggagaggaggagacaca

SEQ ID NO: 25442 - DNA, 2300 bp, Homo sapien
gggaggccgaggcaggcagatcatttcaggccaggagttcgagaccagcctggtcaacatggtgaaaccccatctctactaaaaatacaaaaattagttgggcatggtgtcacatgcctgtaatcccagctattcaggaggctgaggcaggagaatcacttgggcccgggaggcagaagttgcagtgagccgagatcacaccattgcactctagcctgagcaacaagagtgaaaatctgtcccaaaatattattaataataataataacaataataataataataataatcaaccttctgaattctttgtctggtattacaaaaatttcatcttggtttggatttattgctggaaagttagtgtgatcttttgggggtgttacagaaccctgttttgtcatattgccagaattacttttctggttccttctcatttgggtagactatttcttcaagttattcttgaatttatttttgatttgactttttttttttttttgagatggagtttcgctcttgttacccaggctggagtgcaatgtctgatctcggctcactgtgacctccacctccccgattcgagtgattctcctgtctcagcctcccgagtagctgggattacaggcatgtaccagcacacccggctaattttgtatttttagtagagacaggatttctccatgttggtcaatctggtcttgaactcctgaccttaggtgatctgccagcctcagcttcccaaaatgctgggattacaggcgtgagccaccacgcccagcaactatgttttttttttatttctttttcttccctcttaaggatctgactttaatatttatagtttattttagcctaatttgatccttggtttttaggagtgaagacttttggattttaggagtgaagactctgtatgagttcgttagttagagacagtccttgtgtgctggctttcccagatcctggttgtagcagttacgtacttggtgtgtgggaaggtttactgtctcctacagggttggaatggcaggaatctctttaagcttacctcattctctcgtggggtactctttatttatttatttaatttttccccagtattttacttactgagttgattcaggctttggaccagtaggggaagtatccctgggtaggcaccagatgtagctaaagtaggtgggtaggcaccggttgtagctaaagcaggtgggcagagatcccagccttgatgagagtgcctgggagagctctcaattagatgtgctgaggttttgtcagggtgaagggtaggagctacctcaggtcccccactaggccagctggaaagctatccacctcccagcttcactcctttcccagtgttccagctattcagatcagacaggcagttattttcatctgtagaaatgttgatgttccaagtagagaggaattgtgactgcctgtcatgcaaacctgaatctggggagtgctcctcccgtggggatgcaatcaccctgatttgttccaggaaggctgtctataggtgcatcaatgctgcgttcctttgggagaagccccagctctgtctgcagtggcgtaccagggggaacaaggatcccttctctaagacccttcacaataccagaggctgcctgcctattgggtagaggtgcaaactttcccccactctgcccagcacagcaattgtctctgcaataggaaacttcccaccagtgaaaagatctgggactcaagccctgccattcagattcttttgttccacagggtattcccttgatgtgatgttcttccccttcctctaggaatgggacttcctggaagccagactacagtgctcttctgggtctagccacccagtgggcctaccagactctgggctggtgctagggaatgtctgcaagggatccagtggtgttacctgtcttcaagactcccagcagtgaataccagcaccatctctgacagaagtgggaggggagtgatgcaaactctgcaagattccttggttgtagatagacttagagtattgactttctcaaatgctggttataattatagtgaacttatcacgtggacagacgcaggacttctggttagccagggtgttgtaagcagtggtgatagctgagaatatgcagccgttttctccttcctgggtacagtgctattctgcctagaggtgagtttttgcctgtctcacagagtaggctgcagcctgccacttctttcaaaagttctgtggattctttcagctttcctgttcagttcctgcattcgttcctggagaaaaaaaa

SEQ ID NO: 25443 - DNA, 2300 bp, Homo sapien
tcatttgggtagactatttcttcaagttattcttgaatttatttttgatttgactttttttttttttttgagatggagtttcgctcttgttacccaggctggagtgcaatgtctgatctcggctcactgtgacctccacctccccgattcgagtgattctcctgtctcagcctcccgagtagctgggattacaggcatgtaccagcacacccggctaattttgtatttttagtagagacaggatttctccatgttggtcaatctggtcttgaactcctgaccttaggtgatctgccagcctcagcttcccaaaatgctgggattacaggcgtgagccaccacgcccagcaactatgttttttttttatttctttttcttccctcttaaggatctgactttaatatttatagtttattttagcctaatttgatccttggtttttaggagtgaagacttttggattttaggagtgaagactctgtatgagttcgttagttagagacagtccttgtgtgctggctttcccagatcctggttgtagcagttacgtacttggtgtgtgggaaggtttactgtctcctacagggttggaatggcaggaatctctttaagcttacctcattctctcgtggggtactctttatttatttatttaatttttccccagtattttacttactgagttgattcaggctttggaccagtaggggaagtatccctgggtaggcaccagatgtagctaaagtaggtgggtaggcaccggttgtagctaaagcaggtgggcagagatcccagccttgatgagagtgcctgggagagctctcaattagatgtgctgaggttttgtcagggtgaagggtaggagctacctcaggtcccccactaggccagctggaaagctatccacctcccagcttcactcctttcccagtgttccagctattcagatcagacaggcagttattttcatctgtagaaatgttgatgttccaagtagagaggaattgtgactgcctgtcatgcaaacctgaatctggggagtgctcctcccgtggggatgcaatcaccctgatttgttccaggaaggctgtctataggtgcatcaatgctgcgttcctttgggagaagccccagctctgtctgcagtggcgtaccagggggaacaaggatcccttctctaagacccttcacaataccagaggctgcctgcctattgggtagaggtgcaaactttcccccactctgcccagcacagcaattgtctctgcaataggaaacttcccaccagtgaaaagatctgggactcaagccctgccattcagattcttttgttccacagggtattcccttgatgtgatgttcttccccttcctctaggaatgggacttcctggaagccagactacagtgctcttctgggtctagccacccagtgggcctaccagactctgggctggtgctagggaatgtctgcaagggatccagtggtgttacctgtcttcaagactcccagcagtgaataccagcaccatctctgacagaagtgggaggggagtgatgcaaactctgcaagattccttggttgtagatagacttagagtattgactttctcaaatgctggttataattatagtgaacttatcacgtggacagacgcaggacttctggttagccagggtgttgtaagcagtggtgatagctgagaatatgcagccgttttctccttcctgggtacagtgctattctgcctagaggtgagtttttgcctgtctcacagagtaggctgcagcctgccacttctttcaaaagttctgtggattctttcagctttcctgttcagttcctgcattcgttcctggagaaaaaaaaattatagtgtgaatctctacacgctattctgtccttccagatgggagaggcatgctaatgctgcctccaatctgttgtcttggggggaaagaaagcaatttgtttttgtttttttttttaatggatttgctgggtttagtaacccagaggtcattgggaaccttggcgaaagttatttcagtggagcagtaggaaggaagccagttgcagtgtctttgttgagcagcagaggggaggtgaggaagtggagagagcagctgtggtggctgaagggtgctaggacagagggagcatgataaagccataagtaagatgtggtagaagggaaagagccaggacagaggggagagaaagcaggatcctcaaggaccagagaggcagtgggtcccacagtcaggtgcggggattcaacagaaacagaaggagggac

SEQ ID NO: 25444 - DNA, 2300 bp, Homo sapien
cttgtggtcagagcagatggttggggagtgaggggaaagacaagaggcaggagtggggccaagaagtagaggcatcaggtccagggaggaacgccaccagactcaccagaagctttagtccatctctgtcattttaatgcactgctccctttgacatgtgaaagacattgaaggctatagtactgccaatggtatgatggggaagcctgaggcagctggaatgccaggagactcagacaaggcagctgaaggagccagcggctctgagatacagcaaagatgaaagaaatccatgcaatcctgggcaagccatttcctttgggcttcagtttccccatctgtaaaatggaaagactaggtagaaaacccctcaggtcccttcccaatataaactctacgagtctatgaaatgactatgcatccgagagctgatctgggaactaattattcaaagttatcaaaatcacccgcaccctcaggagctccacccctgaattgcattgagcaatctaatctaccactcacttcctccactgtgttctcaccaccacctccctttcataggtcacagctgctcttctggaggtgtcctacaggtgaaaagcccagcgacccagtaagtcttggaacacccacccttcccaccagctagaatgtctctgttctctgtttcccttgatacccagcctacatttatcctaagcatctctccccacccttggtgggcccctcaccctcaccccttggcctcttcattttctccctttggggctctccatccccaaaggaagaacttctgttcctcctccctcacaaccctctccaaccactcagggccacttgctgcccatgcttttcccttggcctggcagccttccaagactcagccagccctcctggcctgggctaggactgggtctgaggatgggccgaacactgttcgcttcccacttcccgacactaaatgcaatatttgtggattatatttatagagagaaagaatactggaactgtactaaaatgactcttttgttgttaaaaagattgccttagatgtttgagatcttgtaaatgtctctcgttctatagcattttcatgtaataaattagaattcatgccatcatctatggagtttccaaactaccatgagtcactaaggggctggcattttccctaagtcaaggaagctccctttttatcctggaatatatgactgtgtggtcagccggacccagccagttcaagggtgtttggtttatcatccctgcaagagctgtttctttcattctgggccaaagaaacggcaaaagaaaacaatgcataaaacatgaaagaatgtgagtggaccatatacaggttgatttaatgatatctcaagaacttagctttgctgggcacggtggcttacacctgtaatctcagcactttgggaggctaaggtgggcggatcacctgaggtcaggagttcgagaccagcccgaccaacatagtgaaaccccgtctctactaaaatacaaaaattggccgggtgcagtggcaggcgcctgtaatctcagctacttgggaagctgaggcaggagaatcacttgaacccgggaggtggaggttgcagtgagccgagatcacgccattgcactccagcctggcaacagagcgagactgcatcaaaaaaagaaaaaaagaaagaaaaagagaacttagcttacaaatatgtttaatagatgaggtgcactttttttaagaggaagggctatagactacaaataaggcaagtgtagtcctttatacctcactggaacagtggtttcaccacttctccaccctgtgatcgcaggctggttactgagcctccctgttaggtcagctgatcctccttgtgcctcagtcttctagaaacagggcctaattgtatctatttgtaatgagccatggagatcatgtacctgtgaggcacaaagcagacctcagatgtgtcatctccttcccttagtttgtccctctaactgccaagtcatcctctgtagagattggtaaactaaaaaacaacaccaacaacaaacacccctctccctaccctaggagctggaggtcactggcctgacctggttctccttgctgagttctctaccttctgtcctgacttgcatgctctccctctggaacctgaagctgacccataatgcctgggagcatgagctcacccatacacctccagcccacccccagcacagctgagcactggattatccacagtgaggatttacctgtgaaacatgctctgccactgctgcctgtgctg

SEQ ID NO: 25445 - DNA, 2300 bp, Homo sapien
cacaggggattccctgtctagcaactgctgcccccttgtggcaaaaactatccttctcccggcctcagggtctttcttgagtataggcaggtgttttgcagtctaggcccccgtcttttttctcctgtgtccccagtgactattttctgcccttggggctgattttccctagatgattaatagagggagtctcccacctcctgggactaccccatctttgactcctttctagtctaggcgttagagcacaatagtccaacatcagtaaaagcaaagcatgagtggctattgtccccttacacttcctgttaccatctatgaatgataaaagagcccaggaggaaagcacaacttagcttaaaaaataggcttgccggctgggcatggtggcttatgcctgtaatcccagtgctttgggaggcaaaggcaggaggatcactagaggctaggagttcaagataagcctgggcagtatatcaggaccctttctctacaaataaataaataactaaataaaaaataaaaataaaaatataatataaaaaaagaaagccagatgtagtggctcttgcctgtagtcccagctattcaggaggttgaggtgggaggattgcttgagcccaggcatttgaggttacactgagctatgatcacaccactgcattctagccttggcaacacagtgagagcctgtctcttaaaaaaagaaaaaaattctttccagtgcagaactgtaggaatccatggcatggtaaatttggcatttgtggtagggcaggatttatacttgcacagactggcattagctccaaacattagaggaaggttggaaagaagcaatgccaggcagaccaactgggctgtgtggaagtgaagctatcaggcataccagtgactttagtgtgtagccaaaagcaatagacactgaatcgtggtggtgacttatggtccatgaatcacaggagaaatgtctcccttcatttattccacaaccattgattgagcacctactatattccctgaaagagaacataaacatgaattgaagaaggttcttgctgtctcatggctcccaagctagaagagggctgacttgtaaatgcctcacagcagggttcatgttatatggagaagtgacgaaggtgccagaagactcaagctaggggacagccattagctgctggaggcagctaaggtgggttcccagagaagccattctccgttactgagatgggggctgcagtgaccttgaccacagctcttccattcatggactgccccagctctgtggtctctctgctaaccagccagactctgggagtggcctatgccgtcagcctcagggccatttaaaccaactggtcattggcagtgattgtgcgaaagagtggctggcggcaaaggagggtttgtgttccattcaaataccctcaaaaagcctgaaaaataagtagagattgaggccaggccttggagttgtggaaggtggagaacactgggaagccaacctccaaagaagaccaggttggaggcaaaggaggaaggggagctctcgttggcaaaccaacagggaagccaaggatatcccagtaactgctctcacatccttgatgagaatgccttgaatccgagctaggccacctcaaagaagcctgcaaaataagtagagattgagtgcctgctgttcaaacacaactcaagcgcagtcctcctcctctttcccactggattgcccccaagtccctcctatgggggactccttctgaagtctctgctgtaagtcaaatccttcgccctttatacttggtcaggaagttgcaagcttccacaggtgatatactagggaatttaggaataaacaaatggaaataaattcaagaaaaggaaaataataaaaatgatcatccatagagtggagaattcagataatggaccctcaaccccagcttcacacctgggacccccacttggtcatatggaccctggcagtctctaatcacaagtctgtgatcccttgacttaaactgttcttccccaaatgtagacatgggtggggctcagaagggaggtgtcatctgatgtggtttccttatttccgtttattcatcaagtgccctctagctgttaagtcactctgatctctgactgcagctcctactgttggacacacctggccggtgcttcaggtaggaagccacctctgtttgctaggactttctgtggggtagggctgcttggcttgactttattttggaaaatgtattcatttctgtgggagctgaggatttctgctgcccgct

SEQ ID NO: 25446 - DNA, 2300 bp, Homo sapien
agtaacaaagtgaaaccctatcagaaagaaagaaagaaagaaaaagacagagagagaaagaaagaaagaaagaaagaaagaaagaaagaaagaaagaaagaaagggattatgaaggtaaatatcaggatgaatttgtgaaagagttgagcatattgcctccaaagagtaggacagggaactgcttttttcattacaagccttttagtattataagcatacatattttaaacaatttataaacattattttagttcaatagtcattaatgttacaaagctagcttatcggtcgggcatggtggctcacgcctgtaatcccagcactttaggaggctaaggcaggtggatcacttgaacccaggagtttgagaccagcgtgcccaatacggccaaaccccgtctctacaaaatatacagaaattagcccagcttggtggtgcatgtctatagtcccagctatttggcaggccgaggcaggaggatcacctgagctcgggaggcgggcagtgagcagagatagcaacgtcactccagcttgggtgacaagagtgagacaccatctcaaattaaaaaaaaaaaaaaaaaaaggccgggcatggtggctcacgcctgtaatcccagcactttgggaggtcgaggcaggaggatcatgatgtcaggagttcgagaccagcctgaccaacatagtgaaaccccgtctctactaaaaatacaaaacattaaaagggcatggtggcaggcacctttaatcccagctatttgggaggctgaggcaggagaatcgcttgaaccggggaggcagaggttgcagtgagccgagatcatgccattgcactccagcctgggcaagagtgcaagactctgtctcaaaaaaaaaaaaatttaagttagcgtataattttaggggatcagcaatatcctgaagcttatccatagcccgttaagtaatgtttcaaagggctatctgtgccttaatgataggagctagtttcttgttcatttttttatccccatccccaaacacatagcagaaaataaattatttccttgtatgtagaacggactcagctaagtttattatattctccccggaggagggaaaacacaaaacaaggcacaaaggcagaaggtgcagatgtagcacaacgatgagttaagattccgcacgcaggtaacaaggagggtatggtatatctctgccagaggtactggaaggtttcaaaggcagaaaaaaatgtgttccggacacctggacgcagaattggaggcatgacaggaacacagggaggcccatctaagttgcctattcacccaggtgacctctctttcatttctttaattgtccttttaacaatatggggaatttcacccaaggaaagggtcctcttctcgccccagcaggcaaggggtgttcctccagcgcaagttccggccccagctgcccccacgtcccacaggtctcctgccttttggcacgcacactcctgaccactcgctgcttccgcatccctactctgatcctctccccatgcatctctgcctccttagacaactgagaattttattgtctgtttcctttgccagactgtaagttccacgagggcagggcctcgtccatttcatttaccactacatccccagtatagagcaagagcccatgaaaatgtttgttggagaaatgaatgcatgatggtgtcgctggacagctatacctggaaagaaaaagaggcacccccatcaaacaagctgggagctaagaagcccgctgggagacgacaagggcgagcttcttgcgaggtttctgaaatgacaagaccggaagaatggagttggatctctgggacaagcgggagagagaagctgaacagtcaggcaagcctcggggaatgacagctccgcgggggacgcactggtaggcggtagacgtaagcggggtcggtgggaaagtagacggtggggcggcggcatcacacatacgcaagcgcagcctccgtttcctccggcgcgcctgcgctcgcgttcacgagtggttgaagcggaaatggcgccgcggggccgcgcgtccaggcggcgagcggaagtgggtgtgagagcggaagtggccggctagagccgggggctgggcggggaccgggcttgtcggtgaagcggcagtggcggcggcggcggcggctcggcaggcgggttcaggcttcgggggccaggtcggttgggtgggtgggtgtctccacagtctgcgtgcgtgggccagcgcgttcgtcttacccttccctccaccccggcccctctccccttctccc

SEQ ID NO: 25447 - DNA, 2300 bp, Homo sapien
gagttaagctagatttcttaaatctcctttccattctgtgcttttcttacgatggagctccagaacacattgctattcttgtagctaccacaagggtcaaagaaccagccccacccactcaagtgggtggagtaagtaacattcatagtgttggagcagagtgcacagtaaatggctccctgggttggttaaacagtgaccaacccatgataaccacaggaaggttattactttgtcacaggccatttttaaaggtggaatgcctctgctgctagagtgggaaggtaatggtgatgagtgataggttgcctccacccatctcctggtgtcattgggagagggggtacaaactgaaaagtgaatcatggttaaaagtgcaagtgaagtgacaaggaagtgttggctggttttaccaaggggagggagcaaagcagttgaacatgatataaatttggctctcagtacctcttagatctcagaatattaacttagtaagcttgaaattaaactaaatcttagggacttagggatttaaactaaatccccaccacatctgatttccccttcctcgaaataccaatagtacgtgcaacacagacttgtagctcagaggtcgcatgctgtttcaaattcttgggatatgcatgttacttttttttaaagaagtggtatatcagacacctgaaggtcaagtctctctgtgccaccaagaaactctcgtgaccttgagcccctcctctcaattcctcttcggtaaaagaaatacctcacagtggctgtgcaatcaccaaataggaactacaggtggcattatttatcttttgcccttgtgtaagaaaatgtagtcttgcaggttgaaaatttcttccagctataggaaaatggttaaataaatatgtggaatattaggaaattattgttcagccaggcgtgggggctcattcctgtaatcccagcacttttggaggccaaggcaggagcatcgcttgaggtcaagagttcaagcccagcctgggcaacgtagtgagaccctgtctttgtatataaataaataagtaggccaggcgcagtggctcacgcctgtaatcccagcactttgggaggccaagacaggtggattgcttgaggtcaggatttcgagcccagcctgggcaacatggtgaaaccccatctctactaaaaaatataaaaattagcttggtgtggtggtggacacctgtaatcccagctactagggaggctgaggcaggagaattgcttgaacccaggaggtggaggttgcaatgagccgagatcacgccactgcactccagcctgggtgacagagtgagactccgtctcaaaaaaaaagaattaattaaattaaaataaaatgtttgtttcttaagccatgtcattctggaagcagtttccaccaggtgaagcagtcacggtgacagagaaaaaaatagggagtctcagtctgttttttgttgctataacagaataccacagactgaataatttatgaagaaaatatgttatttgactcatgttctggggactgggaagtccaagagcgtggcaccagcatctggcaagggccttcgtgccctttcccgtcatcctgtagcaaaaggcagaagggcaagagagggccagactcaatttttttttttttttttttttttttgagacggagtcttgctctgtcacccgggctggagtgcacccaggctggagtgcagtggcgcgatctcacctcactgcaagctctgcctcccgggttcacgccattctcccgcctcagcctcccaagtagctggtactacaggcgcctgccaccatgcccagctaatttttttgtttttgtatttttagtagacatggggtttcactgtgttagccaggatggtctcaatctcctgacctcgtgatcaccccgcctcggcctcccaaagtgctgggattacaggcatgagccaccatacctagcccagactcacttttttaacagcccctcttgtgaataacaaaccaacttcccctataacaacatgaatccattcatgagggcagagccctcatggcctaatcacctattaccgtcacagtggcaattaaatttcaacatgtggccaggcatggtggctcactcctgtaatcccagtactttgggaggccaaggtagaaggatcacttgagcctagaagttcaaggctgcagtgagctattgtatcaatgcactgtagcctggactacagagtaagaccctgcttccaaaacaataataataatcgtaaattttggctgggtgtgga

SEQ ID NO: 25448 - DNA, 2300 bp, Homo sapien
tactcaggaggctgaggcaggagaatcgcttgaacccaggagatggaggttgcagtgagctgagattgcaccactgcattccagcctggacaacagagtaagactccgtctcaaaaaaaaaaaatcataatttttaacatgagttttcgaaaggacattcaaaccatagcagaaggtataaaaggggttcttggttttttgggttttttttgttgttgttttcatttaattcaaaaacctggaaagtagccagcagtaggttctggtttggggggaaagacatggagagtatacaaccttctggacaccagtattaatagctagctaagatttcattattgactgtcctttgccttaagagctggctatgcactgagtaattttaaagcatacaagatcagcagacaaacagatcagttcccgagagtcctggttttttctctttattcacctgggttagtggctcagtctgtacttaggttgataactaacaatctgttctctcacttggaatttggcatccttttgctctcttgaaaacaaaacatgattaagtacaatgtaggatctggaggagaacagagaacatattaagggtgtagtcaagtcctaaaaaaggatgagctttgattaaagattctcggccaggcatagtggctcatgcctataatcccagcactttgggaggacgaggcgggtggatcatccaaggtcagtagttcaagatcagcctgaccaacatggagaaaccccatctcaactaaaaatacaaaaaaaaattagccgggcatggtggcgcatgcctataatcccagctacttgggaggctcaggcaggagaatcacttgaacccaggaggcggaggttgtggtgagccgagatcgcgccattgcactctgtcccaggcataaaaagatactcatctcagttttgtgacttgtttggtgactaaatccacttcccctctgtctctactttcccatccaccaaatgaaagttaggaagaatgccaacttaggaagagcttggcaagtgcagtactttaaaaataatgaaattatcatggcctttggattaacgtatttggttttgttttgtttttattttctagttattaaagagggtgtacgggagtttcttggtaaatccagaatcaggtatgtagtcatgtgagcaactatggaatgacatgggaagagaggtgtcctttttatattatgctttttttacccaaaggatttcgtttaaatattattacaaatatttctgcatgagcccattcctaatttcaactccgtccataaaaatagcttttaaggggctttgctttgtccaatatggaacacagtagaggtacaaaattgatgtgtgacatttttaacatttacttgatggggccacatgactcttacttaatctttcagccagagggccacatttgtttgttcatggtgattaaaatggctttgaaaagaatgagcaaacattgattcccaccctcggcccttagtaattctgcatactacatatttggagaaagaagaggaatattcaccacactattcttgtgatttcaagtaataaaaatcagaccctttcttaatccagtcttctaataggttgtctcaacattcatggccagaggaattgaaaggcaccgtgtcatccttgaatagaacagctatgttatactgctttaaaaaggaggtttaaagtggaaaaactgaacagcctttttaccctgtgattcagtggcatgtctcaaattctgaggcatttagcaggaccccaaagtgagaaccaggtagtaagaccattggaacataatattttttactcaactattacaactttggtaccttgattagaaaagtcttctaagaaggaagttctctgtcactcttaacagcagttacttgtgctagcttatttcatcacctcacctattttttcagacagtctcattctgttgcccaggctggaatgcagtggtacagtcatagctcactgcagcctcctccaaatcttgggctcaagcaatcctcccgctttagcctctccggtagctgggaactacaggcacatgccaccatacccaattaatttttttaatattttgtagaaacagagtctcactgtctgctgcccatactgccaaaacagagtaaggaggtctcaaactcctagccttgagcaatctacccacctcagcctccgcctcccagagagttgggatcacaggcatgagccaccatacccagcaccttttttttttttaatctccaaattggcgggatgaa

SEQ ID NO: 25449 - DNA, 2300 bp, Homo sapien
cctcaggtgatccgcctgcctcggcctcccaaagtgctgggattacaagcgtgagccaccgcacctggccttaaactgctttttgacaatgtctgaaaaccctcacctactgctcaagtccttgatctctttctcatcctttcaaatgacagcagaaactaacttggtagaagagccctcaaatgcaagagagagagtgtaaagccctaggcgtaccacacccactaaaactttgcctcaagagtactgagtgctgggccaggtgtggtggctcatgtctgttatcccaacactttgggaggctgaggtgggaggatcacttgagtccaggagttcgagaccagcctggacaacatggtgaaatcccgtctctacaaaaatacaaaaattagccagctgtgatggtgcatgcctgtggtcccagctacttggggggctgagatgggaggattgcttgagcccaggaggttgagcctggctggggatcacagagtactgggctgggcgcggtggctcactccttaatcccaacactttgggaagctgaggtaggtggatcacgaggtcagcagttcaagaccagcctggccaatatggtgaaaccctgtctctattaaaaatacaaataaattagtggggcttagtggcgcacgcctgtagtcccagctacttgggaggctgaggcaagagaattgcttgaacccaggaggcagaggtcgtagtgaactaagattgtgcctctgcactccagcctgtgcttcaagagcgaaactctgtatcaaaaaacaaaaaacaaaaacaaaacaacaaaacaaaacaacaacagtactggggtgctggcaaataacactggctgtgagggaggcttatgacctcaagacttttagttcaactggtacaaaagacagcagatgggaggccgaggtgggtggactgcctgagctcacgagttctagaccagcctgggcaacatggtgaaaccccatctctactaaaatacaaaaaattagccgggcgtggtggtgtgcacctgcagtcccagctagttgggaggcagaggctgcagtgagctgagatcgcgccactgcactccagcctgggcgacagagtgagactctgtctcccccaacacccccaccaaaaaacaaacaaacaaacaaaaaccagcaaatgaacactattaccttatcttaaggacaggactgcctgaatttcatcagaagaaccaaggtctggcacctttcacaaagatggaactctctaggctctaggccatgctcgcctttcctgcatgcagagccacacccctatttagggctctcctcaaatttttttttttttttttgagactaagtcttactctgtcgctcaggctggagtgcagtggcacaatcttggctcactgcgacctctgcctcctgggctcaagcaattctctgcctcagcctcccgagtagccgggactacaggcacctgccaccacgaccggctaattttttttgtatttttagtaaagatggggtttcaccgtcttggccaggctggtcctgaactcctgaccctgtgatccacccatctcagcctcccaaagtgctgggattacaggcgtgagccacagcgcccgtcacggctctcctcaattctatccctgataaagagaaccttcctctgcatgcaaacttcctgctgagagtggaccaggaaaaagaacacttagtggggtggtttcaggcctatttacccaattaaaggtccctaagcaacttactccatctctccagaaagaccaccaaaagcacaagactgacctcataactcaggcccaaaaagaacagtctcttggtaaactttgtttatttcctagctgccattctcatagctcacaaagatacggaaacaaggaaacccatcctggcctatatggcagtgagaacatggaatcccacctttggtttatctacttagccctgctgacctcatatgtagccagtgcccagatacatggaggaccaggccaccagcgcccactgcttccttctcggtgactcaggagaggaaggtggtcgctggggtgctgcctaacttacgtgattgttttcatttcttttttctcggcatctgggcgtgcgcggttcagcaccttgaggaagtcagacgttttcgcccgcatacgtgtgtgaatataggcctgggaacaaacataacaggtactaaagcacagtcatggtctagaaagacagctttgctgtctttcatcagagaggtcatcaagggcggttgggaacatacaccctgggatt

SEQ ID NO: 25450 - DNA, 2300 bp, Homo sapien
atgaatcttagttccctttatacactcaaggggatcagaagtgacaggctgttgccccagcaaagtcccacagaagccaacccttattcggtgcttggggtttcccaggctttccccaaggtagttggtattttggtattttcccctgcttaaatggcccttactgccgaggccaggcaggtaagaatctccatgtctggaaaaagtggaacctggggcaaactgcaagctaaggataaggagcttggcaggaaagacgctaagactctaacaggaagtggaagggtggacttggagggggaattgaaatcaagaaaaggaaatagccctagctgctgcctcagcctccttgaggggagctgatacttggagttggttgccgttaggttaccctcatttggagtagtactgatgagtgctcgaccgaaacctgggtctactctggtggcgattttgagttcaagcagtgctgccccctactgggggttgctaaaagcactgccatttcagtgggcggggggtgttggttctttttggtttttggttggttggttggttggttggttggttggttggttttgagacagagtctcactcttcgcccaggctggagtgcagtggtgcgatcttggctcactgcaacctccgcttcccgggttcaagcaattctcctgcctcagcctccggagtacctgggaccacaggcctgcaccgccacacccagctaattttgtatttttagtagaggcagggtttttccatattggccaggctggtctcgaactcctgacaggtgatccacccaccttggcctcccaaagtgctgggaaaacaggcgtgagccactgtgcccagcccaccctaaccttttttttttttttttttaacagatgagcgaattaaaaggttaggcgattttttttttttattattggagacttgctctgttgtgcagtggcgcaatctcggctcactgcaacctccccctcctggattcaagcgattctcctgcctcagcctcctgagcagctaggattacaggtgctcaccaccacacctggctaatttttgtatttttagtagagatggggtttcaccatgttggccagactgctctcaaactcctgacttcaggtgatctgtccacctcggcctcccaaagtgctgggattacaaggatgaaccaccgcgcctggctctgattttttttaatcatctttattttgaggcagggtctcactctgtcgcccaggctgcagtgcagtggcgccatgaaggctcacggcagcctcaacctcctggactcgagcaatcttcacacctcagcctcctgagtagctggaaccacacaacatgtaccactgtgcccagctaatctttattttttgtagagacggagtctcaccacgttgcccaggcctcagcctcttaaagtgctaggattacaggcattgagtgtgaagtgttgaacagcggctcagggaggccaaccagggtccagcaaaccccgtccctgctgcctccattggtccagagctggtacccgcagccagcatgacactcacccagtcccagacattgtgggtcaacagagagaaattcagatagctaagagaatggaagcggacaaaggaggcacaggaggattccatgccagagtctgaattggtcacccccattcaggctctgcctgaggaaaggagaatggggtccgggcacagtcagctggatggagcgtctgaagacggcttgcaccagagccctccgtggctgaagggagaagctagggggtgagtcagccccagggcttgatggaacagacaggaactagatgatctaggaagggagaaatgaggctgagcaggagacagcccaggctccctggctgccactacctaatctgtcccccttcacacacatcccacacacagtgtttagacagagcagcagagaagaaacagacatcctggatcccacagggagcaggctggggctgggaacaggaggtctgtttattcctggaagtcacatatcagaagggtcccacacccacttctgtccaggccccaggctgaactctcccagagcctgtgacttctgcccgaccagatcccgtggttctgaggaccggccctggaaccctgcgtccttccgacccaccagctccctcgaggatggacttgaggctggatgctttcctcttcccactttttgtcccaacagaagtccctgatctccaggatccctgactggctgtgcagagctggcacagccacactccacgggcttccagcccttca

SEQ ID NO: 25451 - DNA, 2300 bp, Homo sapien
cctccattggtccagagctggtacccgcagccagcatgacactcacccagtcccagacattgtgggtcaacagagagaaattcagatagctaagagaatggaagcggacaaaggaggcacaggaggattccatgccagagtctgaattggtcacccccattcaggctctgcctgaggaaaggagaatggggtccgggcacagtcagctggatggagcgtctgaagacggcttgcaccagagccctccgtggctgaagggagaagctagggggtgagtcagccccagggcttgatggaacagacaggaactagatgatctaggaagggagaaatgaggctgagcaggagacagcccaggctccctggctgccactacctaatctgtcccccttcacacacatcccacacacagtgtttagacagagcagcagagaagaaacagacatcctggatcccacagggagcaggctggggctgggaacaggaggtctgtttattcctggaagtcacatatcagaagggtcccacacccacttctgtccaggccccaggctgaactctcccagagcctgtgacttctgcccgaccagatcccgtggttctgaggaccggccctggaaccctgcgtccttccgacccaccagctccctcgaggatggacttgaggctggatgctttcctcttcccactttttgtcccaacagaagtccctgatctccaggatccctgactggctgtgcagagctggcacagccacactccacgggcttccagcccttcaggcccagctctcccggagagcaccagagtccctttgctccatttacttgcgctcttcagccagcaagtgtttcctaatgtctcacccccagtcccagctttcctgctgcaatttccgcctgttccctcccatttcaggccttaagggagtgtggctgggcttctctcctccccctcactccaaagccgcacttgatacaaggtggaaatcaaagcaccacttctggcttcccagccttgaacttgcccttccctctcaatgtatctggtttcctcagcttccctgtgcagcaagagtgtcactcccctcttgcttttcccaagctccccatgcgcccctctcagcagatctgtcttagaggggccaggtgcagagaaaggcagaaatcctaataatgttcccagcgatcgctgcctgtcgcggagtgctgaagggccaagtgttgatctgagtcctcatcacacgggacttcatttagtctcacgataggtgagtacaactatgggccccatttgacagatgaggaaactaaggcaagggaactttagtcatttgcccaagttcactggcttttttaaaaaaggatccagacagctctgattccagcgccagctcatgcctcttcatcatgggggaggaaagagagggagccatttgttggggcaaacccccacccatcaagggccatgcactggggtatatgccgccatatgtgttatcctgtgatattccccaccacgaccttaattagaggtggtttttcttgttcccattttaacacaggcaaaaaccgaggcccagtagtaccttacccatggtcacatccccagagccatttgtccctcatagttcagaacttgactcagaaagcagttgagaaaagtgtggaatgaccccagattcaggaaggcaagtctggccttagaaactgaaaggcccatcaggtgatgggatgggggagtgaagatcctcaggccccaaacacctgccactgccaccatcacacacggaagtgtggagggagcctggtgtgctgtcagctggctggccagtccaggggcttaaatgtaaatgcatcagctgaggcgggaagtcgggaggggtaagtcaatcattattattcattaactggaatgcatttctcagattactccgagctggagtagggaaactgccacctaggtggcagggggagaggggaactgggtgggagggggaggcaggcctcccagttgctgcagtttggaatatgtcaggtcccaccctcccagaggcggggccagggctgagtcctgccagcctcatttctctatccctctgagaacccagacgggcagagcctgggtaggagagcctggccccgctgtccccactgggtggagacaccatgcacttggtccacttgtgctcttcagccaggacaccagacatggtccaaaccgctgcagggctggctgcagcaactccctgacactcaggaaggcccaggctgggcaggcaatacctgctcccaacagcc

SEQ ID NO: 25452 - DNA, 2300 bp, Homo sapien
ctgaggcaggtggatcacttgaggtcaggagttcgagaccagcctggccaacatggcaaaacccagtctctactaaaaatacaaaaatttggctgggcatggtggctcacgcctgtaatcccagcactttaggaggcccaggcaggcggatcacaaggtcgggagttccagaccagcctggccaatatggtgaaaccccgtctctactaaaaatacaaaaattagctgggcgtggtagcgggcgcctgtagtcccagctcctcgggaggttgaggcaggagaattgcttgaacccgggaggcggaggttgcagtggaccaagactgcgccattgcactccagcctgggcaacagaatgagagtctgtctccaaaaaaaaaaaaaaaaaaaaagttatctttgataaaagttaataaaagtagtgagtataaaattagagataattggccaggtgcggtggctcatgcctgtaatcacagcactttggaaggccaaggcgggtggatcacctgaggtcgggagttcaagaccagcctggccgacatggtgaaacctcatctctactaaaaataaaaaaaaaattagctgggtgtggtggcatgtgcctgtaatcccagctactccggaggctgaggaaggagaatcacttgaacctgggaggcagaggttgcattgagctgagattgtgccactgcgcttcggcctgggcgacagagcaagattccatctcaaaaaaataaaataaaatgagagataattatatctttttgagcatattttatataactttctcaagtgctagttcttagtaagaaactgttgccaggcacggtggctcatgcctgtaatcccagcactttgggaggccgaggcgggtggatcagaaggttaggagttcgagaccagcctgaccaacatgatgaaaccccatctctactaaaaatacaaaaattagctggttgtggtggcgggcgcctgtaatcccagctactcagggggctgaggcaggagaattgcttgaacctgggaggtggaggttgcagtgagctgagattgtgccactgcactccagcctgggcgacagagcaagactctgtctcaaaaaacaaaaaacaaaaaacaaaaaacccttaacgtgatgctctcctcgctctgtacccaaccccggtggcatcccatgctgacaactgtaagccctgcacctgtccccacctcttgtccatggcattggtgttgggtggtgacgggagtcacacagtgaggggatctactctggcaaatagggagcttggcaaatatgggaaggatctaacaacccaattcttgaaacttagaagaacttggatgtacctgtgttttccaggaggaaagacacgctttgggtgaaagggggtgggtttcctgaagattgtgaaggacagagccctaggtgggagctctgtccccttacccatggaatatctcttgggacagcatctgtgttttgtgtgagcctggaccccaagaccaataccttggcagtgaccgggggtgaagatgacaaagccttcgtatggcggctcagcgatggggagctgctctttgagtgtgcaggtgagggggctggggtagaggcctgggagaggtcatattcttttgggagatcttaggaggctgacctgcagaggttgtgcatccaacagccacttagtgacatctcttttgtgccagctctgtgctgggccccagggacacggggcgaatactagtgtgttttgggcacagaggcaggaggcactaattggccaagggaatccaggaaaggccagagaaggccacattggtataggagcaggcgggcagaggtgtagagtggacagaagggggaaggcataggaggctgggacttggtctggttgagtgagggccagcagtgtctcccagcagacatgggagtattggttcctagagtggtggtgagttccagcacctgttctgctcagtcccgcccctctttttttcctagctggtcctttcagtgggccagataccagaatcacatgcccccagcaccaggtaccctatttttttcctctgttttctgcccacttttctttgaaggccataaagactctgtgacttgtgctggtttcagccatgactccactctagtggccacaggggacatgagtggcctcttgaaagtgtggcaggtggacactaaggaggaggtctggtcctttgaagcgggagacctggaggtaagatcatcagagcgggagtcagctctgtggggccttgggttgttgggggtgcaagct

SEQ ID NO: 25453 - DNA, 2300 bp, Homo sapien
ttgagaaagttatataaaatatgctcaaaaagatataattatctctcattttattttatttttttgagatggaatcttgctctgtcgcccaggccgaagcgcagtggcacaatctcagctcaatgcaacctctgcctcccaggttcaagtgattctccttcctcagcctccggagtagctgggattacaggcacatgccaccacacccagctaattttttttttatttttagtagagatgaggtttcaccatgtcggccaggctggtcttgaactcccgacctcaggtgatccacccgccttggccttccaaagtgctgtgattacaggcatgagccaccgcacctggccaattatctctaattttatactcactacttttattaacttttatcaaagataactttttttttttttttttttttggagacagactctcattctgttgcccaggctggagtgcaatggcgcagtcttggtccactgcaacctccgcctcccgggttcaagcaattctcctgcctcaacctcccgaggagctgggactacaggcgcccgctaccacgcccagctaatttttgtatttttagtagagacggggtttcaccatattggccaggctggtctggaactcccgaccttgtgatccgcctgcctgggcctcctaaagtgctgggattacaggcgtgagccaccatgcccagccaaatttttgtatttttagtagagactgggttttgccatgttggccaggctggtctcgaactcctgacctcaagtgatccacctgcctcagcctcctaaagtgctgggatttcaggagtgagccaccacgcccggccaaagataactttttaaaagaaaactaagaggttaatcaaggttaactggcaaagtagagggtgtctcgactgatgccagaagccaagcaatcatccattctgccacactttcccacctgtgggctcctccagcgcaaggccagcatcttgcccatctctgtgtcccccataacgttctgtccatggctgatgtttaatgcttacacgcccacctaaactgatttgaggtggatcgcctcaaagacctacctgagtgcaatgcaaaggtgacctcgctatcgtcggggccctccatgctgccgaccaccccttcctggggttctagaacccagccctcttcgttgccctcttcctcctcttcttcctcaaagtccacatcttccatctcctgggccaggtcatctgctttggggagagggttagaagatggggctcgggaggcggtaagaggtacggagagaagcatgaggaggcctgaggctggggcgggtcatgtggcgagaagggaaggtggagtcagacacaccggggtccgcgggggcgcgcgggacacaggacgggaggccacggctggccagagaccgtgcggtaagggagggccaaggggatgatgggaagggggtgtgtgaggggaagggccagaggaggcgtcagggaacccccaccccagccaggcctgagaactaagtgtgagggtgggagtgggggaggaggggaagagggatatcggtaggaatgaccagtcgggtgtggaggggagcggggaaaagcaggagtcagaggccaggggtgagcgtctcctgtcccatggcctgaggagcggcagttctcacctgggtccggcggaccgggatcaagttctaccacctcgataatctcttcatcaccatggaagcttagggtctccagtgggggggtgtcagcagcagccccgctttccgattcggactccatgcggcgcaagcggcggatccacttctctgggcccaaacgcctcccagagtcagctctgcgcgacgacgcggaactcgagcccctcctcccggcaggaagtaggcgtaggcgactccccagcaggaagagcgacggccgttcggccaatagctacgaaggttggctggccgcctcaccaatcacagagcggcattggaagatggggccggggcgtggcggagagaacccaaactccgccccacctgactccgcccccaactggagggaaacaagcgagcgcgcgcgcctccggggtctcctgggaagagtagttctcctgggtccgctctgcgggcttctgggagatgtagtttctggtctgtaggcaggacggaaggagcgggggaggccccttacgcaaactacaattcccggcggggagcgcggtgaagcgggggtgggatctgaacatggcggcggtggtagctgctacggcgctgaagggccggggggcgagaaatgcccg

SEQ ID NO: 25454 - DNA, 2300 bp, Homo sapien
gagccctgcattcctgcaacagcacctgtgcaggattttccaggcagccctgacgctttccctctctgagacttggccaaggtaccctcccagttttcccctcttaagctaagtaaccactgcttgggaggcactttggtatgggggaaagagcatggagtcacagactaggtgagaatcctagctcagtctcagttccttcctctgtgaaatggggatgtaatacttatctcaaacactaaaacattacatggcaaagtactggcacacctcacatgcagaaaaaaatgttgatttcttcctcctttctctttaatattggtcaataatatgtattaaggtcagagtcagagcccaatcacaatgttcataacgccttctgagtactactatacaactagtacaagctcacatgatctcaacgaactacttacttaaacttgggtctcactccaagctcccaaaagggaggatgaggccagggacccaagtctgaatcagatcaactcagcttactccacagtaaacccactgtcttctcaattccacatactttcccacctccactgccccacccctctgagattccaatcgaacccaacaattctgttcccacaactttggattcagctcgccacctgaaacttggagaagtttctaagtcctgccctcccctacaagccacgccccgttggtgggcaaaggggtggttaaaactcaccaggccagtcccacagctttcatggggttcttgcccctctttctgggaatgtattccagctccggggataggggttcaggttcctccttgccctctggggagctgtggctttgcagggcccgggtcctgttatgagaagccttgttagctgtggctcctgcgagaatccctgtggatggaggtaaggaaggtcagtaagaagagatgagaagaaagcaagcggggaggtggggggcagtaagggcttgggaggagcggctgagatctggggaaggggagtgactgcagtctgaagtaagaagtgccaaggagaatccaaagggaaatgggaaaatcgccaccgaggtggcacctttggaagccacttccacgtcactgcgggctcatcaccctggtgccaggacgaaaagcttcgctgttcttcctcagacgacagcatgggaaggactgcagtgggactcacataagacgtatgaaggaaatccgggaaaaggttttgaaactgcaaatgttagcactggaagggaccttaaagatagtctactccatcccttgcactgtacggaagaggaaactgaagccctgagagaaaaactgctttgcccaaggtcaaactgctaattatccggggctggaactcaaacctccagaagcccggggctctttcctctgcactgcggtgagtgtgaaacacctggagcgcgggagtccaacaggcttcctaggagctccctcttgcagcaagaccccggaggtgtcgagcaacccgaaggcggggggatgcactgggtgacctctaaagagcatctctgcacccccagactctaagatcttgcagaaaagtgtggggaggaaccaagagccctgacctcctgctatcgtcgggctggacgtgaaagaaaagggatcttctgcagtcctgccctccccggggtccctctccttaccccggaggacgcgggcatttctcgccccccggcccttcagcgccgtagcagctaccaccgccgccatgttcagatcccacccccgcttcaccgcgctccccgccgggaattgtagtttgcgtaaggggcctcccccgctccttccgtcctgcctacagaccagaaactacatctcccagaagcccgcagagcggacccaggagaactactcttcccaggagaccccggaggcgcgcgcgctcgcttgtttccctccagttgggggcggagtcaggtggggcggagtttgggttctctccgccacgccccggccccatcttccaatgccgctctgtgattggtgaggcggccagccaaccttcgtagctattggccgaacggccgtcgctcttcctgctggggagtcgcctacgcctacttcctgccgggaggaggggctcgagttccgcgtcgtcgcgcagagctgactctgggaggcgtttgggcccagagaagtggatccgccgcttgcgccgcatggagtccgaatcggaaagcggggctgctgctgacacccccccactggagaccctaagcttccatggtgatgaagagattatcgaggtggtagaacttgatcccggtccgccgga

SEQ ID NO: 25455 - DNA, 2300 bp, Homo sapien
acttcagcctgagcaacagagcaagactctgtctcaaaaaaaaaaccaaaaaaaaaacaaaaaacaaaacaaaacaaaaaaagaggccgggtacggtggctcatgcctgtaatctcaacactttgggaggctgagatgggcggatcacgagtttgagaccagcctggccaacatggtgaaaccctgtctctaccaaaaatacaaaaaatgagccgggcgtggtggcatgcgtctgtaatcccagctactcaggaggctaaggcaggagaattgcttgaacccgggaggtggaggttgcggtgagccgagatcacgcctttgcactccagcttgggcaacaagaccgaaactccatctcaaaaaaaaaaaaaaaaaaaaaaaggaaatgaggtgaagttagagtgcagtgagtcttcctgggtggctcaagcgtggattttaaaagtagttcccaaagaggcattcaggcattcaggcattcagggaatgtttgcagccctgcagcatctctgaaccccagaggggtgtcagccagctctcacctggacatgtgcgctggtgcggatctgcgcatgggtcctgcacagtcacgcacaccctttgcacacctgcctctgtgaggctgatgcagatccctgtcttcacctctatccctgctgctgcacaaactgcgctctgccgccctccttttctcctaccctctgtccccatcccctgttctgccctggctggctgccccagtggatgcccatacctgctcctgcctggcttccccactacatcgtgaccccccagtgaacccccagtggcgtgggctgggcacacaggagccctccacagatgcacgtgaggaacgtttcccacctaagccccctcgtgacaggccggctctgggtcactctgagggtgtctagaagaccccagcttgggagaagagttcctgttataacacttgtcttttggctggagatccctgagactttgagattgtcagggaggctttgggattgacgccacatgtctcaggtccccagctgagtcaagtgtcatctgtccctaggcccaggccatggctatgatggggaggagagagcagtgagtgatagcttcgggcctggagagtgggatgaccggaaagtgcgacacacttttatccgaaaggtaagatacgcgctgggaggtgggtgtacctggggcccctcaggctgtgggaatgggaagtgggtaggccacagtagccccagggcatcaattccatgaaatacactggctgcctgtcttctctagccttgtctgcttctcagaggggcacctggcttctctaaccccagggttccctctctttttgcacctctcttcttgaccatgttttgggaggacacattcagtctgggagaatctcctaggtgggttctgccacagcgcccgccttccccagacatctttctccctttagactataggcagcttggagccagaaatgatcctactcgcttgtaacccaccctctccatctcacagctgcatagagcgtgcagactgagctgctgggagtgcagaggccatactggtagagtatggtggccaggcagggcaagtcagtagtcaccgaggctggtgttggacaggaggggagatggcagggagcatgggagcggggctgaggaagaagtgcacattgcctctgagccaggcatctcactggggtcgcctctgggccaggctgcagctagggagggttcttgagtgggaggaaagtactgggggctggcagcttcctggggcaggccaggggtgccggatggtgacccatgcccggccgtctgtgtccaggtttactccatcatctccgtgcagctgctcatcactgtggccatcattgctatcttcacctttgtgtaagtctctaggctttgccacccactcctactgccctgggggttcagggtcacctgctgggggtgtgggtggcggtgggccctgctctcagggtgaccatgggcaattagagaaggtgaagccagggctgcctggctggcctgggtggggcagacaagcctcagggtgactactcctgtcctcctgtgccccacagggaacctgtcagcgcctttgtgaggagaaatgtggctgtctactacgtgtcctagtgagtgtgtgctcctctgtggttgggcagggaggcaggggtggcagcttctgtttctaggtgaccagctttgctcagggcaggatcaaaatgctttttgagagggcccccaagttggtgccagtttcccgtgccagagggtgtgggtgtg

SEQ ID NO: 25456 - DNA, 2300 bp, Homo sapien
gctgggcctgggcattcacgattgcttttctcctctcccatttcaggtcccagcagctggggttccccctcagcccgtgagcagccatgtccaaccccagcgccccaccaccatatgaagaccgcaaccccctgtacccaggccctccgccccctgggggctatgggcagccatctgtcctgccaggagggtatcctgcctaccctggctacccgcagcctggctacggtcaccctgctggctacccacagcccatgccccccacccacccgatgcccatgaactacggtgagtcctggaagggcagatggaaggtgggtgggagggacagcacttggagcagatgaggccaccgcctcctgccccttttctcttctagtttcccttaaatccctttctcatcttctctgttgagatctctccctctgtttctgtctttgttaccctccactttttgcctcagcaactggcccccagccacttgctgccccctttgttcaaggagatccatgaggcatgtcccagaacgtacacaccacaggagaatggggctgggccaagtaatgactcctgaggggttacctcagggcaccagctctgtttcccaacaagcggccaacaagctgctgccacctcccagacctgtcgacttccttaggaactcctttgggaacctgaaccactttcctcatcctttaaagtgaaatctgacttttgcaaaagacatttggagccaagtttggtaaacatcatggcagggacatgcttgtgtttggtcagaaatgaggtgaggccggccgcggtggctcacgcctgtaatcccagcactctgggaggctgaggcgagcagatcacctgaggtcaggaattcgagaccagcctggccaacatggcaaaaccccatctccactaaaaatacaaaaacttagccgggtgtggtggcgtgcacctgtaatcccagctactcaggaggctgaggcaggagaatcgcttgcaatcccaggaggtggaggttgcagtgagccaggatcgcactactgcacttcagcctgagcaacagagcaagactctgtctcaaaaaaaaaaccaaaaaaaaaacaaaaaacaaaacaaaacaaaaaaagaggccgggtacggtggctcatgcctgtaatctcaacactttgggaggctgagatgggcggatcacgagtttgagaccagcctggccaacatggtgaaaccctgtctctaccaaaaatacaaaaaatgagccgggcgtggtggcatgcgtctgtaatcccagctactcaggaggctaaggcaggagaattgcttgaacccgggaggtggaggttgcggtgagccgagatcacgcctttgcactccagcttgggcaacaagaccgaaactccatctcaaaaaaaaaaaaaaaaaaaaaaaggaaatgaggtgaagttagagtgcagtgagtcttcctgggtggctcaagcgtggattttaaaagtagttcccaaagaggcattcaggcattcaggcattcagggaatgtttgcagccctgcagcatctctgaaccccagaggggtgtcagccagctctcacctggacatgtgcgctggtgcggatctgcgcatgggtcctgcacagtcacgcacaccctttgcacacctgcctctgtgaggctgatgcagatccctgtcttcacctctatccctgctgctgcacaaactgcgctctgccgccctccttttctcctaccctctgtccccatcccctgttctgccctggctggctgccccagtggatgcccatacctgctcctgcctggcttccccactacatcgtgaccccccagtgaacccccagtggcgtgggctgggcacacaggagccctccacagatgcacgtgaggaacgtttcccacctaagccccctcgtgacaggccggctctgggtcactctgagggtgtctagaagaccccagcttgggagaagagttcctgttataacacttgtcttttggctggagatccctgagactttgagattgtcagggaggctttgggattgacgccacatgtctcaggtccccagctgagtcaagtgtcatctgtccctaggcccaggccatggctatgatggggaggagagagcagtgagtgatagcttcgggcctggagagtgggatgaccggaaagtgcgacacacttttatccgaaaggtaagatacgcgctgggaggtgggtgtacctggggcccctcaggctgtgggaatgggaagtgggtaggccacagtagccccagggcatcaattccatg

SEQ ID NO: 25457 - DNA, 2300 bp, Homo sapien
tgtcctccctgctagcactgcacctggaagacaggtagaactcacagagagcctgggattcagaacatctgtctccccctccagggtgggggtaagggggagggcgaggggccgtgcactcactctctcttccctagcaaggccagagagcagctgtggtcgcaggctgccgcatgcctttctgacacgccaccgctgttatttgaaggaaccagaaagtcctgtctcaagctggccctttggcacagcctccctgcccccagcccctgtaccacccactcctgcttctcaggcttcctgactcagcctgccactggcccccgggtccctggatcccttcctcctcggggcctggcagctctggcactggggctagcttgttttcctccacttcttcccccggctctccactttgagccttggctccaacccagctctggcttccaggcctggcatccccgtcagctgtggcaggggcagagctgaccctttcagagggtcccagctggccctgtgagtcgccaggaggctgtgcctggcccatctggcttcttcgctggttctgccatcaagccaccaaaactggaaggttttcttaaaccacaacagggagttcccaggctccctggttccctctctcctcagcgaatccttcctcctgctttcctatggctggggagctgcacagtgagaggcctgtggacaagaagcaggcgcaaaggcaggagggacaggagcccagttggtggggaggtggcctgtggacagcaaatcacacgctgccctctaaggagaaaataggtggtgttcctctccacggaggcagcctggacaaggctggaagtgggcccatgaggctgagtgagctgggcctgggcattcacgattgcttttctcctctcccatttcaggtcccagcagctggggttccccctcagcccgtgagcagccatgtccaaccccagcgccccaccaccatatgaagaccgcaaccccctgtacccaggccctccgccccctgggggctatgggcagccatctgtcctgccaggagggtatcctgcctaccctggctacccgcagcctggctacggtcaccctgctggctacccacagcccatgccccccacccacccgatgcccatgaactacggtgagtcctggaagggcagatggaaggtgggtgggagggacagcacttggagcagatgaggccaccgcctcctgccccttttctcttctagtttcccttaaatccctttctcatcttctctgttgagatctctccctctgtttctgtctttgttaccctccactttttgcctcagcaactggcccccagccacttgctgccccctttgttcaaggagatccatgaggcatgtcccagaacgtacacaccacaggagaatggggctgggccaagtaatgactcctgaggggttacctcagggcaccagctctgtttcccaacaagcggccaacaagctgctgccacctcccagacctgtcgacttccttaggaactcctttgggaacctgaaccactttcctcatcctttaaagtgaaatctgacttttgcaaaagacatttggagccaagtttggtaaacatcatggcagggacatgcttgtgtttggtcagaaatgaggtgaggccggccgcggtggctcacgcctgtaatcccagcactctgggaggctgaggcgagcagatcacctgaggtcaggaattcgagaccagcctggccaacatggcaaaaccccatctccactaaaaatacaaaaacttagccgggtgtggtggcgtgcacctgtaatcccagctactcaggaggctgaggcaggagaatcgcttgcaatcccaggaggtggaggttgcagtgagccaggatcgcactactgcacttcagcctgagcaacagagcaagactctgtctcaaaaaaaaaaccaaaaaaaaaacaaaaaacaaaacaaaacaaaaaaagaggccgggtacggtggctcatgcctgtaatctcaacactttgggaggctgagatgggcggatcacgagtttgagaccagcctggccaacatggtgaaaccctgtctctaccaaaaatacaaaaaatgagccgggcgtggtggcatgcgtctgtaatcccagctactcaggaggctaaggcaggagaattgcttgaacccgggaggtggaggttgcggtgagccgagatcacgcctttgcactccagcttgggcaacaagaccgaaactccatctcaaaaaaaaaaaaaaaaaaaaaaaggaaatgaggtga

SEQ ID NO: 25458 - DNA, 2300 bp, Homo sapien
tctcatctatagagtgggatgagggtaagaatacctcacagcactgttgcaaggatcagatgtgccttagttactataggttgagtgtctcttatccaaaatgggaccattttgacaatttccttccctcccttttcttttacccaccccaactcccttccacccccaagaaaacactttactctcctactcgagcatatagtcacgatagccatgggggcagacatctacagtggcagaagcacatggattttggattttttcggatttggggctatgtatattatacttactggttgagcgtccctaatctgaaaatccgaaatcagaaatgctccagtgagcattcctttgagtgtcatcttggtgctcaaaatgttttagattgtggagcattttggattttggaaatgagggatattcaacctgtacttccttagttatatagtaagtactggaagtggttcaactactctaagtggttcccttccttccctagttattttatttatttattttttgagacagagtctccctctgttgcccaggctggagtgcagtggcgccattttgactcactgcaagctccgcctcccgggttcatgccattcttctgcctcagcctcccgagtagctgggactacaggcgtccgccaccacatccagctaattttttgtattttttagtagagatggggtttcaccatgttagccaggatggtctcgatctcctgacctcgtgatccgcccgccttggcctcccaaagtgctgggattacaggcgtgagccgccatgcctggccccttccctagttcttttttggggttagttatcagtctcctttgtctgtctctttcccctcctaatcttgaagttcaatgaaaagacaggagatgaaacaaagaaggaagtgaacagggactgtgctcagaagtattatagcatcagcctgctaatggcttcctcttcccttatctgtactcccaggccatcctgacttgggtggggtaacccgagattaccattctgatcacaggattctgctccagacaagggtggcggagctgcggtgcctgggtcctctcgtgatccccaggacagcctctccctcctgggagcttggagccacccctcggtctccatgggtccagagagaggccaccctggctagagagggggctgggaggggtggcctcgagttgggggccagaagtcgagggctggctgtctttttttttgagatggggtttcactcttgttgcccaggctggagtgcaatggcatgttcttggctcactgcaacctctgcctctcgggttcgagcgatccccctgcctcagcctcccgagtagctgggacttcaggtgtgggatatcacgcccagctaattttttgtattttttagtagacatggggtttgaccatgttggccacgatggtcttgatctcctgacctcgtgatccacctgcctcggcctcccaaagtgctgggattacaggcatgagccactgcacccggcccggtcttaactgtttctgagctgagaggtcactagagaactgagagaatggtagcttgttctggcccctccttgggagagggtgtgtgctggtgtctatcactcagagagtgggcggggctgggaagggaagttccaaacccatgacgaagaagagggctgttctggggtggagcaggaactttcttggctctggggtttccttgtctgtcaaatgaccaggtgagatccaaagtctaagccagctctgatattttagtgtttagatccctgtggcttcatcctcttagtcccaaagtccaggctgatggaaggatatttagttgattctgggcccccttggtgcagaatcaggcctggtgacttgcccagacactcctgggtgtatctttttactcatttgctctcgtggctatgaggtcagctgtgccctggggtaggaggataaagtgttttcttgtgggggcagataaaggaaaagggaggggaacaaatcgtcagatctgggctgtgctcctgcgcctgctgggtggggtttcctgagatgtgcattctgagctatttttttccactctgggcatccgtctctggcagggaggagggcaggctgcctggaccagtcagctgctcctttccatccctccctccagtacacatactctcctcttgctgtaaccccagtagctcaggcctcctctgcagattccggagccttaacccttcaaatacccccaggagagccccagccggggcctcagtaggcagacagcaggattacc

SEQ ID NO: 25459 - DNA, 2300 bp, Homo sapien
aaaaatacaaaaattagccaggtgtggtggtgcatgtgtgtagtcccagctactcaggaggctgagttggaaggattgcttgtacatgggaggtcaaggctgcagtgagctgcaattgtgccattgcacagagtgagattccatctcaaaaaaaaggaaggctggtgggggggcggtgtctgtttgttccttccttggccatatgaggactcagacgatatctgtgaagcagagggagccttcatcagacacctaacctgctggtgccttgatgttgcgtttcccaccctccagaactgtgagcaatacatttctgctgtttctaaattacccactctaaggtatttttgttgtagcagcccagatggactaagacagcacaagtgtagagagcatgaaaaaatgtcagggatctggacagattccatgggccatgcatttcacctagggcgctactccttgagcaagggggagacagacactgagcagaactgtacttgctctggtgagatcacaccttgggtggggacttcctaaaatgaggttcttggcctgtaggaactggaagtacactgaagggttggggtgtctggggagctagcccaccataacggccactagtccccctaagtaactcctacttaaactatatttacagaaataaacatacatagtgtgtgtatggggggcagtttttaaaaatctgtcttttttttttttttttttttttaaatctctgttttggggctggacgtggtggctcatgtctgtaatcctagcactttgggaggccaaagtgggctgactgctttgagctcaggggtttgagaccagcctatgcaacaacgtgaaaacccatctctacaaaacaaacaaaccaaacaaaacaaacaagcaaacaaacaaaattagctgggtgtagtggcacacacttgtaatcccagctactcaggaggctgaggccggagaatcacttgaaaccaggaggaggatgcagtgagccgagatggcgccactgcactccagcctgggtgacagagcgagaccctgtctggaaaaaaaaaaaaaaaaaaaaaaggacattcagtggtggtgtggtgctgacctatagctattaacatgagataagcactttaaacagagttggtcaactactggcagccttggtgtcatggaaagaacttggactttggaaccacagaaactcaggcaaggctcggtaatgtttctctttttaaattgagacaaggtctctctatgttgcctaggctgggtctccaactcctgggctcaagccatcctctggccttggcctcccaaaagtgctaggatcgcaggtgtgagtcaccatgcccaggctccagtaatatttcagaacttcctcaaaactgtttcctcctttgctactgcattcttcactgagatgagggttaagacctacctaacagtagtaatctacatctcaatgtaggacttctgaattctgacttgaggaaagcacctgctttcctggttgagtaattataaacagagattctaggtttgcatgtttgcagttttaaactcgaaaagtgcatttatctcaaaaacacagaattatcaaggattttaattactgatttatttgtaatgtaaaaatgggaaacaaacggcctccagtaggaaattaatttaatccgcatagccatgcaatggaatacttcacggcattaagattgtgcttttgaagactatttagtgagaagaaaaatgttcatcataaaacagtaaaaagaagggcagtaaacaaaacaccatacaatataccccactgtagaaaaacaaaatacatacagaaatgtaatagccaaagaaggacccaaagcgaacgcttccccctgggaactaggaggggtggagagaaattactttcttccctgcatttctgtgtcttttctagcttcctatcagtatcatgtattgcctttaaatccgaaaatacccctgtgttattagtgaggcgtcgtcggggctctgagaggcgcgcgcgcccgggacagacccctgcgccccctggcggcgccctgaggccccgccccacgaggccggcgcgacggggcggggcgcggagccccagccgagcctagccctgcccggccccggaggacttgcaacactccgaggccaggaacgctccgtctggaacggcgcaggcaagccagggggccggggccggcgccgttggggactgtgggcggtggggactggtccagggctggggcggccatgcgccggggcgcctaaacttttcggagcgcgct

SEQ ID NO: 25460 - DNA, 2300 bp, Homo sapien
gactgcattttaatttcttgatagaatgcctgatatagccttacctggcacagccttacctgcagaaagttgtgtgcacaatgacttttgatgatgcctccatgatccttcactttgcatgtacagacacagacacggagatgcaaactcctgcatcctacaagggtcatctgcaaattggcttatcagttttctcactcctctgtctcctctgcggtaccagccctttatatgccaggcactgagaagcaacctaattacaggcgaggagacagggagggagcaggccataggctctgtccctcaagatgtacccacatagaagaaactccaggtctgtctgggttttctggattaaacccagattcaggtattggaattacaattcagtttgaagataatttaacatatccctcacccatctccctcccagaacctcccagcagcagcaaaggtgagcttgacttttttttttttttttttttttgagacggagtctcacccctgtcacctaggctggagtgccgtggcacaatctcagctcactgcaacctccacctcccgggttcaagcgattctcttgcctcaggctcccgagtagctgggactacatgtgcatgccaccatgccaggctaattttgtatttttagtagagatggggtttcaccgtgttagccaggatggtctcgatctcttgacctagcgatccgcaggcctcagcctcccaaagtgctgggattaagcgtgagccaccgctcccggccgagcttgactcttttttttttttttttttgagccggagtcttgctctagagtgcaatggcacgatctcgactcaccgcaacttctgcctcctgggttcaagcgattctcctgtctcagcctcccgagtagctaggattacaggcaggcgccaccatgcctggctaattttgtatttttagtaaagacgtggtttctccatgttggtcaagctggtctccaactcccgacctcacgtgatccgcccccctcggcctcccaaagtgctgggattacaggcgtgagccaccgcgcctggccgagcttgactctttagagcatttccttcccttcctgtcctgggccagagctagggctggagccaaaacaagcccagccctggctcctgtgcctaaatttgtagatttcaccaccaccacgcctgtcctcacacctgcttccattccagggaccttaacaacttctagaatccatcaggagggcagcagtgagggagctgggaacggtgatgtggaaatcgccctgggtttgggagtgggaatgccccagccctaggcccctctgtgccacccatggctacatatcctaggtcatgttgctcctccagagcttgtgtggcctcttcctatccttcagggcaggacttatgtcgtccgctggggaggccctcccccatctaagttggccctctctgtgctccatatcattgccccctccttgacttcctttcgcaatttatcacgcgcatatgtatgtgtatgcataaacagatataattttgtttgctcgcttatttggttcgtcgcctcactagattccggactgtgggctccaggaatgcagacagtgtgcctttgacccttgcatcctcctcagagcctggcagagtgccaagtacataggaggagctagaaaagtaattcggcgaatgaataaatccatgaatggcagctgaccccgatgatctctcaggtttctgccagttgagaaagtgtagcagtgccctggacggggaggcgggcggggcgaactgcgagctcctgccccttcccagggctcaggcgactgtggaccccgatcagcgcaggctcgcggcccgctgtggccccgcctcctggccgccagccgggcggagccaggccgccccccaagccgggtggccttcggggtgcttgcccggctggaggtggtgagggggcgggtccaaaggagaggtcaatgggcggggcggggccacaacgcccccacgtccagagccggcaggcaggttccccgcggggggccggggccgggccgttgcctagcaacgccgagccccgcccggccggcgcgtgcctgcccccagcatggcttggcagggctggcccgcggcgtggcagtgggtcgccggctgctggctcctcctcgtccttgtcctcgtcctacttgtgagcccccgcggctgccgagcgcggcggggcctccgcggtctgctcatggcgcacagccagcggctgctcttccgaatcgggttagtgcccgggctccgaagcgtgcg

SEQ ID NO: 25461 - DNA, 2300 bp, Homo sapien
gactgggcaaaatagcaagactgtctctacaaaaaaattttaaaataggccaggcgtggtggctcatgcctgtaatcccagcactttgggaggctgaggtgggaggatcacctgaggtcaggagttcaagaccagcctggtcaacatggtgaaaccccgtctctactaaaaatacagaaattagccgggcatggtggtgcatgcctgtaatcccagctactagggaggctgagacaggagaactgcttgaacccgagaggtagaggttgcagcgagctgagatcgcgccactgcactccaacctggaagacagagtgagactctgtcacaaaacagaaaaaaaaatttaaataatataaataatataggccaggagcagtgactcaggcctgtaatcccagaactctgggaggccaaagcaagtggattgcttgagcccaggagttcaagaccagcttgggcaacatggtgaaaccccgtctctacaaaaaatacaaaaattagccagtgtggtggtgagcccaggaattcaaggttgcagtgagctatgattgtgccactgcactgcagcctgggcaacaatgagactctgtctcaaaaataaaaaagacttctgccagctgcgggacagaatgggagaatgtctgtagctgagtaaagccctgcagggaattagtttcccctgggtggagactggttctctgatacagtgactggcaggactaggttatgaaaagttaagaacagctaggtgagtgggtgggtgaggatcacaagtcccaggctgcatgaaatcccaaagggcagcctaggcgaagaagtgttccgtgggaaagagcagccctgcgtctaccaagcctggggcctgcagcccgaagattccacagcccctcccttcaggtgtcactgtgtgcaacggaggcctcggatgggcttggtcagggggtgaccagttgggcccagttcccagtgaggagggaatagatgcctggggtgggtctggaaagtgcacagtcagggctgacggccagccagagcattacaagctggttcccacctgtctgggtgtgccttatgccatattgtgttatcctggcaccttgtgacataccctccaacccccacccagggcggacctttgagggcaatgcagagaccatgctgagctcactggacactgtgctggggctaggggatgacacccttctgtggcctggtgagacacccccttactactccccatcctccagccccacgctcagcctgggacaagggccttcccaccccctcactcccctagaaagcaggccagcccagttcctggcccagaagcgacacagctccacctctaggggtagggacagagttctggcctcccttcttcctggagtgctggctccgtaccacctctgcttctcacactaccttcccctgccagtcagccttcagcctcttgggagccttgcaggccccagggcattccagagagatgtctaattgttcatagccttagcccagaacagaaaatagcctttgcttatctggggagaagtcagtaaatccactctgcatgtaaccattgccttgtggtgcataaaaacattcacagatatctgttaatcctcagaacatatattcattcattcattcattcatcaagtactttatgtgcacctaacacataccaggctctgttccaggcaccaggaacacagcaggtacatctgtgtctggtggcatcattgttctctccacttgccaaatgagaaaattgtgcctcagagaggggccatgactagaccgaggtcacatgctaggcttggtggagtcagggctagatgcaggcctgccagctccaggtctagtggttttttcccctggaactattgccaccttttcacccatggctgacttgtgcccacagttagagaagcagctcctggcagttggggttttcctggaagtgctgacctcatccctagttgtcaggtgcccatcagcctggacctggggcagggaagactgttctgactgtaccaccaatctctctctgctctgtgtctcaccctcatggctgtcggtaggtcatgagtatgcagaggagaacctgggctttgcaggtgtggtggagcccgagaacctggcccgggagaggaagatgcagtgggtgcagcggcagcggctggagcgcaagggcacggtgagggactcggggtccaggaggagctgtgtgggcaggcactcagccccaacgggaacccatccatgctgaccccaggcctgcgagcacctccccaaaa

SEQ ID NO: 25462 - DNA, 2300 bp, Homo sapien
tgttgcattactaatataacctaggaataaccggcgggtatagggtcaggtgctgaagtgacattgtgagaagtgacctagaaggcaagaggtgagccctctgtcacgcccccataaggaccacttgagggctccttggtcaagcggtagtgccagtgtttgggaagacgcccattacttagcagaccgcgaaagggagtcacctttccttggaggagtcagggaacactccgctccaccagcttcttgtggaaggttggatattatccaggcctgcccgcagccatccggaggcctaaacccctccctgtggtgctgtgctccaaaggtcacgctccttgtccactttcatgttcctgccgtactcctggttcctctttgaagtttgtagtagatggcggtagaagaaatagtgaaagtcctaaagtctttgatccttcttataagtgcatagaagaaaacgctgatgtatgctgccgtctctctctctgcttcggctacctaagagggaagggccccctgtcctgtgatcatgtgacttgcttcaccttgtcaatcacttagaagactcgccctccttaccgtgcccccttgtcttgtgtgcaataaatatcagcgcgcccagccgttctgggccactaccagtctccatgtcttgatggtagtggtctcccgggcccagctgttttctctttgtctctttgtcttgtgtctttatttattacaatctctcgtctccacacacagggagaacacccgctaagccccgtagggctggactctacaggtggatcacttgagctcaggagttcaagaccagcctggccaacatggtgaaaccccatctctactaaaaatacaaaaattagccaggtgtggtggcgggtgcctgtagtcccagctacttgggagactgaggcaggagaatcacttgaacctggcaggaggaggttgcagctgagatcatgccactgcattctagcctgggtgacagagtgagactctttctcaaaaataattaaaacaaacaaataaataaataaaaataataaaaataaaaatacaaaaattagctgggcatggtggcacactcctgtagttccagctactcaggaggctgaggtaggagaatcacttgaacccaggaggcagaggttgcagtgagccaagatggcgccactgcactccagactggcaacagagtgagactctctaaaaaaaaaaaaaaaagcgcctcaccaggaataagtccagtcaaagagtttgctatgttgtcattgttgttatcattattgttacatgtattagaactgtaacttgcagagatattcatgtagcagctaattggatagtgtgcatttgagactctgtctgactttcgttcatatcttctaaggtcatttttttttttttgagacagattacaggcatgtgccaccactccctggtaatttttgtatttttagtagagatgggtttcaccatgttggccaggctggatctcaaactcctggcctcaagtgatccacctgcctgggactcccaaagtgctgggattacaggtgtgagccaccacacctggcctcttctaaggtcattctaatgacccatttcttcactctgcctcttaagaatatcaaatgtgggccaggcgcggtggctcacacctgtaatcccagcactctgggaggctgaggcaggaggatcacgagctcaggaattcaagaccagcctggccaatatggtgaaaccccatctctactaaaaatacaaaaattagctgggcgcggtggtgtgcgcctgtagtcccagctactcgggaggctgagacctcaagaagaattgcttgaacccgggaggcagaggttgcagtgagatgagaatgcgccactgcactccagcctgggtgacagagcgagattgcgtctcaaaaaagaaaaaaatatatatcaaatgctccctctgctggacaacacctcaagcttgtgctgagccccaaacctgcagtgtcagttccctccaaggtctgggtgtagtaaagtgggttgatggccctttaagaggcactgtccagctctggttgccatggagacagctggacacagaccgggtagaggcaggcccacagcatgtcctccaaggtttactccacaggtgggaagaggactgctggggctggaggcggggatcctcttctttcttcccaatccaccctcggggtagtcttagaggattctgttcttgggtgctggggccaggactgaggtaccctgccttgcctccctgacccctgcccttct

SEQ ID NO: 25463 - DNA, 2300 bp, Homo sapien
cccgggaggcagagcttgcagtgagccgagatcgcgccactgcactcccgcctgggtgacagagcgagactctgtctcaaaaaaaaaaaacaaaaaaaaaaaaacgtcattttggccaggcgcagtgattcatgcctgtaatcccagcactttgggaggccaaggtgggcagatcacttgaagttaggaggtcaagatcagcctggccaacatggtgaaaccctgtctctactacaaatacaaaaattattagctgcgtgtggtggcaagtgcctgtaatcccagctactcgggaggctgaggcaggagaagcatcacttgaacccaggaggcggaggttgcagtgagctgagatcgcacaactgcactccagcctgggcaacagagggagactctgtctcaaaaaaataaataaataaaaataaatcattttttaactttaggaagtgtaacatgtccaactttactgaaatattcctttattatttcttaaccccaaagggtgttccgtttttgttttgttttttgtttttaactaaaatttcataatcagcatgcctaggacttcctgcaatcagtgattttaaagccatgccactgaacacacaatttccagtgagacactttgggggctgatttgtgtttctttgaccatctttgtaaattacattccaggcttgtctatcaaaacacaccaagcagcaatgcatttgacatgaacaagcacaatccattcccctccgtgttctttgaaacatgtgtttaacattagcacttttttctccatagctgcagctacaacaggggtttaagttttaatcacaacagggacagcctgccagcaacagcacaggtctgaggtggccacaaatctgtctggtctcacacctctgagcctcactttacctccacccactggccctagtagctcatcctacctctccgctcccacacccccccgcataccgcttctcatccctgtaacagaatttgccaactagaagcacctggtcagcgagatgacatgggaggggtcagggcaagggcaacctggagctagctccctatgaggggtcgccaactcagcttggaggtttggagatgcaatattaaatgtcttgaggttgttatgagatggagaaaaggctaaggtaagatgatggggagcccttggcgggcatccaccttacctcccaccccccaattttggctgttgccagcaaaacctgggcttccagaccatccaggtagaccatcagcaggctgaagtcttcatcgtggagcagactgtccacgcggaggagggcatccccatgtcctgccagtactacctgctctccgatgggtgagctgctgatggtgggcccagaggggtggtgctgagcttgtaggtgctcaaggagaccggctgcttctggggatagcaccaggaagaactggcattgagataggagtgtccctccgctttatccatatcattcactctttcttcatttatttgctcgtcctcttaaccctcacagtgcctcccaaaccttctcactgcacaccacaggcctggggtgtagctagtgcagccaccactgtgtaagggataatactgaaaaacaccaaggtctgaatgactgcacacttgatgaaatcactgtgctggaagaattgcctgtggcaggctgccgtgcagtctccagcaaagcactggctccaaatcataagaaaattcagggctgggcgtggtggctcacacctgtaatcccagcactttgggaggctgaggcgggcggatcatgaggtcaggaaattgagaccatcctggctgacacggtgaaaccccatctctactaaaaatacaaaaaattagccaagtgtggtcgtgggcgcctgtagtcccagctactctggaggctgaggcaggaggatggcgtgaacccaggaggcagagcttgcagtgagccgagatcgcgccactgcactccagcctgggtgacagcaagactccgtctcaaaaaaaaaaaagaaagaaaaagaaaattcaggtggaagaaagagtttctttctgtttttttgttttgttttgtttttttgagacagactccagtcgagtttatttcttaaaatttcagaatagatattcacataatcactacactggggaaaaggtaatcaaaacattgttggctttatctcataacttagtatgttttcggttttggtgcgatcatagcccactgcagcctccaactcctgggctcaagcaatccacctgcttcagccttcctagtagctgggactacaggtat

SEQ ID NO: 25464 - DNA, 2300 bp, Homo sapien
aaaatagaggctgtgtgcagtggctcatgcctgtaacctcagcactttgggaggctgagggaggtggattgcttgagcacaggagttcaaaagcagcctgggcaacacagggagactggtctctgaaaaaaaaaagaaaaaggaaattgaggctggatgcagtggcacatgcctgtgatcccagaactttgggggaccaaggtggaagggtcagttgaggccaggagtttgagaccagcctgggcaacatagtgagaccctcatctcttaaaaaaagaaaaaaaaaatttagcccagtgtggtggtgcatgcctgcagtcccagccactcaggctggggtggaaggatcgcttgggctcaggaagtcaaggctgcagtgagcagtgattgtgccatggtacttcagtctgggtgacagaacaagaaccagtcaaaaataaataaataaagttccctggagttataaagaccagatcaaacaatctagaaaagggcttgacagagtgaacactcaacaaacaccagctgcttttatgcataggagagtagagaggatatttgccaaaacgttgagcagctgcttctaggtagagagagtaaaatgatttcgttttcttcttttggtttatctccctttcccaagttttatcttatgaacatgtatttcttttgaaataagggagagggacaataagaaatatttttaaaaaatccttcaaggttcaactcaagtgatggtcctccatgaagccttttgtctgtgattctcaggtcctccccccagccccgcatccaacccagccttgtaggtgtctggtcataccgtccactagagagcaaagcgtctctggagtctgcagcagcaggtctgacgaacgaacaagggaaggagagagcctgcaccgccaccactccctcaggggagcttgcctaaagtttgctactgagcatccggacagaagccactggccagcactgacgttccacgaggagcccagaggatgcgacgatcatctgcccattatttttactctcggaccccccacctccggagtctgggggtccctctgtgtcagtgggaaccgggaggagctcgagcctgagtgctagctgcgtttgcgagatttcagggggtttgagctaagccagaggtggtccacgtcggccctcctccctccccaaccccccgccgcttgttatttttctttgggcggttggttgggcaattatgctctgcgaccgtaagatctgagtgccaaggcgcccgcccctccgtgctaacctagtaagagtgtgggctttttcttttttttcttttcttttcttttttttttttttgagacggagtctcgctctgtcgcccaggctggagtgcaatggcgccatctcggctcactgcaacctccgcctccggggttcaagcgatcctcctgcctcagcctcctaactgggattacaggcgcgcgccaccatgcccggctattttttgtatttttagtaaagatggggtttcaccgtgttggccaggctggtctcgatctcctgacctggtgatccgcccgcctcggcctcccaaagtgccgacaatacaggtttaagccaccgcgcccggccgagtgtgggctttcaagtccaacgttgaggttcaaattctgcctccccacctgccaactccaaaagttaaactttctgtgcctctgtgttcttatctgtagaatggggataatgatgaaaacagcatctaggaggaaaggctgaaatctactcgaggtacgacggtaacggttcctatttctagcccgagacactagacgctagccagggacgctgtcgacgggcgctgcagagaagcgggagggccccatttattcccccaaaaccgcagcccggaaagcgcacccgccccggcgcgtcccgcccgcgtcccagcccgacccctggtttcctgccctgtccgggcctgggccccgcttaggccgcccccgagcgggcgtctccctccggctccagggagcggaaagggttgggccggtgggaggagcccaaggccggtgacgacggacgccacgggtcgaaggggccgaagaactcggcggcgaaggtgaccacgtcctccggctggcgcagcagcaggaagagcaggaagtcggagatgagcgcgtgggcttcggggtgctgccgcagatagctggcgtggccgagccggagctcctcctggcaggggacagagcccgagcctcagccggacgggacccccgcgccccaggagcccccagccgctcgctccaaggagagctaag

SEQ ID NO: 25465 - DNA, 2300 bp, Homo sapien
atgcagtttttcttactcccaacctctctcatagtttatcttacctgcttgccatccttgggcagctacatttttgacctcttagccagtttgagtctttctttttttttttttttcactcagtctcactctgtcaccaaagctgaagtgcaggggcatgatcacggctcactgatcatgccagccccaacctcctgggctcaagcaaacctcccacctcagccctgccccaagtaatggagactacaggtgtgggccatcactcccagcaaattttttttttttgagacggagtctcgctctgtcacccaggctggagtgcagtggcgcgatctcggctctctgcaagctccacctcccgggttcacaccattctcctgcctcagcctcctgagtagctgggactacaggagcccgccaccacgcccggctaattgttttttgtttgtttgtttgtttattgggtttttttttgtatttttagtagagacagggtttcaccatgttaaccaggatggtctcgatctcctgacctcgtgatccaccctcctcagcctcccaaagtgctgggattacaggcatgagccaccacacccggtcatgcccagctaatttttaaattttttgtagagatgagatctcactatgttgcccaggctggtctcaaactcctgtgagcccctcagttaatagaagaaacagtcaagcatggtggcataggtctgtattcccagctacccgagaggctgagaagggaggctctcttgagctcaagagtttaaggctatatgccaggcatggtggctcacacctgtaatcccagcactttgggaggttgaggtgggtggatcacttgagaccaggagttcgagaccagcctggccaacatagtgaaaccccgtctctactaaaaaaaatacaaaaattggctgggcacagtggctcacacctgtaatcccagcactttgggagactgaggcgggcggatcacaaggtcaggagtttgagaccagcctggccaacatggtgaaatcccatctctactaaaaatacaaaaattagccaggtgtggttggcaggtgcctgtaatcccagctactcaggaggctgaggaagaagaattacttgaacccaagaggcagaggtttcggtgagccaaggtcgcgccattgcacttcagcctgggtgacagagcaagacgccatctcaaagtaaataaatacatacatacatacatacatacaaaaagtagccgggtgtggtggtgcatgcctgtagtcccagctactcaggaggctgaggcaggagaattgcttaaacatggaggacagaggttgcagtgagctgagattatgccactgcactccagtctgggcaacagagtaagactctgtctcaaaaaaaaaaaaaaaaggagtttgaggctgcagtaaactaagatggcaccactgcacttcacacctcactctagcctgggtgacagagcgagaccttgtctctaaaaaaaaaaacaaaaaacgaaaaaccaaaaaaaaaaagggtgggggtggaatagaataaacaactctgagaagggacatgatctggtgacaatctcaagtgaatcagtggttgaaccaggaccagatcccagtgccccatcttctggggacgtcctgggtctgaatcttcaatgcatgtcccttctgcagtgccttcctctgtggccctcaaagggaaactgaagcctttgaggacatgaagactcgcattaggccaacgaggggtcttggaactccagatcaaagagaataagaaagacctgactctgtgtgtgtgtacgtgtgtgtgtacgtgtgtgtgtgtgtgtgtggcagaggggggtgtggtcatggggtattgacatgaatacgcaaggggcaggaagcatctgaaatcagagctaacttgggaggcacagaacacggggtgcctggaaggggaacagatgtgttgtggggcacagggcaggctgggaggggaacaaaggtccactccatgggtaaccagacccttccgccagggctggccacttctgcctttggaaaatgtttcacaacgccccatgttgtgtgtgtgtgtgaatcggccgatgtgaaccgaatgttgatgtaagaggcagggcactcggctgcggatgggtaacagggcgtgggctggcacacttacttgcaccagtgcccagagagggggtgcaggctgaggagctgcccagagcaccgctcacactcccagagtacctgaagtcggcatttcaatgacaggtgagtagtggcccctag

SEQ ID NO: 25466 - DNA, 2300 bp, Homo sapien
ctccccttctgagtggatctcagtcatgaggctctaacaactgcagccagggttgggggcttcctgaatgctgagccctgtgggagaaggggtggccaggcctccaaggacctgggcactgccactgccttgctctgtgaccttgggaggtcacactcctccctgggtctcactctgttccttggcacaaggagggagatcaacatcaggactgcaaacccttgtcttcaagaccaggcaggcgcagagttgtgggaagtggacagtgtgaagagggcatggcagccagctgtctctgtggtgatgccagctcttacgaacctaaaagaagctggaaactgggttcttatgccaggccttctcaattttaaatgttggcaacaaatccacattaaagaaaaaaaaaacccggccgggtgcggtggctcacgcctgtaatcccagcactttgggaggctgaggcagatggctcgcttgagcccgggagttcaagaccaacctgggcaacatgacaagacccccatcgctacaaaacgtaaaagtaaaacaaaacaaaacccaacttattttgttagccaaacaaaatatgtctggccagattcagccttgggccaccagttttggaaccctggtcagtgctaggcagtccagtttcccaaggctgagcgtgctcctcacatcttccttctactgccctggtacccacagttcaacatctgtgccaacagcagcctccacgactacgccaagatcttccccatgaacaacgccaccgtggccgtggacatttaccagggggtgagcgcgggtgggtggggagggcgtgacccagagaggctccccgcctcgggcagggccaccggtcctaccacactcgtccctgcagggcgtgatcctgggctgcctgttcggccccgcggccctctacatctgggccataggtctcctggcggctgggcagagctccaccatgacgggcacctacgcgggacagttcgtgatggaggtagggcagggggcgggcccaggagggcaaggggtccaaggacagcaggcacactactgggggctagaactccgagccttgtgggtcctcttttcttttctttcttttcttcctttttttttgtttttgtttttgttgttgttgttgagacggagtctcgctcttgtcgcccaggctggagtgcagtggcgcgatctcggctcactgcaacctccccctcccaggttcaagcttctcctgcttcagcctcctcagtagctgggatttcaggcacctgccaccaggcctggctaatttttgtacttttagtagagacagggtttcgccatgttggccaggctagtcttgaactcttgacctcaagtgatccgcctgccttggcctcccaaagtgctggaattacaggtgtgaaccaccgcacccggccaatttttgtatttttagtagagacgcagttttgctgtgttggccaggctggtctcaaactcttgacctcgtgatccgcccgccttggactcctgaagtgctgggattataggcgtgagccactgcgtccggccttttcttttctttctttctttccttttttttgagacggcgtttcgctcttattgcccaggctggagtgcaatggcgcgatctccggctcaccgcaacctccacctcctgggttcaagcaattctcctgcctcagcctcctgaccagctgggattacaggccaccacacccagctaattttgtattttcagtaaagacggggtttctccatgttggtcagggtggtctcgaactcccagcctcaggtgatctgccctcctcagcctcccaaagtgctgggattacaggcgtgagccaccgcgcccggctctttctttcttttttgagacaggatttcactctgttgctcaggctggagtgcaatggcgccatcacagctcgctgcagcctcaacttcagcctcccgagtcattgggactacaggctcatgccaccacaccaggctaatttttaaaattatttgtagagatgtggtcttcctatgtttcccaggctggtctcgaactcctgggctcaagtgatcttcccgccttggcttcccaaagtgctgggattacagacgtgagccaccccactcagctttgtttccttcatgtagcccagagggcgacactataagccccattttacagatgagaaaacagatcctgacagatgaggtgacttgctggaagctgcagacccaggactaacagaagccttttccccaaaactgtttagtcttcagcaaccagc

SEQ ID NO: 25467 - DNA, 2300 bp, Homo sapien
aaacagacaaaaaatagagtgcataaagcgacctccacctgtagagacagagggcagctgggtgtagacaacccctacagtgaggacactcgaaggacccccctccccccacgcaatcctggcctctcgctcactccgtaactaactacccgccccaggcgtggggagataagtccagggctccaggcagaaggcgcggctacctctgccgctttgggagcctgggaggaggagttaggtctccctgggaaaagaactgcacgggcaacggcttgaagtggcgataagatggggtggaggaggtgggggattcctgaggaatcctgtgagctcaggatggcgcgtctgggaatggtgggtgtggggacagccggccaggtaccagcccccttcacagagggagaggaaagcgcgccacccaacccaggccaagggcgaggccacgactccactcagtccctcgccacacgcttccttttggggtcatgagggccccgcatccggagataaagccgaggccccacccagggggccggaccgcaggggagacagatgtcccgctcccaggctggaatcccgcctttgcccttgccggtagacccgaagcacgtcgcttcctttcttgaaactcagtttcctcatctgtgaaatgggttaagaaggaggccgttctaaggggtaaatgagattagggggcgcagccagagcaggcctaggaaaacgccagcagcgtgtggcgatcacggtgatgaagcgcaatggtggccgccccgtgggctacccaggagcaggaggagggccgagggatccagcccggggaccggggtatcagtccccgacagtcccctcccgcccctactcccagcctcagcgcacgaagccgccgcgccttctggcagacgccgctcccctcccttcccctcccggcccccgcgcggggcctcccctccccggctccccctcggcagggcctggcggacgtgcgccgcgtcgcacccggcggccggacgggacaggacgcgcccgccccgccccgccacggaggcccgcgggagagggggaggggaggaagtgccgaggggtgtttgtcgggcttggcattattaatttttaaatggtgaacttacaaaatagtaacgacgagtgaaaagaacttcataaacgaggaaaaagaccaacccgcagacccacggcgcgcaccacggaggggcttgcagcgagaagacagggacctccgttcccaagtgcccagcactgcgccacaggccgggtggaacgggccttgagggcctctggtttgaggtcccccacggtcgggctttgggcccaccgcgtgcggcgccgtgctgggctcctaggatcggcagcgagtccagtgactcccaccgcacccccagtaatcacagggcggccgtcgaccgcgggcaggggagggggtctgggaaggcccctggagaaggtggcatttcctcgaggtcggtggaatttggctacgcgaaaggaacagcgcgtacgaaaacttcaggcgggaacgcgcggtggcccgtgcgcggcgggtagacgtgcggggccccgggtggggccgtggggagaggtcggcagggggctttcccagggcagagagttagaatttcacgtcctacagaccgggggcacctcgccctggggctgcggggggcggcgaccgtcccattcaagagcgtgattctgaggtttgcacagctgtttcgggccagcagagccttcgctggctcttgacgtccttgcgaggtgatctctgcgaccaccagacaggagagaagacccattttacagatgaggtagtgctatctccaagtcctcaacgaggaaaccgagaagcctctagtcccgggtcttcagaaaacgcagaggtggagccgcgccgcactcgggcactccccggcgtgggcgctcccggcgggcgggccttggccgagggcgctcggcggcctggaacggtgagccgggtgccgggcctgccacgcagccgcagagactcagccccgccggcgggcggcaggaagggaggcgacgccccctggagcgcggcaggaacccggcccggcccgcctcccagtccgcctagccgcgccggtcccagaagtggcgaaagccgcagccgagtccaggtcacgccgaagccgttgcccttttaagggggagccttgaaacggcgcctgggttccatgtttgcatccgcctcgcgggaaggaaactccatgttgtaacaaagtttcctccgcgccccctccctccccctcccccctagaacctggctc

SEQ ID NO: 25468 - DNA, 2300 bp, Homo sapien
tcctgagcaggggtgctcaggtaaggtggggtcaggaggcaccgcaatggggctgatcagcagcagtcatggaggctgtgagaggcagggagagagcaccccaggacctccttctccaggccacgcactccctatgtgggcgccttaatacctgctagacctatttgtctgggagctgcaggagccttgcagttgattgtggagccctgacaggggcgtttcagagaaagtcaggagctgccttcgtgtgtctggatgaaggggccacggcaagatcctcctggctcaggggttcacacctgggcacacatgcaggattctgcaggccagtgtgcaccgagcctccaacttgtgcctccctacttcaggtgaccagaagtcagcagcttcccagaagccccgaagccggggcatcctccactcactcttctgctgtgtctgccgggatgatggggaggccctgcctgctcacagcggggcgcccctgcttgtggaggagaatggcgccatccctaaggtgcgtgggggccaggtggggccacgggggcacctggactcagtcttcagggctttaggggaaggggctcctgactgagcttttcaggatggacttgcagacctgaaaggtgcagagtaggagggtggcagcctcccctgccaggccctgcccactgtggggaaactgaattctccctcataagtggaagctttttcctaccttggtttttagagaggtctcaaagagccaagaggcctacccaagccctagagctggcaggggcaaagctgggaagggggaagtatctgttcctggggcctggggttcctctggagacggctagggggagaagcctgcgtgggaggaaggaccaggcccggagagaggcaccccagccagccccgccctccctacagcagaccccagtccaatacctgctccctgaggccaaggcccaggactcagacaagatctgcgtggtcatcgacctggacgagaccctggtgcacagctccttcaaggtgggccctgctcaacagccctcagcccgggtctcggggggcatcccccaccctggcctgggagggaggtgtgtgctggaccccatgccctggggctcctcctccaactccagcagctcttttccccccacagccagtgaacaacgcggacttcatcatccctgtggagattgatggggtggtccaccaggtgagggccaggaagaggcagtggtgggcttggcatctgcctccagaccctaggctcttcccaccaatccggagcgcctcggatgggaattggatacatgtggaatgtcagaggcccagagagggtgtgagacttgtcccaaagtcacacagaacctcaagggcttgtgctgactccaagcctgcagagtgggctcctcctctaggctcccccgtgctgtgctccctcgccccaccctgcccgggacccagttcaagtaattcaggataggttgtgtgctgtccagcctgttctccattacttggctcggggaccggtgccctgcagccttggggtgagggggctgcccctggattcctgcactaggctgaggttgaggcaggggaagggattgggaattagggacctcgtgaggtaggactggccagtggagtggaagttttgatcgttttctggcggggggtgggtacagtttccccagcagtggtcagggtagctggccaagcggagcctgcgggcccagtctccttcctgtgcgcctctgcctccctggcccatgccctgccagccctcggccacccccacactgccccactggcccgcagccccctcactggcccgccccccaggtctacgtgttgaagcgtcctcacgtggatgagttcctgcagcgaatgggcgagctctttgaatgtgtgctgttcactgctagcctcgccaaggtgagccccacaggggtcccggggcaaccctgccctcctacctacctcccgcatgcagcccaatgaacctgcgggccccaggatgacccacctcctgctcccagtacgcagacccagtagctgacctgctggacaaatggggggccttccgggcccggctgtttcgagagtcctgcgtcttccaccgggggaactacgtgaaggacctgagccggttgggtcgagacctgcggcgggtgctcatcctggacaattcacctgcctcctatgtcttccatccagacaatgctgtgagtgcgggctggactgggactgggacaggagctgagacccaggaaggggtcagtccattcaggccaccttggcct

SEQ ID NO: 25469 - DNA, 2300 bp, Homo sapien
gtgtggtggtatgcacctgtagtccagctactcgggaggctgagatgggagaattgcttgaacccaggaggcagatgttgctgtgagccgagatcatgccattgcactccagcctcggtgacagagcgagacttcatctccaaaaaacaaaaataaagacaaccccccacccaaagtaacacttattttactaaataatgcaagagtagcgatgctggcaatttggaagtgccaaaaagaagccataaaatgtttcctttaaatgaaaaggtaatagttctcaataaggaaagaacaaaaaacatcatatactgaggttgctaagatctatgataagaatgcatcttctgttcatgaaattgtgaagaaggaaacagaaatttgtgttaattttgctggtgtacctcaaactgcaaaatgcagccacagtgcaggataagtgctaatgaaaatagaaggggcttcaatttgtgggtggaagacacgaacagaaacatgctccagctgatggcagccaggttcggtacgatccgaggttttaaggcatccactgcgggtcctggaatgtatcccccgttggataagggggggactactgtacatttggtctccagaactcttgggaggctgtgatgagaaggacgtactgccctcacccagcccacttcacgtcaccctcctaaggaccaggcttcacaggtgataggagaatttctgcagtctgggaggcagctgcccaaggtgctgagtttgcgtgtgaagctggtttctcagcgagatccacgctggagttggctgcacaactttcctgcctgagtgagatggatcccctagggtcaggggtcagacatggaaaccttggcttctgggagagggtagcagaacagagttcaaaggcactggtttatggcatctcataaaaactccaggtgggccgggtgcagtggctcacgcctgtaatcccagcactttgggaggccgaggtgggcggatcacgaggtcaagagttcaagaccagcctggccgacatggtgaaaccccgtctctactaaaaatacaaaaattagctgggcgtggtggtgtgcggctgtaatcccagctactcgggaggctgaggcaggagaatcacttgaacccaggaggcggaggatgcagtgagatgagatcacgccactgcactccagcctgggcgacagagacagactccatctcagcaaaaaaaacgaaaacaaaaaaaacactccaggtggagccagtgcccctaagggtggagaggaggagcagttgtgctcactggggcccttgctaagtgagggtcatgctgagaagagacctctaggagacctctaagagacctcccatctgttctggaggggccctgagtataagtccctgcattcctgggtttggggcttctgcaaccctagagtcctgcctctctttctccatgaaccattcaccccagggcaggtgggaggacagctgagcctccttctcttggttggtaggaggaaaggttcaggcgccgctgaccctacctggacagtgctgtctgcctgtggtgagggcctgggccctgggcagaaaagcaccccatcccttgctcactcagaagccaagggaggggctgggcgccgggcctcacacctgtaatcccagcactttgggaggtcgaggcaggtggatcatttgaggtcaggagttcaagtccagcctggccaacatggtgaaaccctgtctctgctaaatatacaaaaattagccaggcatggtggcacatgtctgtagtcccagttacttgggaagctgaggcaggagaatcacttgaacttgggaggcggaggttgcagtgagtcgaattcataccactgcactccagcctgaatgacagagtgaggctcaaaaaaaaaaaaaagccaagggtggggcacatcagctctcattgtcaggctgtggagggctctgggctcccagggacctggcagcacctgcctccccaccccctcacctctctggggccctatcttcccttatatggtgaaggcagttcctagaggagggggggtggggacaaaggtcgctcttctgcagccagcttgccacaattccctgagatctcccaggtggcagctgcctccccaagacaggtaaggcaacctggtgggaacacatggagaccttaggtggtgcgaggggacggggtcctctgcttttctcgggcaacttggggcctcctggagcaccttggtacgggctcgaaggggaggcttgacactctggatagcgtgagaagtgctggg

SEQ ID NO: 25470 - DNA, 2300 bp, Homo sapien
actcctgagtccccttgcccacctttggcctgtgggggctggccccaatcctgatttctctctggggagggggagcgctggctttttcaagtctctgctcccctgaatcccctctctgataagcaagaagtgcctgctcatgtccaccctctattcctcttgctgccagttaaccctggaatcagcatgtccctgggtgaggctttagagatcatcgatttagttaaccccctaagttgaccccctcagctcatagatgaagaagggaagtctacgttcatacagctagtgagtgtcaaagaaaaagagggacggggcccggcgcggtggctcacgcctgtaattccagcaatttaggaggctgaggcgggtggatcacctgaggtcaggagttcgagaccagcctggccaacatggtgaaacccccgtctctattaaaaatacaaaaattagctgggcttggtggctcgcgcctgtaatcccagctacttggggggctgaggcaggagaatcacttgaacccgggaggcggaggttgaagtaagccgagattgtgccattgtacttcagcctgggcaacaagagtgaaactctgtcccaaaaataaataaataaataaataaataaaagaaggggacagagacaaaggtgatgacagaaatgaaacagaaaacggtctcctcctttatacccaacctggttctgctggaccaggaatcctgggagccctggggacttggtaggttgaaaaatacctgatggaggagaccatggttgcctgatggagaaggccatagccaacaggccatcagacaggacccaagcccaaggggctcctacagttacacggcaagctgctgctaatcagtcggagcaggcaatgatcagagactgggcagggccttacctccaactctagaacgccagggaagcagcagccacccctcagggctcagaaaagggagtttctaagtactaaaaggccaagtcactaagaggtgactcaaagtcaaggtgcaaggagagattagatagtgagatttcaggctgtcagcgagtggaggcctgacctgtcggccacatgccctctcattcattattcatcagttcaaggagcattcatggagggcagctctctgccaggctgggtgataggctccatggagatcggggtggcctctggcctgatgaggaggaacctcaaaactagggaggagaataactgggcactagtggctgtctgccctagttcatatcagaatcactggggagttttaaaagcacccatgcctcacctcccaaaaggcagaaaataaagcacccatgcccaagccccaccctggcctaattaaatcagaatcaccagagcctggagcatcagcacgttccgaagctccccagctgaggctgatgagcagcaggagcgaatacagctacaggtccaagcaaaaagggccggccaggcacagtggctcatgcctgtaatcccagcactttgggaggctgtgacaggtggatcacctgaggtcaggagtttgagaccagcctggcccacatggggaaaccctgtctctactaaaaatacaaaattagccaggcgtggtggctcacgcctgtaatcccagctatgcgggaggttgaggtaggagaatcacttgaacctgggaggcagaggttgcagtgagccaagatcacgacactgcactccagcctgtgcgacagagcgggactccatctcaaaaagaagaagaagaaaaaaataatatggagaaagggctgacatgaggagaaaagcttggggaggggggttccttccagtttagcgggcagagagtagttcacagtgggagggttcactctgttcattcattcatccatctctcactccttccctccccctctcttccttattgagcaaagtcactgtgctagacactgcggatttggtactaaacaagcggaaatggtccctgagtggggagtaaccctctgtgctcccccaagcccctgagcctgcgacctcctggcactgttgggagttctctaggggcaggctggaagggcagcatccgaactcagggtgcccctgctcccaacgccttctcccccaggctcactcaccatgaccaagctgagcgcccaagtcaaaggctctctcaacatcaccaccccggggctgcagatatggaggatcgaggtgaggccctgtctgggcatgggggctgctcaggcctggggtggagggaggcaaggccaaggagggaggcctgggatttctcttcgtttcctctgctcctgcc

SEQ ID NO: 25471 - DNA, 2300 bp, Homo sapien
gagagctatgcttatcactgagcatgagagcattaagaggcaccctagtgaatcccctttataccatataaattcctcactgccctcgttatatagcagcaacccgtcttccttacaatagtcatttacccctgccagtatggtaactccttttctttcctatgaatctgcctgcatgaggagctcaaaatagctaggtaacagccataacttcaggtttaattgttcttcaactgtcctccttgattaaaaagcaccccctctgggaactaggacccacaaaatctaatttggagagacagcacaaattctccaagtgagttattgaaaaataatggcaaatggggctactcctgcttttacttcttggttgctggacccatatattttttacaaatggaatgatttattggtatcttgaaggccaccccattcttaatgagatcctcttcattctgcacttttaaagggtattgcagcactttatcaggccagcagctttggggtaatactgtatgtggtaggaactgtggatctttgtggtcatatgctgtcattgtacctcctattctgcaaagtggaatccttgttctaagatactatgtgagttttcttgttagtgaatgagatactcctatgagtccttggatagtaatactggtcaaggcaccatagacagcataggcaaatgtatatagtagtccccccttatgcatgattttactttctgtggtttcaattacctatggtcaaccttggtccaaaaatgttaaatggaaaattccagaaataaataattcataagttttgttttggttttgagacagggtcttgctccagcccaggctggagtgcactggtgtagtcatagctcactgtagcctccaactcctgggcttaagcagtcaagcctcagcctcccaaatagaactacaggcatgtgccaccatacctggctagtcttggctatttttatttttatttttatagggatgcagtcttgctatgttgcccaggctggtcttgaattcctggcctcaaataatcctcccacctggcctcccaaagtgctgggattataggcaaaaactactgcacctggccctaattcataggttttaaatggtgcactgttttgagtagcacaatgaaaccttgagctgtcccattccatctggcctgggatgtgaatcattccttcgtttagtggctccacactgtatatgctacccgcccattagtcacttaatagccatcttggttatcagaccaactgtgagagtattgctgtgtttatgttaagtaacccttatattacttaatgattatccaaagcacgacagtagtgatgctggcaattcagatgtgccaaagagaaactgtaaagtgcctcctttaagtgaaaaggtaaaagctctcaacaaagaaataaaaaaaaagatttttttttgagatggagtcccactctgtcacctaggctgggatgcagtggcatgatcttggctcattgcaacctctgcctcctggtttcactcaattctcctgcctcagcctcctgagtagctgggatcacaggtgcgtgccatcacacccggctaatttttgtatttttagtagggatggggtttcaccatgttagccaggctggtctcgaactcctgacatcgtgatccgcctacctcggcctcccaaagtgctgggattacagccatgagccactgcgcccggccaggttttttatttttttgagacaatcttgctctattacctgggctggagtgcagtgacacaatctcagctcactgcaacctccgcctcccgggctcaggcgatccttccacctcagcctcccaggcagctgggactacaggcattcaccaccgtgcctagctaatttttgtattttttgtagagacggggtttcaccacgttgctcagattggtctcaaactcctgagctcaagtgatctgcccgcctcagcctcccaaagtgttgggattacgggtgtgagccactgtgcccggccaataaaaagaatcttatgctgtggttgcgaagatctatggtaagaatgaatcttccatccatgaaattgtgaagaaggaaaaacaaaaatgtatgttactttttgtgttgcacctcaaactgcaaaagtgcagccacagtacaggataattgcttagttagaatggaaagggcaggtcgggcacggtggctaatacctgtaatcccagcactttgggaggcagagtcaggtggatggcttgagtcctggagttcaagaccagcctgggcaaca

SEQ ID NO: 25472 - DNA, 2300 bp, Homo sapien
gtgacagtgaaaatgtacagaaaaagatgcaagacacgtattggaagtaggatagaacttggagagagtagaagtcaagaatgcctcccaagtgtgtagcctgtgtcatgtgccacttaataaactgggacactggagaagaaagaatttcgatatggagagaaagatcaaggctttggatttggctgtgttgcatctgaaactcctaagaaaaaaatcaagttgagatgtcaagcagacagctggctatctagatgtggagctgaaaacaaagggaataggctggaaataacaatttttaagtcatcaatatatagatcaaatttaaagcttagggaggaatataagagtaaaagaagaggacctaggactgaacccaaatactcattttacttcatcaaacatctttaagacaagtgagtacttttatatcactgggtttttcagtcctccttccattttacctttcagcagaatgcaacactactgatgacttttttcatggcttgcaagacgcatcctcctctattggttattaaacagcaggaattcgtcaatgctccatcctaggtgcctttattttacagcactatactctttttcggcaatttcatccacatccatggcttcaattactatcaatatggcagatgacaaacacatacacacaccgcgcacatttacgtacgcagcccagaactctcctaagatctccaaacccactatatccaactgcctacttgacattccctctcaggtatctcttccagttagacacttgtcaggaattgccacctcaataaaggaatttatacagagctgaaattttgagaggaataccccaaaaccactttaggacaactcttcaggacacaggattttatcatcaatcatcatttcctttcatggatcatgacttaaaatagttacatctaacaacctgatctggcggctagaaatgggcgcaaggaaatgcacaacaaaaatacaattcatgttttgcagtgaggactggtcaagaggaaggtgaagatggtcaagagagtgaatgagtatcatgtccaaggcctggtggatgtgccgtaacgaaagtcacctgaagagacagcaggccctgttagaaggtaagaggcgaacgacaacagccccagagaaaaggggccaggtttgagtttcggagggagcgagtggcagtggagaccaagtcaaaggagaggtggaagccggggcagtgcacccaaaggtagtacctgtgaggctgggggtgcatcgaggggttgtgggcgggctgagtagcagcagggcgaactccagaggagtgaacgccgagtgggcggatcgcacagaaggaggaggaggtagggaaaacggctcaattgagaagctaccccggcccgccttacctgcgccgagggtccggagcccccggacagacccgcggaaagcacggagcccgcgaggagtgggaggagccgagggtaatggaagtagggataccgaacccaaaggagggaggccgctagctacccctagtcagggagagcggctgatggcgggaactgtgaccacacgcaaacacgcacgcacgcacgcacactcgacgcgaccagacaggcgcgtgcgcgtcagtcgaaaactccgcccctcacacgccctcgccccgccccgccagtacctagagcggcctagcccgggcagccccgcccctgccgtgactgtagtaggcacgcgcactttccacctcacccgatttcgacgcccccccaccatttccctcctacgcaacccagtcgggcatgcgcaatagttgtcttgccgggactgtccatcttttcccgccgttcactggcttttggaggagggtcagagttcacgccgctctctggaaataactgctcaaagccagaagttgcggggactagtggtcgcggacgtccttccggtcctaaatcttaaggggcaaaggacatactctgggactgttaactaggccctggaggcgggaagaggatgtgtgggtggggtcaggggtgagaggtcagagggccgcgaagtgggcggagcgagccggagtcggatggcggctacggcggctcattgttttccgctgcaggggtgctgaaggggggacgcgggtcggacgcgtccggctgtggaagagagcggcggccgctcacaacatgcacagcctggcgacggctgcggtgagtggctgggcccccaggcttggaaccagaatcctttctcagacccacgtttcggccttctctcctaattcccggtgtcgggtccctagtctg

SEQ ID NO: 25473 - DNA, 2300 bp, Homo sapien
cacttagaaacagtatgaaaggaggcagagataccaacagcactggaactgacaatggagatcaaatctcaaaaagcagttttctatagcttagtcatacttggctcaatttttcactttttgtacttaaacgtatggcaatttttggtgctttatttagtaattacgtcattttgcctgataatacaatttcagtacattactttccttaaatcatttccctttggttaaacagaaaaagcagaattggtcttcaggcaggtatgctcaaatcaaatgatctcctttccccatcatggcaatgttctttcagtggtcaccttcccttcaatattctttcatgcagcaaagtatctgagtctttaatcttgtactaggaactgtcctggcaccggggaaaccacgtcaacagggctcacatgatccctgtccctgccctcaaggagacagacaacaaataaacgaatacaataattacacggggatcagggctgtaaagggtactctactaaagttagaggctgcggaactaatttgaagaggatagtcagggaaggccactctgagaccgatttaggcagagacctgaagaaagatggatttggataaacagtttaaggagaggaaggagagttcaaggaagaggtaccaattacactcatgctgtgtatgtaaaggaggagggataagaagaacattcactccaggcatagagaccacaaagtgcatcttggagaaaaataagcgcgttgcagagggttaggtggccagagtagctgaagctttaggagcaagagacataaaacgagattataaacgtgggttaagtaccacatcatacagggccgtgcaggctatggcaaggagtctagattttatttaaatgccaagagaagtaggattacttcggatagctgaattacactatctttcttttttgttaaaagatcacgcgggtaaaacgagatgtgtcgaggaaaagttttaaatgcagagaacctaagtcagatgcaaaaattatgcacttttccgggcctcaggttttccataaataaagcaagtggtttgaactagaagccatttccttcccgctgcgacgtggtgagttctaagagcaggggccgcgtcagattgaccatggaattcccctcatcgacgccggcgcccagaacacaactggcgccctgaaactgttggtcagcgcaataaatcaatgaatggcctgctacgggcgtgggaccaggccccggcgcccgcaaagaacgcgatgggtcgcgctgaaggccgcgagaggcgtccggcaaggaaataggggccggctccaccacaaccaaagcgtgccgaggaggggaaccggggccttggagattgagggcagaaaaaaatcagactagggacccgacaccgggaattaggagagaaggccgaaacgtgggtctgagaaaggattctggttccaagcctgggggcccagccactcaccgcagccgtcgccaggctgtgcatgttgtgagcggccgccgctctcttccacagccggacgcgtccgacccgcgtccccccttcagcacccctgcagcggaaaacaatgagccgccgtagccgccatccgactccggctcgctccgcccacttcgcggccctctgacctctcacccctgaccccacccacacatcctcttcccgcctccagggcctagttaacagtcccagagtatgtcctttgccccttaagatttaggaccggaaggacgtccgcgaccactagtccccgcaacttctggctttgagcagttatttccagagagcggcgtgaactctgaccctcctccaaaagccagtgaacggcgggaaaagatggacagtcccggcaagacaactattgcgcatgcccgactgggttgcgtaggagggaaatggtgggggggcgtcgaaatcgggtgaggtggaaagtgcgcgtgcctactacagtcacggcaggggcggggctgcccgggctaggccgctctaggtactggcggggcggggcgagggcgtgtgaggggcggagttttcgactgacgcgcacgcgcctgtctggtcgcgtcgagtgtgcgtgcgtgcgtgcgtgtttgcgtgtggtcacagttcccgccatcagccgctctccctgactaggggtagctagcggcctccctcctttgggttcggtatccctacttccattaccctcggctcctcccactcctcgcgggctccgtgctttccgcgggtctgtccgggggctccggaccctcggcgcaggtaaggcgggccggggt

SEQ ID NO: 25474 - DNA, 2300 bp, Homo sapien
tactgtgcccagggggccctgtctgtctgctccctccctctgtttcatgagagtcctgcagtgggcatgccttggcactctggaaccatactaaccttgtgaaagtctccaagtccctgccccaaaaatcagaacatatgggctgaagaatactgttgtattcatgggaacattgaaacagaatatttgagatctagactctcccagaaaatccactatgagtgataacacccctcacagattacccaagagggaaggaggttgggcagcattaaattgatgcaaatagtgactcagaaagatggtatataatctgggggtatagaagaggagtgtggactgtgaaggtgaggcttggaaaaataagctggccatgttggggaagtagaaatgggagagcaagacaagcatgtaaaacagggcctctattaagtcaaatctgaaatcagcacagtttaaactacgatgccccccaatcttcctgttccccatgaatggcctccctcctaatgtgtccccttccttcatactactactcttctatcaaaacctgctctcagtaaagaatatagacaacccaacctaggtataaattatttaaaatctactttgaccttaggattgaatttttaaaaaattatttataatcggctgggtgcagtggcttacgcctgtaatcctagcactttgggaggccaaggcaggtggattgcctgagctcaggagctcaagaccagcctgggcaacacggtgaaaccccgtctctactaaaatacaaaaaaaagtagctgggggtggtggcatgcacctgtaatcccagctactcaggaggctgagacaggagaattgcttgaacccgggaggtagaggttgcagtaagccaagatcacgccattgcactccagcctgggcaacagcgagactcttatctcaaaaaaaaaaaaaaaaaaaaaaaaaaatatatatatatatatatatacacacacacacatatacatatacatatatgtatatttaaaatcattaagccttcaaaagttaacacagatatatgatattttaaatgagacctaaaaaaataaatttaaaaacacatatagaaaatatatcaagagaatgtatagcttaataaattattaagtgaagacccttgttagcacttagaactagaaatagagtttagctagctatgccagaagccccctctgtgtcccatctcaccacaattcctccccctcccaacagtaaccactatcctgacttttatagtaatcacttaggaggattttattttaatgggactaaaaaatgtagctataatcactaatggtaaaatattaggcagttgagggatgcttgtggaaaccatgataggcagccagacgtcagcacacttaaaattacaccatttcacacagttcccctctgagcctatgcttcatctctgcacacatctttataaacatgcatgtatgtcctgaaggtgctacctccattctgagggctatgacttataacccagaggtgctgaacagatgcttgtaggaggaacgaatggatgtttaaaaaaaaatgagctgtttcacacgttcatctatgcattctttcaatatttaatgagtgcctaaaatatacatagattctaacctatctgtccctctacattctatcatcattcctgtcctccccttctcctcgtcttcctcttttcccatcttatttctttcttttcctgtgggacggagctacagtgagtgccctgcaggcaggattcagagatacaggagcaggccagtggaaacagacactatggaaaggagccagattaaataagggcaaaaacagccgtattacatgcaggaaccagaatgaaaagcagtgattcacagagcactgcaactgaggacactcccttcactttgagagctactgcgggattggggtcaatgagggctggcatcaagatgaagggcagccaggctcctccctggagatgtgctgcccttaatccttctctccccaccccacccccactactccctcacattgaccagtgtcctgggcctttaagagttggatgggctggactggagagagctcacacctctccccttcttactgcttccctccggctataacttgccagtcacagcagccagctgctgtagaagaggggaggaaacaagccagtgcaaggggagcaaaagagaaaaggagccaggctgggcttcctgatcccacagcatcgcagagctcgggaggcacagctcacagacacaggaaacacaggactgctattc

SEQ ID NO: 25475 - DNA, 2300 bp, Homo sapien
ctactcaggaggctgaggcaggagaattgcttgaacccgagaggcggaggttgcagtgagccaagatcgcaccactgaaccctagcctggacaacaaagcgagattctgtctcaaaaaaaaaaaaggagatgcattttggcataaattaaacatttttaataatacctagtgttgatgaggctataggaaacactatgttacagcttatggagatacaaattagtataatcttttgaaggtcaatttagctacatagcaaattttacaatttgcatactctgaccactaattccactgtaggaatgcacaaagacaccggaattacagtggccagagcaaggatgaggatatataggggtgctttatttgtaatggttggaaacagcccaaatgtccatcagtaacggcacaatttattttttaaaattatttttagaatgggcaacatagggagaccccatctctacaaaaaaatttaaaattagccaggaatggtgatgcctgtagtcccacctactcaggaggctgaggtgggagaatcacttgagcccagcaggtcaaggctgcagtgagctgtgatcacaccaccactgcactgcagcctgggtgacagagagagaccttgtttcccccaccaccagccaaaaaaattatttttatttttttggtccccagggaagcaagggcagaatttcgttttgatttgttcatgctctggaaaaaacatgaactggataagaaagtacaaactagatgtaaatgtactcaaagataaaaatatctttgatatatagcaagtggaaagaaaagggtcaaaaagaaacacaccaaattgtgcgtgtgaaggtgctgggtggttattcttcctttgtatacttatgtatcattttagatgttgcactgaaatttttttttttttttgagatagagtttcactcttgtcacccaggctgcagtgcaatggcgtgatcttggctcgctgcaacccacctcccaggttcaagcgattctcctgcctcagcctcctgagtaactgggattacaggcatgcgccaccatgcccagctaattttgtatttttagtagagacggggtttcgccatgttggtcaggctggtctcaaactcccaacctcaggtgatccacccacctcgtccttccaaaatgctgggattacaggtgtgagccactaggcccggcctgaaattttttttttttttgagacagagtctctctcttggccaggctggagtgcagtgggcaatctcggctcactgcaacctccacctctcatgttcaagcgattctcctgcctcagcctcctgagtagctgggactacaggtgcgtgccaccacgcctggctaattttttgtatttttagtagagacgggttttcaccatgttagccaggatggtctcgatctcctgacctcatgatcctcctgtctcagcctcccaaagtgccaagattacaggcgtgagccactgcacctggccctgaaatttttttttttaacaacaaaaaaaacaataaagagcaaacagaccagcagaataaatgtaggacaaacctggccttgagtcatggctctaccactaataaacatagtagtcttaatctcgtagaatctcaggaccttgttgtcatagggctgttggaggaccaaatgagagcgtttattaagcctttctttatcaaagtcttgcccattgcttttaaaacggcagcaattattatggagaataataattattttcagaaggatattctccattttatccattcctgtgcctttgtaaagctctttacagaatttgaaagtaaagctcttaaccatttatattgcagatattatccctagtttgtcattttcttttggaagtttctggttttcacttgggcaaaatatactgtcttaatgctttctggatttgcttgcttgttcactcatttaacaaatatttattaagcacctatcttgtgccaagtattgtgctaggaatccaaacacacgtgccagatagatggtccctgaccttatggggcctacagtccaggtgtaggaccagacttaaagtccatctgtactctacgaatattaaaagattcacctacattttctactagtaactaactcctatgagtcttgttccatctgattctatgcctttctctgtcggtcctctgcctgcaggtgtcctggtaaaggtggtggaggtgtacttctgtgagcgctgtgaacagagcttcgcagagcccactctgctggccctgcaccagtgcagtgagacccatat

SEQ ID NO: 25476 - DNA, 2300 bp, Homo sapien
ctgcaggttgtcttctgctagctaagtgcccttagccaagtcattaagcaatttgggtctcagatttcttatctgcaacaaaattaggtggggcccaaatatctcagaagtccttttttttttttttttttgagacagagtctcgctctgtcacccaggctggagtgcagtggcgtgatcttggctcactgcaacctccgcctcctgggttcaagcaattctcctgtctcagcctccccaatagctggactacaggcatgtgccacacacgcccaggtaaattttgtatttttaacagcgatggagtttcaccatgttggccaggctggtctcgaacttctgaccttgggtgatctgcccgttttggcctcccaaagtgctgggattataggcgtgagccaccttgcctggtccctttccctcttaacctttgataatctcactattcctcagcatggattataaggaaggcccttccttcatcatctggctcctgctgacctcccctgactcatctcccacttctcccctcagcagatctctgaaccagatgatgtgccattctccagacccaccacattctcttttgctttcataccctcacagccttttgcgtctcttggcttgatatgccttttccccttctcaatctctctctcttatctggctaaccaattaactatccttgaagaagctgcacaaatgtcacttccaccatgaaggcctcctgacattcttttttttgagacagtcttagtctgtcacctaggctggagggcagtggcacgatctcagctcactacaacctctgcctcctgggttcaagcgattctcctgcctcagcctcctgagtagctgggattacaggcatgtaccaccacgcctggctactattttgtatttttagtagagatggggtttctccatgttggttgggctggtcttgaactccagaactcaggtgatccacctgcctcggcctcccaaagtgctgggattacaggcgtgaggcaccgcgccgggcctggcttcccgaaactcttatcttctctcttctggcgtcctaagggcactctgtacacagccctatcagaaacgaggtcacactgcactgttgtttacctgtcagtctctctccctagatgtatagcttttttagtaatttgttgacattatcacttcaatgatattactttgtgatactgacattatcacttcaacgaacacaaatcacccacaatcgaagattccagtgaagaaccacagatatggagctgcattggagtaaagctaggtatcttgtacaaaaccagtggttcctcacctataacgtaacacatttggagaaatttcaaactcattaactgactatggcctcaaactaaatatgggaacataactgaggaatgaatgacaattgaattgcataccctgttatacatggctaaaatgagtttaagctgaataattagtaattaataagaatgatgggaatcacttcatgaaattgagtcacagacaagatgcaaaaagaaaaaaagaagaagaaaccaggccgggcgcggtggctcaggcctgtaatcccagcactttgggaggccaaggcgggccgatcacctgaggtcagaagttcgagaccagcctggcgaacattgtgaaaccctgtttctactaaaaatacaaaaaatcagcagggtgtggtggcacacgcctgtaatcccagctactcgggaggctgaggcaggagaatcgctggaacccgggaggcggaggttgcagtgagccgagatcgcaccattgcaccccagcttgggcaacaagagcgaaactccgtctcaaaaaaaaaacaaacaaaaaccaagatcctgcaatctgatagtccctatttccagaatcccatggactcaaaacaacagatcacagggattcacaaggtggctggaaagtgcactcccgtggtcagagggattctctggaaactgcagcctccacttactgaatattatcgctgttctggggaatcttcaagcttgaccatacatggcctccggggggagccaaggaggacgctgagccgtcaagattaagaaccttcacctgcgggagggcagggtgaggtaggagacaggtgggcaccagagaagaaatacgcttatcttccgggcaggagggctgaggaagagaaaggacagactaaggcagagagaaggcctggagaaacaacgggccccggcctagcgacccaggttcccacctgcctctggctctgactcaccgcgtggtcttggacagacacagtc

SEQ ID NO: 25477 - DNA, 2300 bp, Homo sapien
tagtagagatggggtttctccatgttggttgggctggtcttgaactccagaactcaggtgatccacctgcctcggcctcccaaagtgctgggattacaggcgtgaggcaccgcgccgggcctggcttcccgaaactcttatcttctctcttctggcgtcctaagggcactctgtacacagccctatcagaaacgaggtcacactgcactgttgtttacctgtcagtctctctccctagatgtatagcttttttagtaatttgttgacattatcacttcaatgatattactttgtgatactgacattatcacttcaacgaacacaaatcacccacaatcgaagattccagtgaagaaccacagatatggagctgcattggagtaaagctaggtatcttgtacaaaaccagtggttcctcacctataacgtaacacatttggagaaatttcaaactcattaactgactatggcctcaaactaaatatgggaacataactgaggaatgaatgacaattgaattgcataccctgttatacatggctaaaatgagtttaagctgaataattagtaattaataagaatgatgggaatcacttcatgaaattgagtcacagacaagatgcaaaaagaaaaaaagaagaagaaaccaggccgggcgcggtggctcaggcctgtaatcccagcactttgggaggccaaggcgggccgatcacctgaggtcagaagttcgagaccagcctggcgaacattgtgaaaccctgtttctactaaaaatacaaaaaatcagcagggtgtggtggcacacgcctgtaatcccagctactcgggaggctgaggcaggagaatcgctggaacccgggaggcggaggttgcagtgagccgagatcgcaccattgcaccccagcttgggcaacaagagcgaaactccgtctcaaaaaaaaaacaaacaaaaaccaagatcctgcaatctgatagtccctatttccagaatcccatggactcaaaacaacagatcacagggattcacaaggtggctggaaagtgcactcccgtggtcagagggattctctggaaactgcagcctccacttactgaatattatcgctgttctggggaatcttcaagcttgaccatacatggcctccggggggagccaaggaggacgctgagccgtcaagattaagaaccttcacctgcgggagggcagggtgaggtaggagacaggtgggcaccagagaagaaatacgcttatcttccgggcaggagggctgaggaagagaaaggacagactaaggcagagagaaggcctggagaaacaacgggccccggcctagcgacccaggttcccacctgcctctggctctgactcaccgcgtggtcttggacagacacagtcgcttcgcttctctgggcctcagctttcctatctgtaaaatggaggtgatgacagtgtccacatcgtcgggcaggagctggatcataagagccagcgaactggaaaggcggtttgtaacctggaaggcttgggatggagcatcgtcatgattttgtcctgagagcagcaggtacccgggcggggtccagaaccgtgacgcgactgcagcgccggggcccagctcgtctgggtgctcccttcagtacctccttccgagagttcccagcgcccaggcccaccctgatcccggggctcgaaaaactttgcctccagctcgctccacccgcattcccttcccagttccgccccgcagccgctcactcacctccagacccagagccggcgggagccgcatctctatggtcggccgcggctggaacggcccccggggcccgctttgtgcgaccgcctccggctcagccgcctctaggatattggggatgtggaagccactctctcttcctcttgccggctgccggggtactctatgttttgtctctgtggtttttcccgccctccacccccactccagccctgaagccggagaagcaccatcgagagctctggggtagagtggcgtgggcttctctgtgggtgtggcgggaagtagatgaaaggacccggggcggggccgaacgcagcttccccaaggtgcaggcgcggtgaaaccatcgagacggagggccagagagtcacggcggtgagagggctgagtgacgggttaccccaaaccatgtggctggaggcgcgagctggggtgtgggcgaggttcaggagggggttcctgggtgtcgcggaggggccggggacgggagagctttgtctgtggccttccatgcataggtgttttggaattctggatccc

SEQ ID NO: 25478 - DNA, 2300 bp, Homo sapien
caataattctcttcaccatggctgattcttcaattaggtggagctgtgccaaacagcttccttctggccccctgttcccatgggctcaccccggcctgcttattccacttctccaaactgctcatctgatgtcaaatgtccccatccctgcaatgtccctagaaagcctgcctgtgccatcccacaccttcctccaggatgttgaagaaaacctttcggtcagtgcccagggccgtgaaggtgacagattcccaaggagtccccgtctgcaagtctatcatctgcatctctcgacttcgttctacccgaatccatttcccccgatacctgaataagaacgatcaaaactgagtgagtgaatgggtcaaacccagctcccatcattcttttctactctcacagccctccctagctccccaccttaccagataaaatggtttccagggctggggacaaattcaaacttagtggaaatgcggccactctcatgctgaaggtacgaagtctcgacactgaggtgctgagtacgggtactgtggcgggtgagccagctaagcaaccaggcatagctcctgtctcgagcagggacttccagtgtgatcatgtaatggcgccggaatgccaccaggcccagttggacacccttccgggccagggccagggctgtgcccacacccaccagcccaaatccagccccaaagtagggattgtccttcagagccagaataaagtctgaaagtggcatcttgaaagggaaacaccaaaccttacaggccctggggtgttacgaaaacctaggggtggggaacagtggagatgggacaaagcacagattagaaattggacctccccagccctggccacaggtcagcattactgtgtgggtcaataccctccttttgtggggtaagggtggtattggaatgcaagggtggaggctccaggtccctcatcccattttgtccttcattagtctactcatacctgtttcctaccagaggaccatgtctggagatgccttaaaccaaaaagagctatataaacaggcttcacatcagggtaatggatggacaggatttttgtggtccctgggaccagctatgataaaaaggggtccattggctgcagtcagcaagggagaagcgtccgttgacttgtcagtaaccctatgtcttgttatgagtaatgtccttcaaatatcctcccccttacgtccccaatatttaacgtcttgtttagacctttattacctcccacctaaactgtctttaaaatcgtagttcttgaaatggcattttaataggtcttcacctcctgcttcacggaacatctacacaagggtccagatctttcatcatagggatcagctccaataccatatctctctctgctccagcaccttcaatggctggctcccagcagacccctgaattgggtataaactcagcctggtactcaaggctctctacaatacggcgcccacctacctttcatggattagctcctaacactacctgtttagcaaatatgcaaatacgcaacaaatatgttcaacaagtaagcaacctcccaactccttgctcatgcagtgctcttggctcggaatgcccgttcttttctccctcattctccccaaatgaaaatctgcccatctgctactttctccacggatcgtcacatcgtagacaataagatcctgagggacaagagcaaagttgtttctagtacacctctcctccaaccccgaaccccggccactttgccctgcgcctggcatgcagggaggtgagctgacagcagtgacctcggctgagcctcagaactgggatccagaattccaaaacacctatgcatggaaggccacagacaaagctctcccgtccccggcccctccgcgacacccaggaaccccctcctgaacctcgcccacaccccagctcgcgcctccagccacatggtttggggtaacccgtcactcagccctctcaccgccgtgactctctggccctccgtctcgatggtttcaccgcgcctgcaccttggggaagctgcgttcggccccgccccgggtcctttcatctacttcccgccacacccacagagaagcccacgccactctaccccagagctctcgatggtgcttctccggcttcagggctggagtgggggtggagggcgggaaaaaccacagagacaaaacatagagtaccccggcagccggcaagaggaagagagagtggcttccacatccccaatatcctagaggcggctgagccggaggcggtcgcacaaagcgggcc

SEQ ID NO: 25479 - DNA, 2300 bp, Homo sapien
ttgggaggctgaggtgggaggatcacttgaggccaggagttcgagaccagcctgggcaacaaagcgagacactatctctacaaaaaataaaaaattaactggacacggtggtcccagctacttgggagactgaggcagaagaatcacgggagcccaggaggtcgaggctgtagtgagccatgatcttgccactgtactccagcctgggtgacaaagtaagactctgtctcttaaaaaaaaaaaaaaaaaagaagtttccctgaacactttgaaaaccagtagtctagatactcttaataacggccagtactagctgggctccctgaaccaatgtaacattgaggtgtagcctcagtcaagtggcccttcaatacttcgcccaccctagttatatgggtcctggatgggatggtggtaaggtggtgacaacaaaatgggggaggggggccgggcgcggtggctcaggcctgtaatcccagcactttgggaggctgaggcgggtggatcatgaagtcaggagatagagaccatcctggctaacagggtgaaaccccgtctctactaaaaatcacaaaaaattagctgggtgtggtggcgggcgcctgtagtcccagctactcgggaggctgaggcaggagaatggcatgaacccgggaggcggagcttgcagtgaaccgagattgcgccactgcactccagcctgggcgacagagcaagactccgtctcaaaaaaaaaaaaaaaaaaaaaaaaaattgggggagtggggactgaagaatgtcctagtacaaagaatctaaggtgtggagtcagacagatatggatttctattcataattttctatcttttggcaaatcactttacttctttgggactcatctagtcttcccaggtgcctgcacctcagttattaatgaaaaggaggccgggtgtggtggctcacgcctgtaattccagcaccttgggaggctgaggtgggaggatcacttgaacccaggggttcaagaccagtctggccaacatggcaaaactccgtctctacaaaaaatacaaaaattagccaggcatggtggcacacacctgtagtctcagctactcggaaggctgaggcagaaggatcacctgagcctggggaggtcgaggctgcagtgagccgtaatcgcaccaccgcactccagcgtgggcgagagtgagactctgtctcaaaaaacaaaacaaaacaaaacaaaaaacagacttaagtatattacaaatccgtcgtgatcctctcaactattctgaggtaaatgccacacccactttttttttttacagctgaggacactgactcacagaagctagatggcctgttcagcatcacacagctaataaaatgtggagttaacccacattgatcctacttccaaatcccagagtccttccatgttctagtctttggttaagaatgcttgagagaaggactagagggactttatatgaagtgtaaagctttattcatacaatagtcctcactagtgctgtgtgagagagagaaggctgaggaaagcgtcggcggaaaaaggctgatccaaggggaaagggggccggaactggagggcactggttctgagaggagaaagggagatggggaggtctgatgggcaggcatcccccaaagcccctgagaaaattcatttgaggaggagagaaagggatggcgtgaagctggaggaaaagggatcgaaccggatgcggcgaggcctgaactggcctggcgggcgccgacccgttctcctctcactcagatcagcgcccctccaccctcccgttccccagtccagctttcccagagatgtcagcatctctgccatccctcatccctcgctccaccccacacgcccgccgtacggaccgtctgcgacagctgctaggcctctggactagatccaggctgtcagccaaagcccatgcccccaaagttaccagtcctcctcccctgcagctgcagacgcagacgccgccatatcttcaccggcccgcagccggaaccggaaatgcccttagggaagtcggaggcggaaaactaagaggggtgggcagctagcgtcgtttctaggcaaccgcagactccgggtccttagccgggcctgatggccctgaggcagttcggatgtgtcccaggaagtgcccatgtgtggtccgccgtccattccacacctctgagcgcctttgtcctctgaacttctcaccagttctagcgagtaaaattgtaagaaagggagccgaaagagaccggagggagaggcgggtggagaagaatta

SEQ ID NO: 25480 - DNA, 2300 bp, Homo sapien
agccaagcttcctgctcagatattttgactccaacgtttacataatttactcccacactacactgcctctatatacctagactcttatattcttctcagaagtctttgaaatggagactctcagtgtccttagcttgctctaccagttctctaacctggagagaggtcggaggtggggagaagttgaaggcagaaagcatacctggtcttcaggaagttttccgtcatcttctaggatctgaaagagctctccctcagcatagtctgtcaccaccaccacctacagagagaaggcagtggcactgatggctccagattcatgcattctgaggttgggaaattcctggaacccttgtgcttggggagacagggcccaaaactgtcaaagcacacctctttatcagtttcaaagctgtcaagcatatgcacaatgttgggatgccgcagaccccgcattatttcaatctctcgttgcaaattcctcagctccttctctgagcgccccaattttgggatgaacttcagggccacgacctgtcagtggtaaggtgaaaagttaacgcctaatcacactactgaaaagatctagaatttcagccttaatctcagagctccagaagtcagattttagagtgtttgagtaactcttattatttctgttagtctcccgcttccattttctccatggtaccctggccttatccaggctttccccattcctcatcccaggaggaaacagcatctgcaaaacatttccccttctggaagaagtgttctgatttgaccagcactcaagatgagatttaggagaaaggaaaggaaaaaaaaaatgaagaggaaataatagagttcaagtggtttacctcttattacatggtgtgctagagactaataatatttgttgtttactaacagccaggcactgtactaagtgatttaatgtgaaaacatatttaatcctcaaactccatcaatcagttgctgttcttatccccattctagagataaggaaattgagacatagggaagttaagtaatttgtccataattctagggctagaaagcggtggagatggaatttgcacccaaataatccaacttcaaagcttatactccataagaagtatgagggagtcagtaccttaggaatacaaactggtataaatacattccttctagatccattttccactggagttgggggtaccaaatcccacccaaaaggtatccctctttgtgcaacacctgagcactgtattttcttcgacccttgtacaccctcccaaaagagccttctccaatcatctccaacacgtggtacttttccatgacagaggtttcaggatctcttagaaggaagaaagtagagacggtgaagagctatagatccagggacagttccacaacatctgggacgcctagttggggcacgggaaaggaaaaatgttagccaccttgccttttcctctttttcacaataaagcctcaaaaaacatgggagggtggaatgcatgcaaagatgatgcgctcttggaacaaacagagcttctctttgtagttcctccccactttcatcctcctgtccccaacccggccccatgcccaactaacacctggttccccttctccctcacccagcctggctcactcgaccctactctttcaacctagcctcgcccaaccaaccctgctcctttgagtctcccccaagttcctgccactcccagactcctcagcacccgctctcagaccccctggcccgtgcgcttcgcaggccagagcccctctctcacccccagcctaggagctccaagctcctcaggccaagggacggattccctggcgtttagccccatctcttctggctgcctgcatacgttgcctgacttataattcttctccacccgcctctccctccggtctctttcggctccctttcttacaattttactcgctagaactggtgagaagttcagaggacaaaggcgctcagaggtgtggaatggacggcggaccacacatgggcacttcctgggacacatccgaactgcctcagggccatcaggcccggctaaggacccggagtctgcggttgcctagaaacgacgctagctgcccacccctcttagttttccgcctccgacttccctaagggcatttccggttccggctgcgggccggtgaagatatggcggcgtctgcgtctgcagctgcaggggaggaggactggtaactttgggggcatgggctttggctgacagcctggatctagtccagaggcctagcagctgtcgcagacg

SEQ ID NO: 25481 - DNA, 2300 bp, Homo sapien
ttcttttggaccaggacagagacataaatcctctctgcctgtcctgaatgccatttagatttggacattctttctcctcttttacctctcccacagagtgcagcagcctgtctattgggacagcttggtcagcaaggggtgacctttgacctccagcccatggaatggatggctgcagccacacatgccttgtctgcccctgcagaggtgaggccccccagggagggcacagacatgttttctctgagtcagacactaggactgcattcaaggggaaaagactgaaatgccagcaagcctggagtaaactgaggaatggaaaaggaatcaaggagcccttccttttctagatttgtcgccggatgataggcccctctgagcccagattgatctggactttagatttctttttaatatgcagagcttctagagagtgagggagggaagggaagaggaagggtgactaacctgagttttctgagtagtgtgagaaccctgcctgcttcgttctcctcctccagaagctcatgctcttggcagagtccttcctaatgcataatttcacctctgactgcagcttccactctgctttccccacttgttcttcttaacagatggaaaaggtggctgacatcctgtgaattcttcaggaactcagtccattatgtagccttctttctgctttctcctttcccaggacttttcttcctttcatttttagaccctttggaactcatctttccttcattttgtaaaaagaaggatagactttataatcaaattattgtcatccctttttttttttttttttttttttgagatggagtttcactcttgtccaggctggagtgccatggcgcgatctcggctcaccgcaacctctgcctcctgggttcaagcgattctcctgcctcagcctcccgagtagctgggattacaggcatgcaccaccatgcccagctaatttttgtatttttagtagagacagggtttctccatgttggtcaggctggtctcgaactcctgacctcacatgtgatccgcccacctcggcctctcaaagtgctgggattataggtgtgagccaccatgtccagtcttttttttttttttttttttttttgagacggagtcttattctgtcgcccaggctggagtgtagtggcacgatcttggctcactacaacctccgcctcccaggttcaagtgattctcctgcctcagcctcccaagtagttgggattacaggtatacaccaccatgcctggctaatttttttgtgtgtttttagtagagatggggtttcaccatgttggccaggctggtctcgaactcctgacctcaagtgatccatccgcctcagcctcctaaagtgctgggattacaggaatgagccactgtgcccagcctgccatctttatatatgtagaattcttttttttttttttttttttgagatgcagtctcactctgtcaccaggctggagtgcagtggcgtgatctcggctcactgcaacctccacctcctgggttcaagcgattctcctgccttatcctcctgagtagctgggacaacaggtgcacacctccatgcccagctaatttttgtatttttagtagagacggggtttcacaatgttggccaggctggtctggaactcctgacttcctgatccccccgcctcagcctcccaaagtgctgggattacaggcgtgagctacctcagtggctgaattctttataatttataaaacattttcacatgttatcccacaacacacttgaaatatagacacaccaatgtaataatactcatctgctttttctagactaagttagccttcagagaggttgtatcactagtgatagcactaacactcatccagaagtctaagtcagaactttgggagtcatcagtgactgttctctcttccccattattcccccaccgaaatggttcccccaggccccatatattctaccttccggttgactctcaaatctgttccctccatggcaccatcactgacctgccttggtttaacggacaccccattcctcttaggcacctgcattcttcatgtttctctctgacaggttcggttgactccaccaggtagttgtggattctatgatggcctccttatccttctgttgcagctcctcactgaggtacagatggatcttgggatggatgggaagtaaagagagaggaactgggcattttggggagcctctggaccagaggaatgaagaagcaacccacagccttccctctcaagctactgtgcctgtgata

SEQ ID NO: 25482 - DNA, 2300 bp, Homo sapien
ggttcacgccattctcctgcctcagcctccctagtagctgggactacaggcgcccgtcaccacgcctagctaattttttgtatttttagtacaggtggggtttcaccgtgttagccaggatggtctcgatctcctgacctcgtgatccgcccgccttggcctctcaaagtgctgggattacaggcgtaagccactgcgcccggccgggaactcagtttttaaggttgctctagtgtccccttagccacgatggggtccattaagttggttggggtggtacttaaaatttttatttctcagtctcaaaaatgtcattttacagtttgtttgaatcaggatccaaacaagctgcactcattgcatttgaatatatttcttttttttttctcaagagggagtcttgctctgttgcccagggtggaatgcagtggcacaatcttggctcactgcaacttctgtctcctgggttcaagcgattctcctgtctcagcctcctgagtagctgggggctacaggtgtgcaccaccatgcctggctaatttttgtattttttgttggagacggggtttcaccatgttgcccaggctggtcttgaactcctgacctcaagtgatcctcagagtgttgggattacaagtgtgagccactgtacctggccaacatttgaatatatttcttaaatctcttataatctaaaacatctctcctcatttttataccctaaaattgttgaaggaagaagaggtcatttattctgtacattggctcacattctggatttgtttgattgctttcttgtagtgttatacagttgtttctctttatttcttgttaactggaaattacagccaaaacttgattagagtcactcaacttttttttttacaaaaatacgctatacttcataaatatttctgttcaattgcatcacatcaagaaacaatgctcagctgtcccatgtttcgtgatctaagattgattagtacatgtaggttatcttcagtgtacatccttcagtgtaaaattctcccataaattatctaatacttttagcatccatcaacgactgttgactaaataagttatttattgagatccttcctctggtccagactgttttcatcagattagttttatctttgtcccctttatttctgtagccaattgcctaggaaagatcctttcatcttccagctttcttagatctccaaatctctcaggtctacggacatctgaggcaggagcgcgatctggcttgcctggggagctaacgagataaggaattgagtcagtatttcctaacgttcacacttgaagcccataaagcaggcaggtggttttaattttgccccgctgggtgggttggggttagggaaggatgggttagagggaggcagagtgaatcgggcaatctcccctttcctgcggtcaaactcaaaggctttttctagaaatccttcaactgagcctgggccctttgattttcaattgaggcaaggccaaagagtccaggccaggcgtgggggctcccgttgtaatcccagcgaccaggaggctgatgcaggaggatcacttgaggccaagagtttaagaccagtctgggtaacatagtgagaccctgtcctgagaaaaaaaatttaaaaatagcccagcatggtggcgtgcctgtagtcccagctactcggaaggctgggggcgggcggatcgcttgagcaggagttcaagttcgcagtgagctatgatcacgtcgctgcactccagcctgggcgacagagcgagattctgtctctaaaaaagaaaacagtccatagggagtaggtggaattagagtagaaagagagagtcctggatgctccgaatggagcctttcagagctttaaccacgggactacatctcccagaattccgctcgccggatcccaccgcactgaagggactgcgcgtgcgcgagtcaggtgacgacccgcccctacaggccccagaacccccgagattccccgcgcttgcctcccgccctcttcttccagactctcggtctgtccgctgggggcgcgcgcggtgtgtggcaggcggcagcggcgctggcggccgagtgcgcttgtcacgcgtggcggtgcgtggttgctaggggcgcctgaggctgccgggtagcccagcaggccgagggaggaagtagcgtggagccggtgccgagccggggcgaagctggatcccctaggtgagtgcggctgcggagccaggggagccgaccccagacactccgccggtcccacgctcccgacctccctctacctgagtcc

SEQ ID NO: 25483 - DNA, 2300 bp, Homo sapien
gttggtaaatcttttgagctggcagtctaattaatcctgagttgttaatataaagaacaggtgtggtttattactgtgtaaacccctttgtttagctagaagataaagccttctgctttttgatcatttgaatggcttatgttttggccctgttagggcctcatacaatggcttagcaattctgcaaaatcctgctatacccaggaaagttcttaggttttttttttgttgttgttgttgtttatagaggttttacttctaagtaaacttttgtttgatggacaaggtccagtttcctgagtttagaatatactacaggtatttcacttttggtagagaaatttgggcttggatggagagaactgattttttttaaggaagtttaggacttgaatggcatttttatttgagtcttctttagtggggctgtatacaaagatgttatttacatactggagtgtggctctcctttttagctctggctttcttaacttttgtgtcaaggcatttttgaacaagcaagggctatccctaaagtcatgaggcagtattgtcctggtgtaccattgggtaatagtagtttcaggattagtctacttgaaaggaaataagttctgagagtcgaagtgcaaaggaatacaaaagaaagcattcttatgatctaacactgtgaactaattggtgttttctggtatttggttaagtatagtataaggatttggcactataggatgtaagagaattatgacctcgttaatggctcctaagtcttgaactagatcatatatatatatatatatatataattttttttttttgagatggagtctcactctgttgtccaggttggagtgcatggcacaatctcagctcactgcaatctccgcctcccgggttcaagcgattctcctgcctcagtctccccaagtagctgggatcacgtgtgccaccacgtttttaaagcatggcctcctgtccttcctgtccaaaaaccaaatgaaaaatatggtctaggttgggtgctgtggctcacacctgtaattccagcactttgggaggccgaggtaggtagatcatctgaggtcaggagtttgagaccagcctggccaacatggcaaaaccctatctctactaaaaatacaaaaattagccgggcgtggtggcgggcacctctaattccagctactctggaggctgagaccggagaattgcttgaaccgggaggcggaggttgcagcgagccaggattgcaccactgcactccagcctggacgacagggtgagactctggggagtggggaggagagaattaacaaactatatgacacaaaggaacaaaaatacacaagacaggataagagagaggaaggatacagggagagctaacatacatatagcagtttgaagtcccgggaaaggagaaaaaaatggggaggagcaatatttgaacagataatatctgagaaactccccagactgatcaaagacatccagtcacagagtcaagaaactaggagtcctagaataaataagtagaaagccacacctagcaactcagctgtcagcctaattgaacttaatatgccctttcttctctggctgcctgtaaatcaccaatttttcaaatgctgttagaaccagctgtaccatcctgctgggtccttcattcctggcttgaatgtgatctttgaccctgtatttattttatacttgcgtgagttatgtttttaaactttttgacaactatactttgaatatacatgaaacataggattcataagacaatactttttttttcttcttgctgtacgttttccgtactatgttactctttccattttattaaaaataattctggccatcatctacgaaatctggtctcaacctgcagtttgaaatatcctgccttggcagacgcggcagggaggtgcgtggagggagaattgaattaaaaaaaaaaacaacaaaacacgaatatttagatttctttgttcagcggcccccctccagggatcagatgactggcccccctcgctccgaactgactccgggatcaatccggaaggccattgggagaagccgagggcagcttagccacggccggttcccgttccctccaggacgcgagggtcgccttgggtggggaaccgcgaccgggcgaggacctatcccggtgtggggcttcccgatttcgaaagaatctcgctgcacccccgcccagagttcagaccaagcgaaaagttatttgagaggcctcgggggcgcggggtgaggagtcgtggcggaggccttggtcgggg

SEQ ID NO: 25484 - DNA, 2300 bp, Homo sapien
ttaacttttttaatatactaaatatcaccgaattgtatattttggtttttgtttgtttgtttttttgaggtggcgcctcaattggtcgcccagggtggagcgcagtggtgcaatctcggctcactgcaacctccacctcctgggttcaagtaaaatctcccacatcagtctcctgagtagctgagattacaggtatgtgccactgctgctggttaatttttttatttttagtagagacgaagtttcaccatgctggccaaactggtcttgaacacctgacctcaagtgatccaccagccttggcctcccaaagtgcgggattacaggtatgagtcaccacactggcctgaattgtatattttggaagggtgaattgtatggcatattagttatatctcaagtgaaagaaatctgtgaagatcagtttgataagattattgtagaaatagatgtcaatgtaatcaatacttgcagaagattcttgggggtcaccaatgtcctagaggcaccacaggaatttctaaggcaacactgctctgtcatgtatctacagggcctaaaatccaacctcaaattggaaactggaaatgcagaggagaaaggagctaagctgatgggcgaagtcacgaagtccttgtgaggctgtttccttaccctttgatgaggtgtagtcacagcttcagaggctccccgcaaagtttttgtcatcagtgatggaacacaagatgtaagagctgaagagttatgaacacaaatgtgaaaccttgcctactggagctgccactagaaagcccgccaacatggcattgggacgaatataatcaaagtctcccacccctaaacagagaaaaacaaaatatagcatatggccaaagtgatttatctttatactttttttaatctttaaaagatatttattgccctataatatacctacagaaaaatgcactgaccctcagtgtacatgagattctttcataaatttcatgtgtacatgcgtacttcaagtgtacgtgaaatgacctctgtttatattccatcacaatgcctggacaagacttacttaatataagtgaaaaaatcactttctttgacagtgattcattcagatacgtatgtagtatctctacgatgaatgtggtcatagtctcagttcctttcccagcagttttttctctggagggagaaacacatcagccctggtttgagggttggcacagaattcatcagtggccagtgatggggcacagttccaggccccgagactctcaggagctcagggcccccaagcatcaccatgaacagatgccacagtgaggctccccgagagccaaccccaaccttcctctataaagaaagaacaacagcggattaaggattgttggttccgcacagcagatagacatttggctgaaaaggccatgcacatcgtgttactcctaccccagctaatttgaaattgttggccaaattcagatccatattttccggtaagactttaagaaaacaacttgtcttcttaaacaaggcggcactcttttttttttttttgagacagagtctcacagtttcgcccaggctggagtgcagtggcacgatctcggctcactgcaacctccgcctcctgggttcataccattctcctgcctcagcctcccgagtagctgggactacaggcctccgccaccatgcctggctaattgtttctatttttagtagagacagggtttcaccgtgttagccaggatggtctcgatctcctgacctcgtgatctgcccacctcgccctcccaaagtgctgggattacaggagcgagccactgcacctggtcttttttttttttttagatggagtttcactcttgtcgcccaggctggagtgcaatggcgcgatctcggctcactgcaacctccgactcctaggttcaagcaatgctcctgcctcagcctcccgagtagttgggattgtaggcgcccgctacaacacccggctaattttttgtatttttagtggagacggggtttcaccatgctgcccaggctgagcctcgaactcctgacctcaggtgatccacccgcctcggcctcccaaagtgctgggattacaggcatgagccaccacgcctggccaaggcggcactcttgtaaataaaaatagacagggtacccagtgttgcctggctatctacatgcccaggttctataaaagttttagctctgagtgcattttggcttggtaataggagtttgtttccaggtcattatttatgactccagttttaatatgcatatcaaataaa

SEQ ID NO: 25485 - DNA, 2300 bp, Homo sapien
ctctactagagctcacccatctggccatcccacacaaaaaacacagttactgcccttcaaaaggaggcaagtcagagttccatctgagtacggcacccagctgagagtccaggctatctgaggggtgggcagttccttcttccaggtagatggacaccctatggtctggtgacctaaaaactaacaggcaggtgatttgcacctcctactccccacagacaacagtggaggaagaagagggtaagctcaattaaaacactgactcatgctgagcacactgctacgcgcctatagtcccagctactgagataggaggatcattgagcccaggagtttgagactagcgtggacaacatagtgagacactgtctcaaaaaaaaaaatccacttgcaactgaaagaatggcaaacacccagcagctgctggatcttaattatcaaatctggttgggcaggaatggctaagccctttcctggcagtggagtaagttcttggtcagcacatttgaccacccctggttctgctctctgggaagatctcccctttccactctcctatgtagcctctggcttttcctgctgggaagctgttgtttatccaatatcctttgtcccacactggcaaacttgtgctttctgcagtccttccagccttcacagccctcttcctgctggtgcggatttggagggctgggaataaggcaagggaaggggtgtcaaaccaggctttgctgatcaggcttatggtttctttgccaatacaacaccctcacaatcttagaagccttctgagtggctccatgtttgagtaaccacagccaatggcctcatgtagaccttatttttatgcttgaacactctggacttggtgttcttcctactctcctttctctcaaactggtggtggctatcttgagtccatttgaaaaaacatgcttggtgtgaaggaaattctcttacactgatctctgtcctctgagccagttcccactgtccagtgagcagatgtccttgagaaaggctggggaccacaggaacagccctggccaaggctgtcctcccaactccattctcctccaccctccccattggcagagtaggaacattgagggttgatggaaaacacatgtaataaactcagacagaaattcaccagtctgttgttgagtgtccactccagggccagggctgggatggaagaggctggaaggaggagagaaagggaggggcagagagaggaaagccggagcagctgggtcagcattcccaatccggacattgactcaggctccgggaatgccaaggaagagggtggcagctactggagccaggctgggatcctgttggcaccagggatgtaggcacagcactcacagagggttgggggctgggacacctgcacacccaggcatatctcccaaccacaggtggaaacagatgtctcttcccctgcggggagctctgagtgctccccacgccttcgaggtgattctcacagctcttcacctgcctgaaacacccactccatctccttcacctgagagagggacacactccagggactcaaatctggacatctggacatacactagctgctctcctggactacccacaaaccccttgcctcatctccagcctctgagctggctgcaacttgccctttctaactccagcaccaccctctactgaaattagaacaaggaagaaagttatgctgatctgcctccatgttcccttctttggtgcctgataaagatgagggaggctcttggaataggggctcaggactctgagagcccaactctgctcaatgaccatgttcccacatgctccaagccacatcccctcaaaaagggtccctctagcttgtcctcagtgacccaggaggcagctgaggaccaagtacccagattatccggtgcgccccttccctcccagcaacccccagccttcagggctgtagcagctgagcaaatgggggcccctccctctcattgcctgacacccaatcagagagaaaccgatcctggcagggcagggtgcccggggccgggcccagaatagtgcagcccagccacagtgtcgcacacttgctctcagttggtctggggctggccacatggagcccgggctggagcacgcactgcgcagggtatgggggtcccaggggagccggagccggggcagctgaggccagaagattgagcgcacgggctgtgaatgtgtgtgtgggcgtgtgtgtcttctggtgtgtgtttggtctggattttctcgtgaatatgggcatgtgcatgtttggg

SEQ ID NO: 25486 - DNA, 2300 bp, Homo sapien
tttggggcgctccctcctcaggcagaggcagggcggtctcagagcccaggtcccctgatgacaaagacaaatacattaaaattcttgcctcggagaagaatgcaggatagggagagcatttcataatctgcaataacagtagcagggtgggagcagggctgggcagggggttcggaacccagacagtggctcccaggaggctggccactggccacctgtagcctccagggacccccagagccctctagctgcctatttggtaccacatggctggagtgtgcacccaaactgggtatgtctttgaatgtgtagtgtccagagttggcattgacctttaggaactgtccagattggcattgccccgtagaaacagcaactgtgtgcaaagttactaggtgcaggggctgtgcgtggcctttggatactgttaaaggctaaaatgggagagggcagtgcttagaccagaccctctctctatgactcttgccactgccccctgcccccttccccttctttagtgtgtcctagccctttcaccagaactctctgtatccagtgcaagggattgagctgatgcagcctggacaccagggccctgacatggagcttgcttgccggcaagtccacacttctccagttctctcacctctgtctgctcattccttcccccatcagcctcctcccctggggtcacatcccttggccccttggcctcatcttgatctacttgtcccccctctctgggtgactcaggatcttgtcttctctctctgctcaccaaggttgtttggaagtgacctcagtcatcactctcttggaagcgacctcagtccccacattcaggtccccctctctaccaacaaccaggagctttcttctgggcgcctgacgtttctgccatagggactcgatctgtcctccccactccaggacagctttaaaggttgatggttgctcttgatggtatggcagggagaatgtcccacaccacctgtcccttggcaccccggggcacgtcggggacgggaggggcaggggctgctgcccactgccagccgaatggcatgatgaatggagctgtccctcttccccacggagcctttgatctccccctcgtggggagggggccaggggcatcaaagacatttttgtggcattagaaaatctgataaacgccatctcacctgcagctggctctcccaccccttctacccgggccaggttgggggaggaactcgaggcagggactcttggacacgcgaggccgggctaaagcgaattctgacccctcgatctcttgaaagtctgcgacctccattctcccgctcgcttacaagtgccagcgcttgcgcgcacgccctggagcggctactcttgccctctcatttcccccacctccccgccctagaacgcgggcttgagaggtgggatggctgggggagcgagagcggaggcccagggcttcctcccttcttcaaggagaggctgacgaaggggcatgaggcatcgaacagggacacggaaagagatgacccctccagcatccgcctgtcgggcggtccagtttgacaaccctcgccgaagcaccccgcgccccaggccaacttcctctcttgcctccgcgccagcatctccctccgcaccgccccccgccccaaactccctcattcctgggaagttttctctctttacagtcaacaaacctgtcaaacgtctcccttccagcccgtcccccattcctcagctcctctttctcccccctcacccctctctactcttcttcccagcccttccttgcccccgactccaggcggccgcgagcggcggggggctccaagtccgagagaggcgaggcgagggggcgaagcgggcgggtcccacagcccgaagcgcgctggggccccgccccggcaccccgctcccgccctccgctgcgctccgcgccagccgccccggggcgcacggctcgctcccgagagtcccgctgcctgactgtcgcaactgccacctccctccggccccctgccccccgcccccgcctcggccccgctcccctcccacctccgcccccggctctgatttcttctcccgagcgagctccgcaggagacacaggcgctggctgccccgtccgctctccgcctccgccgcgccctcctcgcccgggatgggcccccccgccgccgccggatccctcgcctcccggccgccgccgttgcgctcgccgcgctcgcactgaagcccgggccctcgcgcgccgcggttcgccccgcagcctcgccccctgcccacccgggcggc

SEQ ID NO: 25487 - DNA, 2300 bp, Homo sapien
tctcggtctcctttgcacctctgtatttcacagacagtggaggtggggaagaaaagagaccccctcatcagagagatgccaaaggaaactaaatcagctcctcaaccaggtcagcagcgtttcccaaaaggagtccccaccagaatcactggggatgctagctagaaagacagacacccaggcctttccctggaaaggctgattcaacttcatggggcctggaatccgcattcccacaatggcccaccccaggggacacttgtgctgcatcaagcgtgggaaatgctagtgtgagcgcgtgatggggaataaggacatctgtaagctgattatgagtcccttccctgtgtcacgttcctaattctttctgggcctcagtttccccaacagccaataagaatatgactctccagcttgctggtgtcctctctcatcctgggctggtgcctgtctcctgtcttgagtctggtcccacccttacccttaccgcttacccttcccaaatgctagtcccaagctgtccccgtttctgcagcatggtagggagagtggggagggcagggggcagttggggtcaaataaggctctagctgacgcagtctgcttgctgcccctggctgttttcctgcagtccagccagactgctccccccccactgccccacccccacccccagcagcctcaagcccttaattcctgacagctgcggtggctgccggcagagatgagggggaaaggaggggggagtatgccgtcagcctgctgttgctcaggccgcccccaccacctgacagtctggggacaaggagggccccaccccctccttcagttccccagggatgggcaattccaggaatgggccttttttgtctctgagcccagaggctcccatagttttgttcctaagccagcaggggctctcttcagagagaggggcatgtttgtgtaaaggcttgtgcccattttacagaggaggatgccgagggcacagggcaggagcacgatccactatcagggcccaggctagcaccagaaacagacggcagagctgcctttcccctgccctctggctctcaggcccttgcttgggcccagcacacttgcactatatcgaggaggggcccagtgttcagttggggtggagggacaggaagatctcagcgagaagtagacctgagccaggaggctggtattagggacctcctagaggaccatgtgcaggtggggccagggagggccaggacaagactgagagtatctgcgggcacaggcaggcaacactcagtgttggggaggcagctgctgcgctgggagtcaggagagctgcgttcggttctcgctcttccgctaatttgctgtgtgacctctttgagcctcgatattttcttgtgaaataaaggggagctaaataaactatctcaacggccacttctagggttaaaagtctctctaacgcctcctcccaggacgtgccaccccgggcgctcctacgcaagcattttctgggggcctgacactgctgcctccccgggctcactgaggagacaaggtggtccccatgagccgcattccgcaaaggggcagaggaggtctccgtgagcaggagcaggaggcacctgtttaaggtcacacagcaaaggggagaagaaaccagaggctgccaaactcctctgcaggagcccacacctgcctcacaccaggcaggcctgggggaagtccctcctctggcggaggaggcgaaacacagaggccagcccctcccctccagcccctgcaggtgtgtgtgttggggtgggatgggggcgctccccagcagctgcgtctctgccaggcacacacacctcgcggtaacacatatcccccacacaacccagcgcgctccacacacaggcatcttcctgtgcacgcgcgcacagaccccaacacctttccctctgttgccctcagcagggacgctcccacccccagtccccagcggacgcagtggcctcgggactcgtacacgcctccacgccccgccgcgtgacgtcacgtggggtagagccctgagacactaaatggcgggggggtggggggaggaaagggaaggcggcagagctccccgagccgggacagtcacttactctacaggcagtggggcccgacacagacagcgccgcccccgccagccagcctcgcacgccctcggaagcgcaggctcccggcgctgcgctggagggttccccggcaccccagcctcccgtccccagcccgctgcacctccgggccccccttacccttgagaggcaccgggagttgtc

SEQ ID NO: 25488 - DNA, 2300 bp, Homo sapien
gataatagctctattttataggtaaggaaactgaggcacagggaggttaagtcacttggccaaggtcacatagctattagcagctagtaagtggaagagccaagatttgaagtaaactggtttcaggaattagttcttaactactaaacagcttgttctgtttctttctgttattttttgtttgttggttgtttttggttttggtttttttgtttgttttggcaggaaggggaggacagggctctgtgatgcagtgggtgaggattaaggtgggattggcccaggcctctggcttctcttgctgcctgccccctctctggtgtgcggaggctggttggagacttgtaccagaacttgttcctagctggtccattctcagatgcagaataagcaaaagatagcttgcatgtctgagaatgggaccctcctttgcaagtaggcctccccctgccacaggtccaggtgttcccagagaatggctcaggttggagcaccaagaaggaaggcagtgtggacaagccagtggccaggccggcctagccgcggcccccaagagtggcttggtcagggaaaatctgtgcctcctgaacatctggtggaaggtatctgcctcagcttgcccttccttctccatgttcaacactactacatgccagaccccatgcaggaccctgggcttccctctagcgtacctccaacagcctctgcagctgacctgggtgggtcacaggcaaggtggctgggtagcgcccatttctgagtggctttcagggatgtcctgtggacaagcaaggggaagctctggtgacccatttctttgcctctggagtctggtcattagggaggatcctatgctgtgcctaagatgggcacgcacccagcaggctatcttggggcagggagcattaggagctgaccgtctcctcttacttactctgctgcccactgacatctcctaaggcctggaatttcatcattgacaatttattctctttttttccaaaattgtgtacattttattttatgaaatatcattttatttatttatttatttatttcaataggtttctggggaacagatggtgtttggttacatgaataagttctttcgtggtgatttctgagattttggtgcacccatcacccaagcagtgtacactgcacccaatgtgtagtctttgatctgtcacctcacacccaacctttccccaagtccccaaagtccattgtgtcattcttatgcctttgcatcctcatggcttagcttccacttataagtgagaacatacgatgtttggttttccattcctgagttacttcacttagaataatagtctcaaattccatccaggttgctgtgaatgccattattttgttcctttttatggctgaggagtattccatggcatatttatactgcaatttctttatccacttgttggttgatgggcatttgggctggtaccatatttttgcaattacaaattgtactgctgtaaacatgcgtgtgcaagtatctttttcgtataatgacttcttttcctctgggtagatacccagtagtgggattactggatcaaatggtagttctacttttagttctttgaggaatctccacactgttttccatagtggttgtactagtttacattcccaccagcaacatcactggcaatgaattctttagcttaaatgttgccctcattctgtgggcttattttaaaattgcagataccactgtgagaggtaatagattaagtccctgattgtaaaaagaatgtgtttacctgatactttctgctctacagtagagatgtagacacacaaattctgagtttgctaaaggtgatgttaaagaacaggagaagggcgtacaaaaagcagagggctattgggaagcctccctcccaccccaccaggttctgtttgcagaagaactggcttctggcgtgatttctgcccttctttgactctgtttccttgtgccagactctcctgcatactgggcttcagtttctccttggaatgatgagaaaggtgggctggagaatggggtgtcaaggcccctccagagtccatgtgttctgggtctttaaccacaggtttccgagagagcgcttttgcctacgccatcgcagcagctggcgtggtgcacgccgtgtccaatgcgtgtgccctgggcaaactgaaggcctgtggctgtgatgcgtcccggcgaggggacgaggaggccttccgtaggaagctgcaccgcttacaactggatgcactgcagcgtggtaagggcctgagccatgggg

SEQ ID NO: 25489 - DNA, 2300 bp, Homo sapien
tcaacttgatgagatggatgcctagatagctggtaaagtattgtttctgggtgtgtctgtgaaagtgttgccagaggagactgacttttttttttttaattttattattattattattattattattattattattttaattgatcattcttgggtgtttctcgcagagggggatttggcagggtcacaggacaatagtggagggaaggtcagcagataaacaagtgaacaaaggtctctggttttcctaggcagaggaccctgcggccttctgcagtgtttgtgtccctgggtacttgagattagggagtggtgatgactcttaaggagcatgctgccttcaagcatctgtttaacaaagcacatcttgcaccgcccttaatccattcaaccctgagtggatacagcacatgtttcagagagcacagggttgggggtaaggtcaccgatcaacaggatcccaaggcagaagaatttttcttagtacagaacaaaatgaaaagtctcccatgtctacctctttctacacagacacggtaaccatccgatttctcaatcttttccccacctttcccccctttctattctacaaaaccgccattgtcatcatggcccattctcaatgagctgttgggtacacctcccagacggggtggtggccgggcagaggggctcctcacttcccagtaggtgcggccgggcagaggcgctcctcacctcccggacggggcggctggccagacggggggctgaccccccccacctccctcctggacggggcggctggccaggcagaggggctcctcacttcccagtaggggcggccaggcagaagcgcccctcacctcccggacagggcggctggccgggcagggggctgacccccccacctccctcccggacgggcggctggccgggcagaggggctcctcacttcccagtaggggcggctgggcagaggcgcccctcacctcccggatggggcggctggccaggcggggggctgaccccacctccctcccggatggggcggctggccgggcggggggctgacccccccacctccctcccggatggggcggctggccgggcagggggctgacccccccacctccttcccagatgaggtggctgccgggcggagacgctcctcacttcccagacggggtggctgctgggcggaggggctcctcacttctcagacggggcggttgccaggcagagggtctcctcacttctcagacggggcgtccgggcagagacgctcctcacatcccggacggggcggcagggcagaggtgctccccacatctcagacgatgggcggccgggcagagacgctcctcacttcccagatgtgatggtggccgggaagaggcgctcctcacttcctagatgggatggcggccgggcagagacgctcctcactttccagactgggcagccaggcagaggggctcctcacatcccagatgatgggcggcaaggcggagacgctcctcacttcccagacggggtggcggccgggcagaggctgcaatctcggcactttgggaggccaaggcaggcggctgggaggtggaggttgtagcgagccgagatcatgccactgcactccagcctgggcaccattgagcactgagtgaacgagactccgtctgcaatcccggcacctcgggaggccgaggctggcggatcactcgcggttaggagctggagaccagcccggccaacacagcgaatccccgtctccaccaaaaaaatatgaaaaccagtcaggcgtggtggcgcgcgcctgcaatcgcaggcactcggcaagctgaggcaggagaatcaggcagggaggttgcagtgagccgagatggcagcagtaccgtccagcttcggctcggcatcagagggagaccgtggaaagagagggagagggagaccgtggggagagggagaaggagagggagagggagagggagagggagagggagcggagactgacatttgagtcagtggactgggagagaaagtcccaccctgaatgtgggtgggcaccatccaatccgctgctcggtggctggaacaaagcagtgggaagaaggtgggataagctggcttgctgagtcttctggctttcatctttctcctgtgctagatgcttctgttcattcctcctgcccttagacatcggactccaggttccttggcctttaaactcttggatttacaccaatggtttgctgggggctctagggcctttggccacagactgaagcctgcacggtcagcttccctgcttttgaggcttt

SEQ ID NO: 25490 - DNA, 2300 bp, Homo sapien
ggaaggggagtaggaccctctgaggcacctgctttggggtccctgaagcagaggaggaaattcttggttctgaccaagaggacaataggaggtcagagctgggccgggaatagggtaccacagtggtgacactctgtgggtgctgcttagaagacgtggtcctaaatgaccttaacaataggccttatgccagtgagggactcctgggagcagcgctggaaggactcatgtgccatttagatccacatgcccagtgtttccgccagtgcaactcagtctctacagggcttgtccttaactaccggtgaactgactattccttggttggcagataaagagtgactcagaacaccttgtaggaggaagtggggccaattacaggagctgaaaagagggaacactttcaagaactatgaggagaatgagtttgggaaggtcagcttgggctgcaagaaaataaagatcagatcctagggagcagagataccctgttgaaaaagtgcatattgggtgctgagttagggagaaggtacaaggctgcatgtgcacagtggtaaagaggaggggaatggagacaggcagaccacaggcctccaggagggtgtgagtgaccaggggctgtggaatggctgggaaattctgtacctctggtagctggaactgcagcccaagtggattctagaacagcctatctgcagtgacacacacacacacatatatgcacaaaccaaccctgacagcagtggatccttggagctatgtttgcggtctgtgaggagcatggaggtgactccaagggcaatccttagaatttactgaaatacataggcaggggtttggctccacatggaacccatatgcacctacaaggtccacttacttaagaagcctgaaggctcttgtgctgggggagccacagagagcaggctccaagaagggtggacatgatctaacaaggcagatagaataggtccagaactagctgtgctcaagacctgcaggtaaggcctggggagtccaaaatccagggcaaagggctgatgggtactcaggaggtaacagacagacccagagagaagtggacaggacccagcctaacagcttgctcctgggagtggggacagctggaaccttacctgcaggaagcatttaatgatgaaacccacctcaacctggacccagggctgggctggaggttggtccaaccctcttgggcttccgtccacacaggaggctccgttcactatccaagactgggtagaccaagtgatccaatttctagcgtttccccagggaccaaccttatccatcatccacccaagtatgagatctgtgtgtgttagtggggacaaccaaccgagaggagctgcccagggaccagagccaagggtctgccccacaggctcagttgcagagaatcaggacggcaagcagaagcctcaggggcatatttgagaccttgctgctccccctctccccctcaagctggaacccccaagaaggcgggttgtgacctgcaagaaggctctgccaggactcccaaacaggcagggcagaaatgtgcctgctgcagcccccctagcgacctggggggtggggggcgaggtggggtcgcgaagaggaaacagacctgacagtcacattggaggagccagtgcaacgcgacccatctgggacctgggcatccggtgagggcactcactgctcacactggccccccacacaaattcaaaggcagagggaaggagagctgttcccatggtttatctgctaccgcgacccagtgcatcagaacaagctggtccaggccctaggatccggaggaggcaggagcagccaccaccccttctcaactctgaccctgaggaggccactcgaacgacgaccaccgccttccccttcctccgctcgggggaagggaaaagactcagggcggagggtggggattggggcgggacttgaaattgaagtgcgagagtctattggtcattggagctgcccatcaggagtgcaactcgggagcggattggccgcgtgaggcggggcacggcgcgacgaaaaaaggggcccaaggggtggggctgacgctgcagctggcgcagctcaggattagagcagcggagccgcctagcagccaccttcccccgccagtccgcgcgcccgggccggggctaggccccccaccgccgggtcccccggggctgcagtagcagcggcgccgcccgcggctcccgctggggcctgggcgccggccccgctctgcaggatgggcacagtgctgtctctttcgcctgcctcct

SEQ ID NO: 25491 - DNA, 2300 bp, Homo sapien
agacatattcctaaagtcacatagctagtagctagctgagatcttacaatttgaaattcaatacattcttttgttacttcataaagaaacggaggatgttctgagtataggaggccaactcatgtgatagtggttgcggagccatagccagtcaagaggcttgttcttggtgaagttcaccatgtgggcccaggacaaggactgggctggcgtggaaaagtaagcccaggttcctttccagggcatgtggagggcatctgatggggatgagagggagaggaggcaggtgcttgctttgttttggattgttttgtctgcttgtttaatagaaagcactgatatatgtagcaaggtacttaaatcgttatttaatctttatagcaactctatgaggtaggttaaatggatattatcattttacagatgaggtaattgaagcacaaagaagtaaagtaacttgaataacgtcacatagcttgcaagtgtcagagcttttaaaccctggaagtccagcccaaacctccaaaccactaagctatgttgtcttttgttttcaaagaagggtatgctaggaaagaaacagcaaacaggatccagtgggagagaattctcagaaacagaaaaagttagctggggccaggcacagtggctcatgcctgtaatcccagcaatttgggaggtcaaggtgggaggatcatttgagttcaggagttcaagacaagcctggccgacatggtgaaaacccatctctactaaaaatacaaaaattagctgggcgtggtgatgggtgcctgtaatcccagctacatgggaggctgaggcaggagaatcacttgaacccaggaggtggaagttgctgagagccaagattgcactagcctggacgacagagcaaggctctgtctcaaaaaaaaaaaaaaaagaaagaaagaaagaaatattcatccaggcacagtgtctcatgcctgtaatccaagcactttgggaggccaaggtgggagaatcatctgtagccaggagtttgacgccagccagggcaacacagtgagacccctatctctacaaaagcaaaataagattaaaacaagctgggcatggtggtgcatgcctgtagtctcagctacatgggaggctgagatgggaagatctcttgagcccaggagttcaaggttgcagtaagctatgatcatgtcactgtcctccagcctgggcaacagagtgagactctatctctaaacaaagaaaacaaaagaaataggaaacatcacagtcaatgggacattgaaccattcacctctatacatgacatgcgtcatcccaagatggaggagtgtcatggagaaatcctgctgaccaaacaaaagtaggaaatgccactcaagtcaatatataatcagagccccaccccacctcagagtacagtgatcttctccaagcctgcagcgcctcagttaggaaagtgaaagcttgcaaaaggcattggggcaacaaaatagtctctatttcttatcagggacaaaatgtacttccttatcaaacagagacctaaccaaggacactcataaggcaagctgtcagtttgtcctttataaccaattgtaggcggtgtgcacctgtactgggcaagcagcaggtcatgtttacatgaggaagaagctatccaggaaggccagtaagaggggatctagtgggatggtaaggatttcagttgtcaggtcatgggctggcccagccacttcacttctccaagccttggttccctcatttgaaaacagagataaccatccccatctggtaaggttgtagccaggtcaaaggaaataccacctgtaaaacattagcatagggcagagcctggcagagtcatgttcaatgagtggtaaggcatacttttatcatcagcagatccacttgacatggattataaatagctaaagaaacaagttcattttggtgcatttcaaagacatattaaaggaaaggtggaggccagaagagcagaaggctctgagaaaagtgcatcacagtggcccattatgatgtctgtctatggtcacgtgagctggcatatgagagtgctctgtgagcctcagtgccttcagtggcatcattgcactgtgactgtgcaggtcccaaacagtatggacatgaatgtcctcaagctgcatgttagcagggcttctaattccatctgcaagtgatagtgtgtggagcttagttgcacagagcgcatgttactggaggagatatgggtctgtgtcatcctgcatgggaatgatcctaaaaacaaagtgatcagt

SEQ ID NO: 25492 - DNA, 2300 bp, Homo sapien
ctttacaaatgaggagatgcaagtacagtacagaggttatgttacttcccccaaagtcacataaccaggaaatgggagagtcaggagttgaaactagaacccaggcaaactggcttcagagcccagcaggccacttccccactgcttgctttggggagcaggcaatgagcaaagggagatctggaatctgcccttgactgagctgctctccctacaggggtatctgtggttgctgggaagaatcagcaagatggcttcaggaactagaagtgtgactctggaccttctggtcctccattcattctgggcaggctggccatctgcagaaccacatgggaccagcgctcagcagggtaggaaggggatgaaggggaaactgccaaggactctcctgttggcttccctagctgtacttgcagcaggaggggatggagaagatcaagactcaggtgggtggagatgactgccccccatgcacacatttcctggtgctccaccccctcagcaaatgacttctgggtaagactgagggataaagcctatactgttgatccttgcccagctcacagctgggatatttgggtagacctcactaggaccctctcctttacaccttagcctcccactgagagcattaagtgggcgaattttgatgcctcccagctttcccagctcttacctcctgcccctggctattttctgttcttacctcctgctccttgttttctgtccatagtgggtgggggaagcagaaagaggaatgagaaggagagggattgggatcttgaccccaacttcaaggccctcaccttctgtggagccctgagtttggtccacagggaacattccaacctctagtctttgctcccaccagattccaggtccacatcctgaaggcttcatccctgtcccactaggatcctcccaggccctgggatccctctttttccctccacactctgcctcccactcttctccctggctcctttgcaccctccacgagcaaagatgaacactccagaagttgcagcaaatgagggtgaacatgggccctgtagaaccccagaagtaggagtttccagccatcctcaatcaggcatcccaggaccaggcacttagcaggagacctgcccattcccaggcctcctccacccctgggctcaagcagtgagagaggactttgagaatgccagttttgacagtacccgttccatactgcaaggctgcagaaggtgggcttctgggctggagcctcatcttcagccagcatcctccttagcctgcctctccagagccacgaagccccataggtacccagagagactccaggccacttgggaaccacatcaacatctttgcatgagttagaaataggaatccttttcttggagtggattccagccttgtacagtgcacaaccctgtcttaacccctccacctctccagcctcgttcagggatagccagaatgggagtagtggtgagggtgggtggcagactgggaggacaggggatggggaaggatgggagcagaatagttgtacagggaagtagcagggggctcaggaacccatcagggaaagccaggacagattctcaacatctttagaggccttcagcagtccaagccactactaatttatggggactgaatgaatgagaaaaggaggggagggagaaggatgagagggagagagaaggctggaggggagatgagagtcggagagaaaagcctaggaggtaaagagagacctagaagggggcggggaggacagaagagggggccacccatcataagttgccaggagagatggcccagcaccaggcctgaggcttgggggccccagaaaggcaggaaacgggccaaagcaagaaggagacggggaaggggttcgggtctctagggaagagcagagagtgggagaagaggaggagggagcggggatgcgggcagagataaagggagcaacggctgcagggccgggcgcgcagcgacaggcgagagggagggaagcggaaatttaaaagtgaagatgcagataacgcagcctggagacgggaacccgggtggggatagagggagggagggggaggagagtgagcggcgagtggagcgggagccgactggaagaagggctctagggagggggctgtggctgctggggtccgaggtggggccgggtacaccagccccatcactgtttgcagagagtcagggaggcggaaaagacacgcgctctaggctcccatcagggcacatggcccgggcccatcccccgcgcgtctccccggctgcggggc

SEQ ID NO: 25493 - DNA, 2300 bp, Homo sapien
gctacacccataaacacaagatgaaaaagataactttacagcgtgataaatgctagaaagaaaaaggctgatgtgatggatggaagggtgcctagaacagcatcactgaggaggtgacacaggagccagccatgccacgatcttgtgaccaagacactccaggtagctggaacaacaaatgcaaaggctctgagatgggctgagtatggaacactgggaagaaggcttagaaggcaggctggtgtggcaaggcttctgggagctggggtgtccgcagctggcctgtgagcactttttggcacgggagcttcaatggacagcggcggagcacaggctttggcttccaaaggtctgagctcgattcttgctctgaaactggctagccatgtgagtttggacaaggccctgcacctctttgaccctccgcttccataaccgtacacacaaacctaactcgctggactgttgtgaggacccataagggaagcatgtgactcatggaagcaacaaaatattagctcccttctcactcgcccctctcacctctgctggaatatccccacccgcacccaccaccattaaggaaaacctacaattttgcaagaagcctttgtgtctcatttgctgtggttagaaaattccactgcaagtggtgaggaaatttcctacctggagctaccccttgggactcccaacctttttggagctcccaaccttttcctcttccccctctacctccccttttctctacaccccccacccccacccccaccgccgccttttcccagctcactctgtcgcccagactggagtgcagtggcttgatttcggctcactgcaacctccacctcctgggctcaagcaattctcccatctcaggctcccaggtagctgggactacaggcgcatgccaacacgcccggctaatttttgtttgtttttgcagagacggggtttcaccatgtcgcccaggctggtctcaaattcctgggttcaagagatcctcccacctgggcctcccaaagtgctgggatcacaggtgtgaaccactgcgcccggccctgggagatttcttagctgtgacccctgcaccacattccaaagccctctgggcctccacttcttcatctgcgaaatgcaggacaataacagtatcttcctagcaggtcagtgttagaattgatggagttcacgcacccgaaagcctgagcagagaactcggcctgaactaagcgcttcatcctcagctgctaactctcaggcagacgtcgaggctggaacccttagagcctggagctttgtgggagacccgcagcggcaccggttgagccgagctaaagcccaacattcttcctacctcccgcggcgagccactccctaggtggctattatgcctaaacactgagtaaaccgcgcggccctcgggcggtcgtttccagcgcccggcgccgccgcgtggcgagtcctgaccaccgcctcctctccttcccgggcccgaggacaccccgggggcgcggcgcaggatctgggaacgcacgcttgggaggaaaagggccgcgatggaccgatcccccaggaaaaagaggactgagcacatgaagcgaatcctttgggcagagccctctctacctccgccttagcatcgcccaaaagagaggcctggactagggccgaggaaggctggcgattagactctgggaagaacttccgctcagcgagtcagcagcgcggtcttagcccgaggcccaggggaggccaggtcccttcgtccccgagggccgggacagggagggcgcgttctgccccgaggcctggcgtgccctgcctggctcaggctggaaagaaagaaagcgcggagtcagcctgggctgcggcgggcgcggggtgcgcgcctcagcactttctgttgtctttcccgcgggctggggccacagcggcggctgcgggagaggcctcggctccccagcggagaccagagccgaccgcagcctgcctgctgactcagcgaccccacccccgagggaaagggtgcggacagggggacaaggcccaggtataaagctcggcccgcccggccgcgcgcagcctcgcagccggtccatttccctcgcgtgccgcgctcacccacccggtgaatgccctctgctggggtggggaagggaggggagcgcgggaagactgcgagcccctggcagccgggtccagagctaggccgggtccagcccccgggttcttcatccgctacccaggttgggcaggctgtgtgtggctcgaaacggggctcttgagacgctgagcgc

SEQ ID NO: 25494 - DNA, 2300 bp, Homo sapien
gaccccgccctgtggcagcggagcagcggaggagggacctggatgagaggccagatccctggtaatggccagcaactgcagtcttaggatggatagtgggtgggggactggggaaattaggccctggggtgaaggggcagtaattctcagtcaccaggaaagatccccgcccactgggtggctgcctccttctcaccaccctcccctcaaggctgtgtgtgtgtgtgtgtgtgtgtgtgtgtgtgtgtttgggagggggtcattccaagcagagatctctttgttgtgcaaacccaggatgtggaatcctggcccctgacatggttggggagggaaggggaagccctcaaagacacagggaaggtgcaccaggaccatgccaggcccctgacaggcaaatctttcagtgccaggcagagtaaagggctggcccaggacagagcctggtcaggggggccaggagagggctgcacacaccctagcccaggacccaaggaccttcccctgcccctggggctgctccacgaagagccctgctgtagtccaccctctccctaaacctgcctgggatctgtccaacgccatctcgcccctcccccttctctctctgtgccacggactcgggctcagcagatcctttggggcctctgggtagttgggtgacataggggcactagagcgggtggtggtggaggggacaatccagcacctctaggaacatgcagtttggagggacttctgaccctggttcccatctcccggggctgcctctgcctgagctgagggccacctacctaccccaccccagctgatggaagcgaggatgtgggattctgaggtttgaggaaggtggtgaaccgctgtgcctgggggcttgtccttttcagtcagtctgactgtctcagacgtttttagactgaaagagggaccaagggagtgtcagggagtgacatctcaggatgtcagcagcaccacagagatccgaggagtggatttgaggctccatggtggccctcagcttcccccgcccagattttccacacctcagccttggctccaactccgtgagggcctgcatcttccccagcatgaccaggagcccaggaaccgggacaggaggctggggagggcctagcccctgcgggaggccagaccaaccgttcactgagcaaatgggaaaaccaagaggccgggaaatgacttgcccaaggccatagaagtcgcggggacagaggcggactagaatccgggtttccacctccagaagggtttctgttctgggccacggcccccttcgccacccgctggagccggctcagcccgtattacgacgcagaatggagcctggcagcccagaagctgcgggcagggcaaggcagggcgggtggggccggatgggagccggatctcccctggagcggcgcacagcctctcccacccgtacggttgagatggcggtggcggtggcggcggcaggtgcctgcgtggcgatcaggccggcccccgggctggtgctgagaggccgcccctgcctcacgcgagccgaacgaacaaaacgctcaggtccggtttgtgcgaggggctcgtcgcggggcgggagcggagggcccggggcctggcggtcgccctcggtgatctcctggtcctggtcttccgcgagctcagtgctgcacagcgccccgctagcctccgccctcacctgaacgcatctgcggctgacacgtcggcggccgcggcggccaccgcaggtgcgcacctggcccgcccctcctttcccagccaccctccgcccggctttcctggcccctccgcccggcccagcctagcttggcttcgtccccagcccacgccttggagcttgtcccggagcccgggctccgtgtgctcttatactgcctgttcagtccccgcccccagacacacacactcacacctgtccaggcgcccgtttgctcggggcaaatattgactcatggaggcggagcgctcccccctcccccgcccgggctctgagaccggagcttctccgaggccttggtggcgggggcggaggggagggtgctggggaccctgggcgcctctggaacaacaccagatgtcacttttccacccacctgcctctgggagggaggagccgagaagcagaggacagaagctcccgggcgggggttaggaggaaccgagaggtgggtatccatcctcgtctgaggactgattcacagtgggagtcgcttagcagggtctgtggcccgaaatccagtggtgacctcgacccgccccagcctagttcctggccctcc

SEQ ID NO: 25495 - DNA, 2300 bp, Homo sapien
gaggccgttgacaaccaccccctcggtacttgggcctgagctgggactggggccaggggaggtgggaggaggtactggttaagaccggttaacctgctgggcacactggcacgcgcctgtagtcccagctcttcaagaagctgaggtgggagtattgcttgagcccaggagttccacgctgcagtgcactatgatcacaactgtgaagagccactgccctctagcctgggcaacatagcgagaccccacctctgagcctcagcttcctcatctgttaaaaggggcaccaggtggcacctacctcacagggctgctaggtggggaaaagtgcttagcaggtgccaatgacacaaagttaggtgtggtccctctgacccaggctgggaggaggggctccactccctgtttcctgcctcagggcctgctgtcctcccctggtgcccagggaagggtatctacaaaggagcaggaggaatggctgggcctcctctacccactgaccctccggcatcatccctgagcagctctgcagctggaccgaacagaggggagcatgccaccccggtcccaggacaccatctgcctgactgcctgtcccaagcagcggtcccagtactcctggaccatcacctactctctcctttcccacagaggtacctagactgcctggcatagagagtcggggccggggaaatgcaggatgaagggggagggctgtgtgaggcagtggatgccgagcgtcaggcagagctggcagggtgagtggggtgtgctgaggtgtgcctttggtgtctggcataaatgccacacaccagacatgtctgtccagatgagtgtccatatgtgcatgtgcccagtgcaaagagttaggagctgtgctgacttattgtgaaatcttagcccccaagcctcgctgggcctcatcttccttctccgtaaaatggagtacttactagcctgccccaggcaggttggaaggagtccagggcagcacagagaggaaattgagagtgtggactggggccagaggctctggaactggatcctggctccagcacttgtaaccttaacgagttgcttcacctccctgtgctcagtttccacatgtctcaaatggggataataagctgggcatggtggctcacacctataatctcagcactttgggaagctgaggtgggaagattggttgaggccaggagttcgagaccagcctgggcaacatagcaagaccccatctctacaaaaataaaagtattagctgggtgtggtagcatgcacctgtagtcctagctacttgggaggctgaggcaggaggattgcttgagcccaggaggtaaaagttgcagtgaataagctgtgattgtgtcgctgctctccagcctggcaacacagtgagaccctatctcaaaaatgaaatgaaattaaataaataaataaaaatggggatcataatgtcacacaggccagaaaagggaagtgaagtcaatacctgccaccacttgcatgaatcttgaaaacattatgctaagtgaaagaggccagtcacaaaaagccacatattgaataatttcatttatatgaaatgtccagaataggcagagagagacagaaagtagattagcggttgcctggggagggtgaatggggagggatggctaattggtactaggcttctatttgggatgatgaaaattttctaaaattagatagtggtgatggttgcacaactctgtgaatatacaaaaaaaaaaaaactgaattgtatgtgttaaaagggtaaattacccagtatataatggtgtctcaataaagctgttattaaaaattagtttgaaaccaaatcacggtacacattaagtgcaggcatgtgtataaggcactgaggacaatgcccagtacacagaaagtgtcagacaagggctggctgttgttggaaatgccctagagcccgagaggggtccactgctcctgatgagggtcctggggccaactgcccaggactcctgcacctttggcctgcatgccccctccagggaaggtgggaggcaagcccacttctgtcttcctcacccccctccccagataacaaggctggggagaagcaggagctgtgctgcgtctccctggtggccgtgtaccccttgctttccatcctggatgtcagctccatgggcagtgctgagggtatcacccggaagcacctgtggcgcctcttctctctggacctgcttaacagttacttggagcgtgaccccaccccctgtgagctcacctacaaggtgcccacccggcacagg

SEQ ID NO: 25496 - DNA, 2300 bp, Homo sapien
ctggtggccctgtggggaatcatccgtgactacctggagatcccagtcccactggcatccagtgatgctggagttctgctcaggctgccagggctctgggcctgtagcctggccctgagagtaccacctcccttcagtggaactttgtctaagatatccttggggaagctgataccccatctcctgtgtccaggccctgctgtgtccctgcagcactactgtgtcaacttcagctgggtcaaccttggggagcgctccgagcagcccctgtggattgagaaccaatcggactgcacggcccacttccagtttgccatcgactgcttggagagtgtctttaccatcaggcctgcctttgggacgctggtgggcaaggcccgtatgaccctgcactgtgccttccagcccactcaccccatcatctgctttcggcgtgtggcctgtctcatccaccaccaggtgagtcgtggggagggcatgaggctgagggaggaggggctcccctggggcccactgatgatgacaaggcttggtgggcacttccctgtattctggaacttctagggctgtctgcctggtggtctcccactcctgggccccagccctggcttttggagccagtgtgcagcctgggcacagggcagatcactctgtgccagtcttgccctgctaccaggccaggcgctttgctgctgctgtgctcatgggctgggagagggaggcttggactcgcagcctcccaccctcccgctgagccctgcaggctttgccttttctttgccttccatgacttcacagactaattcttccctggagccaccccacatagcatgcatagggcagagagctttcaagttagaccccaaccctaggtccctgggcatgatcagacacattgtgccctgaccagcaggtgcctggccaagatggcaaacggggctgaaatgtaacccatgatccctccctgagctggtgcccaggcttgggctgtgtctgtgtacctggaggaatgggtgcctttctctaattcttgtgacagtttagtatgggctgggggaggccttggaaatggaggaaagaacagaagcccagagggaggcctgatgaggcagccccccatattctcctcccttgggagggcctgaattctagtttggcaggcctctgggctggcagtagggtgggtgggagaatgcccaggggccatggcagagaggaagggtgggtaatggctgagtgtcctaaggaccggggtgctctctcctgaccttccctggactcctgctgtgccctggctgagccagaccactgctgagtgcttgctcactggccacctggagcttctgccccactgcctctgttatcctgtctgcccagcttctgtcctcagttcaacccccagcaccccccttgccctaccacccctcccatgccccaccacacacagacaaatgtcacaggacccactgttcctggacctgatggggacctgccactcggacagcaccaagccagccatcctgaagcctcagcacctcacctggtaccgcacacacctggcccggggcctgacgctctacccccctgacatcctggatgccatgctgaaggagaagaagctggcacaggaccagaacggggctctcatgattcccatccaggtacagtgccctccccagctgcatatcccttctctagtgattcttgggcaatcccatgcccccagggtcccatgggcaccattagtagtcagggcgactggtgtagcctttctagacaggagtgtacccaggaggggcaacagcaagaggaatggcagttgagccctatccacctgtctttccccatgcaggatctggaggacatgccggccccgcagtacccttatatcccccccatgaccgagttcttcttcgacggcaccagcgacataaccatcttccccccgcccatcagtgtagagcctgtcgaggtagacttcggtgcctgcccagggcctgaggcccccaaccctgtacccctgtgcctgatgaaccacaccaagggcaagatcatggtggtctggacgcgaaggtctgactgccccttctgggtgactccagagagctgcgacgtgcccccactcaagtccatggccatgcgcctgcacttccagccgcctcaccccaactgcctttacacggtggagctcgaagccttcgccatctataaggtgtgtgcacgcaatgagagggaggaatgcggggtctctgctaggagcctgagtggcttggtggggtggcaggaagtgaccgagggca

SEQ ID NO: 25497 - DNA, 2300 bp, Homo sapien
attccttggcctcttcctgccactccccacccacatttcctcaaaatactttttccacaaaagaggctctaatgtttgagaccaagacaacataggtgcccagctcccctcagagtctgacgtgggtgccacggcctggccctcccctcagcggttgtgttgggggtggctgagggtgggcgggatgtgcagtccctgaatgccactgatgggtgactgcccctgccccgcctcacactgcagaaggagtacatggaccagctgtggtttgagaaagcggaggggatgttctgtgtcggcctacgggccaccctgccctgccacaggctgatctgccgcccaccatccctgcagctgcccatgtgtgctgtgggagatacgactgaggcctttttctgcctggataatgtggggtgaggaagaggctgaggtgcggcggggagagcaagagctgtgaggagggtgtctggaagcaggagagacaggcatacccttgtcggggtagggtagtctgaggttctgcccagcatccctgacttgctactgcaggagcaggggccgggagcccagtgccctgacctgccccccacccccagggacctgcccaccttcttcacctgggagttctccagcccattccagatgctgcccgccacggggctcctggagccaggccaggcctctcagatcaaggtgacctttcagccccttacagccgtcatctacgaggtgcaggccacgtgctggtacggggcgggcagccggcagaggagcagcatccagctgcaggctgtgggtgaggcccaacctcccaccgtccccagactggcccctcctgcaccttctgggtcctccaggcctcagtgtcccccacctcccatctggcctggcccccgcctccaccggcctcctgccctcccccaagcccagaaggctttgccttttgtcttccatgatgttacaggctaaattttccctggggccacctgccttcttcgaggggctgttcagctggggccacagaggccctggtgggttcccccaagactcccccatctctgccccagccaagtgcgcccagctgctggtgagcataaagcacaagtgcccggaggaccaggatgccgagggcttccagaagctgttgtactttggctctgttgctgtgggctgcacctcggagaggcagatcaggctacacaacccgtcggcggtaggcaccaggcaggaggggcggcaggactcacgcccccaggattggaatttcctaaaatcaccgccttgcagaatgccccccctttctctccatgcctttggccccaagcctcatgtaacccatgtcagctgtcaacaggtgtgtccttctcctcagctgggggctgggctggggtataccctggctccccagagccacgagcagccctaagactgtcctgaccccaggaccacagttagctgtgatggtaccctggggagaattaaaaggtgccccctttgggcaggcccagcgcagggcacatgactcggtcccttctctcctcctggtggaggcagtctggccagtggggcacaggctggatgccagctgcccccacccccttggctaggcacgccagtacaatgcgtagactgtcccatcatacagtgctctgctctgtgacctgaccctttgtccttctgcttggccacacaggtaaatgcccccttcaggattgaaatttccccggatgaactggccgaagaccaggccttctcatgccccacggcccatggcatcgtgcttccgggagagaagaaatgtgtgtcggtgttcttccaccccaagactctggacaccagaactgtggactactgctccatcatgccttctggctgtgcctccaagaccctgcttaaagtcgttggtttctgtagaggtaccggtgaccccaggggcctcccctggggacaggagcagcccctgctgaggattctgaagagctccttccctgctcctaggaggcggggccaccttgcctcagcctgggtgtctgctgccccctggtggccctgtggggaatcatccgtgactacctggagatcccagtcccactggcatccagtgatgctggagttctgctcaggctgccagggctctgggcctgtagcctggccctgagagtaccacctcccttcagtggaactttgtctaagatatccttggggaagctgataccccatctcctgtgtccaggccctgctgtgtccctgcagcactactgtgtcaacttcagctgggtcaaccttggggagcgctccga

SEQ ID NO: 25498 - DNA, 2300 bp, Homo sapien
tagaaaaggtatttgtatgtgtgtcgaagttcaaatcatggagtgtgcttttacctttattattcctcacaccagcttccaggccaggaggatctgaggccgtctcccttccatccttcctcccttctcctacatcctgataatcaattttctgtattgtcacccagccttgaaccaaacagcaaaccctccccagtgattttttttttttttaagatagagtttcgctctgtcacccaggctggagtgcagtggtgcgatctcagcttactgcgacctctgcctcccaggttagagcaattatcttgcctcagcctctcgagtaactgggattacaggcatgagccaccatgcccgactaatgtttatgtttttagtagaggcacggtttcaccctgttggtcaggctggtcttgaactcctgaccaaactcctgatccactagcctccacctcccaaagagtgggcattacaggtgtgagccaccgcacttggctgcctctcccatgatctatttttgggtccagggaaaatatgatcaacaggtcccaggacccattattccactggttctaggctcctggaaagggagagtttcaaagcaaactcagcttcctcttttccctcctcaggctcaatcccttgtgaaggctctttccatgtgtgtgcctccctgggcaaagtccagcacacaggcttctccctgggagtccactgatgtcagctgtggtcactaggcatcagggcttctaggaggcagctagacgcttacagaagcagaggctacaggggccctgctaagaggaggaaccattccctttaatttttccaaacccagaatccaccattgagcaggcaagagctcaggaaggagactccccggtgaagaggcacgaggacgcctttagcatgagctgtgcttcctccttggagttttcccactgagattcctggggccaacaccaaaccctgcccccaaagtccctatttcattttcgcctaagaatgaaccagttcctttccttgtccttaaggtccagctgagttaggctgaccatttcaaaaagaatttggggaaaaacaaaaaggaaataattatagaaactacaaacagcataaaagtcgtcatgtccaaagtgcaggtttcagattctgagaatcccattaaatccagggaaaagctcactgagttccacattctttgattcccggaaaactcttgatcctgctggcgtaatttaccaggcgccctgcctgccccttccctccagccctgccagtctctggccatgtgatctcccaggccagctcaggccactttgccatctcagtccatctttcacctttcacaagtcaactccaactctcccaaaatgatagcttattttctgtgtttacccctagactcactaagctctctccccctagtcacatccccccttccatctgaaaggaaataggttcactgtcttgaggagcaaaacatccttagttacccaagagtgaactttgagactttcagcttcacctactaaggagtcttcacaaaataggacccttcctccaacacacataccaacaaatgaaccaatgggcttccgaaagtctacattatgtataataattcctttatacattaaccttccgatcccttcaaaagagttatttttcttgttgctgaccaagaagaaatgccgggagaaaacgcagaggacgcattccctctcatcagcaaaagggttctatttgcaaagcaatattcaaataagaaataactgcgggctgcttttaagttaacaattgcaatcacagagaatgagcttctgtctctatgcatgtcagagtgccaagcccacagagtagcttcctgtgaatttggtcgtcaattaaagtcatgattgctggaacgtcacgacaactaggaggctctacattaccatgtcgcgacaggtagaagcccacagttactaccagcaggaaaagtcagggaatcaaaactgaatataggaaataaaattgggcggtgccttcgccttctacgaatcttgacttactcgggctgccgtcgttgccctgggatatctgaagacgccgtttcctgcgcgtcctgtatctatggagacggcaatatggaggcgatgtaagttctgagcgttagtcccaaggtcccagggtctcagggagcggcgcgagtggccagggaaggtatctgtcccgggagaccctatccttcgggaaatcgtggccagaggtcccctccatgcccttcagagagccccatgggactgagtcttgggcga

SEQ ID NO: 25499 - DNA, 2300 bp, Homo sapien
gagaacatgcggggtggggagaaggtgcgggcaaaggggaggaaaggaggcgatccattttgtttccacattgcaggcaccactccactcctagtggagcaatcctaaatttctttctgtgggcctcagtttccttttctgtaatatcaagcgcttagattaagcactctcttgagtctcatccaatcctgaatttgtgtttataaaaccgatccagagagtgtgagtaaatctgtgaacagctacttcagccccgaacccagtggtgttgagtggactggtcctgcacagagggacaatgcacctgcatgggcaaaaactggggctgggccagagtcatgggcttcaatccctgcttttcagccactagcaagttgttcatcttctctgaacttcaatatcttcattcgtaaaatgtggacagtaatagctcctttggccgtttcgagtttaaattagataatgcaagtagaagacatagtacaataatatctaataactaccatgttcaggaatataagtaccaataaaatggtacctattgtattaatagcatttgagtgagaatttttaagtctttttatttctcatcttttcatttctacctttattggatttgtagaatctattacagtcaaatcatatagtttggtgttgtggtggtgatgttttttgtttgctttttaacacacttgcctttacttgttttggcagaagggatcctaattcattcagctttctcgaatgtcatataaaaacacataacacatgttcacgttcctagttgtttctacatattctctgctcttttagatgtgtaatatagaaccaagtaattatttagcagttccggtggctttgcatcattttggcattcataccaagcccccgttactgagatctttgctgcccctctttaacatggtcagtcggggttcctcggtattctgttgacgtcaccattttagctacccttctctgcatattgacctatccctttgcaacttcatattgtcactttcaacagtgtttccaacttaaaaccccctatttgactcttcaaaaggctagactccccatccccagtttgacaccgacaggcaggctgtgggatgtgcaccaggttgatacagaacccagctccaccaagctgaaagggcgcgtcgcccgggccagggtggggcaccaggttatgagtggcctcctgccttttgggtttgcttccccgcaggggacaccgtaggcggctgtgcggtccggccactgccccccgcccctcgcgtccggccgcgccgtgggttgcggtctccgtgggggtggcagctcctgtccgggaggtttgcgcctggcggggcaccccagagccgcgaagagccggtaggcgaggccagggcggggtggggcgcgtccaggcggggagggcaaactcgggcagcgcagggggcgcagagggcagcgggcgggcggacgcgcggcggaggcgcgagcgggacgagggctggctagtgccggggccgcccgcccgagggggaggaggctgtgctgcccttgctgcaggttcgctgtcgagcgcacaggaggcagggacatgggtagggtgcggtctgcgcggggcccgagcccggatctcttccatttcccctctcactcggccccgggctgcgccgcagacggcagcagctcccgctccgcccgagccgcctgaccgccgggccggggtgctaaccgcggggccctgcagcccgccggcccggccagcccagcccagcccggcggcccgcagccccgccgcccgccgccccccgccgccgccgcgttgccaaaacaaacgggccggcctatttattggcggccggcgagcccggcagctcagagtcgaggcgccgagggggacagcgcgccgccaccagctcgggccctgggcccccgccccgcacttgagtcccgccggccctggccgcaccacgccgcccatggcgcccccgcctggagccccccggagccacccggacgcctgagcccccgcagcgctcccgtcgacgcgcctgcccatcagcccaccaggagacctcgcccgccgctcccccgggctccccggccatgtctcccgcccggctccggccccgactgcacttctgcctggtcctgttgctgctgctggtggtgccggcggcatggggctgcgggccgggtcgggtggtgggcagccgccggcgaccgccacgcaaactcgtgccgctcgcctacaagcagttcagccccaatgtgcccgagaagaccctgggcgccagcggacgcta

SEQ ID NO: 25500 - DNA, 2300 bp, Homo sapien
cttggtagctggcttgcttctattataacaataaccttagactatgctgcatttgtgggaacagattgaaactccagggtccttctgggctatcatgagccctgaaatggctcttagtgtctggatctaatttgatcttcaagggtctttaccttctgttgatttttgtcttctgttacactttagctagtgtactctgtttttgccacacttattttcttgagggctacttggatcttcagcttttctcatttgtttgtttgttttcttcttgttgttttgagatgcagtcttgctctgttgcccaggctggaatgcagtggcatgatcacagctcactgaagccttgacctccttggctcaagtgatccttccacctcagcctcccgagtagttgggattacagatgcatgctactgtgcctggctaatgttaaaaaatttttttttggtagagatggggtctcactatgtttgtcaggctgctcttgaactcctgggcttaagtgagttcctacctcggcctcccagagtgctgggattacaggcatgagccatctcagctggtgggatcttgtttttgagaaagagtctcactctgtcacccaggctagaatgcagtggtgcaatcttggctcactgcaacctctgcctcctgggttcaaacaattcttgtgcctcagcctctcgagtggctgggattacaagcttctgccaccaagcccagttaatttttgtatttttagtagagatagggtttggccatgttggccgtgcttgtgtcaaactcctgacctcaagtgacccacccgccctggccttccaaagtgttgggattacagacgttagccactgcaccagccaccttcttaatatatttaattattgtatttgtgtttacattcatgtaaatgggttacttgcctatgaaactataagtttctgtaagaacatttatttttcggtattttttctggtacctaatactgaattggaaagtactttataagagtcttttggctaattgatatctcttccctcaaaggtctcccaacatttgattcgtcctctgatgggcatgagtctggcattacagtgccaagtgagggagctagcaacgttacttcatatgaaagacctagagatccaagactaccaggagagtggggctacgctgattcgaggtaagaggacattcttggaggagttgggtggggcgtgttaaaaatagtcaaagggtcttagcaaagagggagactcatttgcattagagaagtgcctcccccaggatgggtgctgaatactaaccagaaactggagtcttgatattaggtgactcttttttgtttgtttgttttggagacggagtctcgctctgtcagctaggctggagtgtagtggtatgatctcagctcactgcaacttccgcctcgtgggctcaagcgagtctcctgcctcagcctcccgagtagctgggattgtagacgcacgccaccatgcctggctaatttttttgtatttttaatatagacggggtttcaccatgttggtcaggctggtctcgaactcctgacctcaagtgatctgcctgccttggcctcccaaagtgctgggattacaggcgtgagccaccgtgcctggcctaggtgacacttttctctgcctcgagtacctggctggagcccaagtggccaatagaagctgtaaccgagtccagacatgccctaggcaatggcagggaaagactttggaaaggagccaatagctatacagaattgtaccagagcaacatggacttgggagtttaggaagcttcatggctccaacttcagaataaaaattcaatttggcctttgtttttgtggcaggaaaaactcctagagcagatgctgccaccaaacctgccatttattgctaatcaccctctcccactactttttgcccacatgctctcagcccttcttctcccactgaactaggtgtctctgcatgatgcaccttcctcctctttcctaagtagccctgttctgttccctttccatcaggtaagaaactcatcctgtatgactcatatttcttttttctgatccttcttattacagatcgattgaagacagaaccatttgaagaaaattccttcttggaacaatttatgatagaggtaaggtatttgtcattttcttgtgtgtctttgccctacttcctctttccaggtgcctgagtggccatttgtgttttgggtgttaggtggcttgtgtggttggaatgccctttgtctgaaaaagttgcccatagaaagtc

SEQ ID NO: 25501 - DNA, 2300 bp, Homo sapien
ccccatggggacatttggcaatgtctggagacatttttggctgttacaaatggaggaagagggagttgttactagggtttagtggatagaaagatgctgctaaacatcctacactgtacaggacatcccccctgcaccaccacccccaacaaagaattatctggtccaagatgtcagtaggactgaggttgaaaaacccaggatagagcatagagggtaaaaaatgggagatgaggttgggacttaaatattacgctttctagagaaagggaacctggaatagtcaaagcatatatggagggtgtgtggatgatcagaacacagggtgttgagcaggaatcctgtgggaaaggcctggatttggaaagtggagagtagaaagacaaagggtgagagggatgaaatgacaattcagaaagatctgtccttagtccaaggcttaggtttaggtctgggagggtaagactcctgggcttggatataggatcagagttcccttcctgcctggccccaactcttcataggctggagccccttggatgtattactgcactcactgctgacacagcccatcttcctggctggactctcaggcttcctactagagaacacgattcctggtaagttgaggctaggccctagcagactggggagtggccaggaagccatccctccctgggatgggcaatagcctgacaaacctctcttttgcaggcacacagcttgagcgaggcctaggtcaagggctaccatctcctttcactgcccaagaggctcgaatgcctcagaagcccagggagaaggctgctcaagtgtacagacttcctttccccatccaaaacctctgtccctgcatcccccagcctctccactgcctctgcccactgcctgaagaccctggggatgaggaaggaggctcctctgagccagaagagatggcagacttgctgcctggctcaggggagccatgccctgaatctagcagagaagggtttaggtcccagaaatgaccagaacgcctacttctgccctggttaatttagccctaactctcatctgctggagagtcagctcccaaactgttctttcttgtaggcagaggatatgtgtgtgtgtattacatgggactgtctagaggttccatttcccaatagggtgggttgcctttccttgtcttaattaggcctaactgttccagagcagaggccatgatttagtggaccatgaatgattgagattttgcctgtgtactatcaatgccacttgaaccccagcattcactttaatacttactgagcatctcccatgtgcaaggtcctggaactacagggataagacagggtccatgccgtctcaaggcatttacggtttaaaaagacctttgtaattactaacgaaaatgcaaagcagaaagcagtctgtaataaagattaaaataatgccgtgggagcaaagaggaagggataatgaattctgattggggacagtgggaaaggctttatgcaagaagcaatgaggatggccttgacaaatgaggatttttggttttggaaaatggatgcagagaagttttcaggttcggggtccagcttgagcaaagccatgggttgtacaaagtccaagataggtgaggggtttcaaatttctcagtagtgagggagtataagtacggggatgatggagaaatgaagcaggagaggtaaaggatgaggtcggactatgggacttatgcctgggagactccttccttcaacaactctagtgctggtggaggacctgagagatcatctacagaagttcaatcccttattttgttaaaaagagaccggataggtaggggagggaagagaagtgactcaagtttgacaaatccaaacctgggctcccctctcctgcgcctcgcccgctattctttccactcggccagcgtgactccaagacgcgccactacccttctactagccggctgcccggcctctcctccacttaccctggccactggggcgctcctctcatcagtgtcccaggcccagaagccccgcccacgccaggcataggccccgcccctgtatcccaagaccctgcctcctcttgcggtggggggaaagcggcctcttactctaggcctttcggtttgcgcgagcgggcaggaaagcgtgcgtgcggctaagagagtgggcgctctcgcggccgctgacggtaggtggaatcgcgttcgagtccgggcaggagcaagccagcgaggggctgctcagacgctgcgggttggccctggcgctggccttttctccctggaggga

SEQ ID NO: 25502 - DNA, 2300 bp, Homo sapien
caggtgggagctgctgggtgaggcagggaacccttttcactcccattccttagctttagtctaatggagccaaggactgctgggaccttcaaccctgatcttttgtcttccagtcttctcttagtgtcctgctcctaggtttccctctcttctggttcttctcccaggtattctcttcccaggcctctctggccactgctttgtatcagggtttttcacgcttttgtagaactgaggtttcaataaacagtttcagttgcatggcctggacttttccttctgcggcagcccttgaagatttttcctccctgtatctgccttccaagcctccctgcttcctgatcctgtcatctcacaaactgttttctcagcctcatctcaggactttcctatcgtttgataggcataggcttccatttccaactttgttcctgctcccaggaccctgggccctagcactgctcaacttgggatgccatgggacacacatggtgactgtcctgtccctgagttggccttgtctgtcacttgttctgggtaagcactctccttgtggatcccaaagcacatctcgtggagaggggccaggccttgtaaccagcagagccttgtgagctcctgagggcaagccacgaggacgcttctctctcctgacctcctcactggtctgacacatggtgatggtcacatggtgcttaacaattccaagaacttgaagaactccaaggctgggtcatcactggaggaaggaaaacagtctgggcagcttggctgagggtatttgggactgctgaggatacttcacggaagaagtggttctgccccctagggggcattttggaaatttatgggctattttttcattgtcaaaaggattcaaggggatggggtgctactggcatttcgtcaacctgggcgggatgctagacatcatgaaatgctcagacctcccgtactgtgaagaattcccaagacaacttttgaatgaccagctttatgtatatgaaaaccctgtttatctgagcctagaactgtctttgcacatgtaaacgtgaaatagcgtttgtgcgttttgaaaagactcagtttgctaggaattcattcccatgtaaattaagacgactttattttgcttggcaccttaaccaagagtttgtttgccattttgaaaatcgggttaccaacatcagagtcaccgataaagcaccaatatcagctggcattgcagctattgcaaccacagcaattctcatagggtgtgggattggactacttcattgtactttattgtcttctggtttagttgtgcttaagccttcacgtaatgaaatacatgttattataaattttattctttacagtgagcatgtttcaggtagttgtggttgtcacatgtgatgtaggatatattgtccacaagtttctttttttcttttttctttttttttttgacacagtctcactctgtcacccaggctggagtgcagtggcacggtctcagctcactacaacctccgccttctgggttcgagcaattcttgtgcctcagcctcccgagtaggtgggattacagggatgtgccaccacatccagctaagttttgtatttttagtagagatggtttcaccatgttgccaggctggtcttgaactcctcacctcaagtgatacacccagttcggcctcccaaagtggtgtgattacaggcatgagccaccatactgagcccacaagtttcattttgaagtagtccaggggccttggttctgaaaggggtgaggactgtggatcaaatagtgatagttttaaatgggagggaataaagtctgcaaaatttccccatattattttgaagagctcctctcctccccacccctcctatcctactttctacagcctggtctaggggcaggaaatctggaagaagattctcgggggagggccccagaactcagctccccagttaatggctgatggaatttgcacaacagctgggcaaaggtgaaagggtggtgccctgccccaaattccttatacctttgctccgcttcattgacacccccaccctctccccaccttctccccaccccaggcttcacccaaactctgacctcttactctctctacttaactctggtcccgggcagccaagacaaagcgaaaggcaaggcagcatgagccgatcacccctcaatcccagccaactccgatcagtgggctcccaggatgccctggcccccttgcctccacctgctccccagaatccctccacccactcttgggaccctttgtgtggatctc

SEQ ID NO: 25503 - DNA, 2300 bp, Homo sapien
tgcctggaaggcagcatggggctgcggtcactctggggcagtcttctggcctcactgactcctccaccattgcctcccccagacccccctgcccctcccactcttcttcataactgccacctttgccagaagctccagagagactccccaacctgccatgcctgcctccaccccaaccgtacagtccccactgcgctgtccagcccctggtaccatacctatggcctggctcccccctggccttggagcccggtgctcctttcacttcctcagcctcagcaatgttcccttttcagtgtcatggagctggctcgcctcaagtctttcgttttcccaggctaggtagggctgtgaggaatgcattaagagggtttgggagtttctgagaacctggaggagcaaagcttgattcagatcctgtctgcctcgctgggtccttggcaggtcccctgtcctcctgggtgggagcttatggggtggtggggcagaaggactgaaggtaattcactcctagatcgcagtggctggctgcttggccaggacagtgatgccgccagggagagcttccgcttggtgaccagggacatgtcccagatggacatagaagcccctctctgcctccctgggattttttagacttttacttttgatttccctaggatggaagagtataggtgggagataagggaagtggggtgagaggagaaaggaaatgttggcatgggcctgtgtgatgtccctgaggcagaagagccggggactgatgggttcaggtgggagctgctgggtgaggcagggaacccttttcactcccattccttagctttagtctaatggagccaaggactgctgggaccttcaaccctgatcttttgtcttccagtcttctcttagtgtcctgctcctaggtttccctctcttctggttcttctcccaggtattctcttcccaggcctctctggccactgctttgtatcagggtttttcacgcttttgtagaactgaggtttcaataaacagtttcagttgcatggcctggacttttccttctgcggcagcccttgaagatttttcctccctgtatctgccttccaagcctccctgcttcctgatcctgtcatctcacaaactgttttctcagcctcatctcaggactttcctatcgtttgataggcataggcttccatttccaactttgttcctgctcccaggaccctgggccctagcactgctcaacttgggatgccatgggacacacatggtgactgtcctgtccctgagttggccttgtctgtcacttgttctgggtaagcactctccttgtggatcccaaagcacatctcgtggagaggggccaggccttgtaaccagcagagccttgtgagctcctgagggcaagccacgaggacgcttctctctcctgacctcctcactggtctgacacatggtgatggtcacatggtgcttaacaattccaagaacttgaagaactccaaggctgggtcatcactggaggaaggaaaacagtctgggcagcttggctgagggtatttgggactgctgaggatacttcacggaagaagtggttctgccccctagggggcattttggaaatttatgggctattttttcattgtcaaaaggattcaaggggatggggtgctactggcatttcgtcaacctgggcgggatgctagacatcatgaaatgctcagacctcccgtactgtgaagaattcccaagacaacttttgaatgaccagctttatgtatatgaaaaccctgtttatctgagcctagaactgtctttgcacatgtaaacgtgaaatagcgtttgtgcgttttgaaaagactcagtttgctaggaattcattcccatgtaaattaagacgactttattttgcttggcaccttaaccaagagtttgtttgccattttgaaaatcgggttaccaacatcagagtcaccgataaagcaccaatatcagctggcattgcagctattgcaaccacagcaattctcatagggtgtgggattggactacttcattgtactttattgtcttctggtttagttgtgcttaagccttcacgtaatgaaatacatgttattataaattttattctttacagtgagcatgtttcaggtagttgtggttgtcacatgtgatgtaggatatattgtccacaagtttctttttttcttttttctttttttttttgacacagtctcactctgtcacccaggctggagtgcagtggcacggtctcagctcactacaacctccgccttctgggttcg

SEQ ID NO: 25504 - DNA, 2300 bp, Homo sapien
tagccacggggcaaacctcgagccattttctgcctgatgacaatcccattttcatgcttctcacttgtccagtcacacaacactgcctaacctgccaccgggctggagagctcctccaggctacagtcggcttcccagtcccagccatagtagagcctccttcggatccgggcactcagcttctggtgtcctgggaggaactgaaacagggcaggggcagcggagggtgaagggcacggaaaggtatgatgcagatcctggctctgggctggaaggcggggcaggggacaggccggcctcgctgctagggggcccgtgccttacccagacccgcgttctgtaaatcgcttgccaatggcagcctggtccatagagggaggaatgcccccacccccatcgagggttccccgggagaagttctccgagaagggccctcgtgtggccacccctacgcccattcctatactccgcggctctccctcccggcccaagcagccgcggcctcaaggaagcactgctcgagcagctgccgcccagtcccggcacagcagtcaggcgagctcgcagcgccgctcaggccgggaggggcgcgccgggaggccggggagggggcgggacccccactcaccgtgaagtcctggaagccggcgagggagaaggtgccttcttcgtccagcaggagcccggtcaggtccatcgcgccgccagtcgccgccctgcgaaggtgaacggaaggaaacgagttgtagggggctcgcggagctgtccttgcccgcctgtccacctgccagcctgcctccccggggcgggccgccgtcctcgccctcgccctcgcagctccctccccccggcggcggaaggcggggcccgggctgaactgggcgcctcttcctgttccgccccgggcttggcgcggcgcgcgggggccctaggcccgggaagggaggtgtcaagcgtccgtgcgacgctcacctcgcggagcagaaaggagatgcggctgcgaggcgcgtactccgcctgtgccgcgtccgcccggcgtttacaagccgcgggggtgccgcctgcaagtcagcgcctggcacttcctgccgcccatctggcccagcctcccgccccgacccgcgggcaggaaccggactcgaactcctggtctcacggaacgtggccaagccccaggcgcctctgagaaatggggacaattcgtaggggggaccacgccgcactgaggatgaacaagccaggcgtagcaatggagaagttaatgtgaataagacgaaacgcacaacaggaagttgttcccagttgctttttaggagagatattatacatactcagcaatgcatatgaaaagcgtctgaaaggacacacaggaaatttagcagtgggtgaactatgaaaaggaagagaaactcagggtgttttttttttttactgtaatttgaacttttaaacctaaggctactgaggaaattctgtgatcttaagcgaatgtaaggcctcaaaacgtgtcaacacgtccacccaaaagtaaactgcatctacccaaggttttgtgttgaaacccacctcccgcctccgatctcatgcttgagtaggccgaggtgggaagaagctccgatatgtggaagtgggaaagtttaaggagataggaaagaaacaacttttctgagtagatgttgttttcgagtctgtcgagtcaagcgctggtgtgtgtttgtttacccactgaggggagggaactgggaggaccagtgcgttgagggttggttgagtaatgggacggccaccgcccttcccgagcgagcagaagcagaccctaccggggatactgggaatctggaagcccacttcctgccccacacggggataccggggcagcaccacactccctagccgccctgcctactgtgggataagaaaacgggctcgactgcctggacctagacccggactcggaacccggggtacttcgtcaaccagaaaacgaacctgtgtaggcgcagtgtcagcggcagccgccggggcgcatgcgcggcccgccctatccgggggggggggggttaggccgcgtcacgtgacgggctcagcgctccgcagtcacgtgacgctcgtccgcaacctctgctgtcctccgcggcgcccccttccgcctgacgcgcccccggcggcggccgcgcagccctggctcctcgcgggctcgggcggcggctgcggcggggctatggcgagcggcggtggcgggggtaacactggcgcgggtggggggccggggatgggcctgagcctgggcctgggtctgg

SEQ ID NO: 25505 - DNA, 2300 bp, Homo sapien
ccgtgaagtcctggaagccggcgagggagaaggtgccttcttcgtccagcaggagcccggtcaggtccatcgcgccgccagtcgccgccctgcgaaggtgaacggaaggaaacgagttgtagggggctcgcggagctgtccttgcccgcctgtccacctgccagcctgcctccccggggcgggccgccgtcctcgccctcgccctcgcagctccctccccccggcggcggaaggcggggcccgggctgaactgggcgcctcttcctgttccgccccgggcttggcgcggcgcgcgggggccctaggcccgggaagggaggtgtcaagcgtccgtgcgacgctcacctcgcggagcagaaaggagatgcggctgcgaggcgcgtactccgcctgtgccgcgtccgcccggcgtttacaagccgcgggggtgccgcctgcaagtcagcgcctggcacttcctgccgcccatctggcccagcctcccgccccgacccgcgggcaggaaccggactcgaactcctggtctcacggaacgtggccaagccccaggcgcctctgagaaatggggacaattcgtaggggggaccacgccgcactgaggatgaacaagccaggcgtagcaatggagaagttaatgtgaataagacgaaacgcacaacaggaagttgttcccagttgctttttaggagagatattatacatactcagcaatgcatatgaaaagcgtctgaaaggacacacaggaaatttagcagtgggtgaactatgaaaaggaagagaaactcagggtgttttttttttttactgtaatttgaacttttaaacctaaggctactgaggaaattctgtgatcttaagcgaatgtaaggcctcaaaacgtgtcaacacgtccacccaaaagtaaactgcatctacccaaggttttgtgttgaaacccacctcccgcctccgatctcatgcttgagtaggccgaggtgggaagaagctccgatatgtggaagtgggaaagtttaaggagataggaaagaaacaacttttctgagtagatgttgttttcgagtctgtcgagtcaagcgctggtgtgtgtttgtttacccactgaggggagggaactgggaggaccagtgcgttgagggttggttgagtaatgggacggccaccgcccttcccgagcgagcagaagcagaccctaccggggatactgggaatctggaagcccacttcctgccccacacggggataccggggcagcaccacactccctagccgccctgcctactgtgggataagaaaacgggctcgactgcctggacctagacccggactcggaacccggggtacttcgtcaaccagaaaacgaacctgtgtaggcgcagtgtcagcggcagccgccggggcgcatgcgcggcccgccctatccgggggggggggggttaggccgcgtcacgtgacgggctcagcgctccgcagtcacgtgacgctcgtccgcaacctctgctgtcctccgcggcgcccccttccgcctgacgcgcccccggcggcggccgcgcagccctggctcctcgcgggctcgggcggcggctgcggcggggctatggcgagcggcggtggcgggggtaacactggcgcgggtggggggccggggatgggcctgagcctgggcctgggtctgggtctgagcctaggcatgagtgaggccaccagtgaggcagaggaggaggcggccacggccgaggcggtgggacgcctggccacgacgctgtggctgcggctccgcggctgggaggcggtgctggcggcggcgcagcggttgctggtgtgggagaagccgctgcacagcctggtcacggcggccgcgctcaacggcctcttctggtaacggccgcggaggagggggcggggccgggatgagcgggggagggaggggtcgagagcaccattcccctttctgggttatcacttggcctgggggcatgacccatccccagtttttgcaggctgacatccgcttgaattgcccatttttttctatctctgagtcgtgagtcgcgagttaggcctggaggtgccattaccccatcagtaggcgcctttccaccttctgagatggatgcatgagcctgtctcacccactcactgctgaggtgcctgtctctccctaaggttgctgtcttcctcgtccctccggcccttcttcctactcagcgtctcacttttggcctattttctgctggatctctggcagcctcgctttctccctgacgtttcaggtgagtgtttcttcattcagtaagcaccca

SEQ ID NO: 25506 - DNA, 2300 bp, Homo sapien
tacccaatgggtgcttactgaatgaagaaacactcacctgaaacgtcagggagaaagcgaggctgccagagatccagcagaaaataggccaaaagtgagacgctgagtaggaagaagggccggagggacgaggaagacagcaaccttagggagagacaggcacctcagcagtgagtgggtgagacaggctcatgcatccatctcagaaggtggaaaggcgcctactgatggggtaatggcacctccaggcctaactcgcgactcacgactcagagatagaaaaaaatgggcaattcaagcggatgtcagcctgcaaaaactggggatgggtcatgcccccaggccaagtgataacccagaaaggggaatggtgctctcgacccctccctcccccgctcatcccggccccgccccctcctccgcggccgttaccagaagaggccgttgagcgcggccgccgtgaccaggctgtgcagcggcttctcccacaccagcaaccgctgcgccgccgccagcaccgcctcccagccgcggagccgcagccacagcgtcgtggccaggcgtcccaccgcctcggccgtggccgcctcctcctctgcctcactggtggcctcactcatgcctaggctcagacccagacccaggcccaggctcaggcccatccccggccccccacccgcgccagtgttacccccgccaccgccgctcgccatagccccgccgcagccgccgcccgagcccgcgaggagccagggctgcgcggccgccgccgggggcgcgtcaggcggaagggggcgccgcggaggacagcagaggttgcggacgagcgtcacgtgactgcggagcgctgagcccgtcacgtgacgcggcctaacccccccccccccggatagggcgggccgcgcatgcgccccggcggctgccgctgacactgcgcctacacaggttcgttttctggttgacgaagtaccccgggttccgagtccgggtctaggtccaggcagtcgagcccgttttcttatcccacagtaggcagggcggctagggagtgtggtgctgccccggtatccccgtgtggggcaggaagtgggcttccagattcccagtatccccggtagggtctgcttctgctcgctcgggaagggcggtggccgtcccattactcaaccaaccctcaacgcactggtcctcccagttccctcccctcagtgggtaaacaaacacacaccagcgcttgactcgacagactcgaaaacaacatctactcagaaaagttgtttctttcctatctccttaaactttcccacttccacatatcggagcttcttcccacctcggcctactcaagcatgagatcggaggcgggaggtgggtttcaacacaaaaccttgggtagatgcagtttacttttgggtggacgtgttgacacgttttgaggccttacattcgcttaagatcacagaatttcctcagtagccttaggtttaaaagttcaaattacagtaaaaaaaaaaaacaccctgagtttctcttccttttcatagttcacccactgctaaatttcctgtgtgtcctttcagacgcttttcatatgcattgctgagtatgtataatatctctcctaaaaagcaactgggaacaacttcctgttgtgcgtttcgtcttattcacattaacttctccattgctacgcctggcttgttcatcctcagtgcggcgtggtcccccctacgaattgtccccatttctcagaggcgcctggggcttggccacgttccgtgagaccaggagttcgagtccggttcctgcccgcgggtcggggcgggaggctgggccagatgggcggcaggaagtgccaggcgctgacttgcaggcggcacccccgcggcttgtaaacgccgggcggacgcggcacaggcggagtacgcgcctcgcagccgcatctcctttctgctccgcgaggtgagcgtcgcacggacgcttgacacctcccttcccgggcctagggcccccgcgcgccgcgccaagcccggggcggaacaggaagaggcgcccagttcagcccgggccccgccttccgccgccggggggagggagctgcgagggcgagggcgaggacggcggcccgccccggggaggcaggctggcaggtggacaggcgggcaaggacagctccgcgagccccctacaactcgtttccttccgttcaccttcgcagggcggcgactggcggcgcgatggacctgaccgggctcctgctggacgaagaaggcaccttctccctcgccggcttccaggac

SEQ ID NO: 25507 - DNA, 2300 bp, Homo sapien
actggggagacatgacatgacccctggaggcctcagataccagcttcctagacacttaaatccctctgagaatgccaaagatatctttagtctaaaaaagcaaatgaccccacctctcaaaaggaggctgtcctggtcttagaagcaaagccaggaggacccaaccctctgccccaaaaggagcaggcacgcaaacacctacacaggagcctaggaccatgaaaaacccatggcttgttaccagttcattcacaatgctggggcactgccctgctccatggtgacactggcaccagcaagcaggacaggatgtgggcatttgtcttcaagaggtggcctgtactcacctgtcagagtgtggctcctctggggatgatgctagagagagaggaggggggcaaattattgagtggtaggggccctgggagacactccccaaggcagaaatagttgtccctcctctgcagccccagagcaccttcttcagatgccaatgggggagctgttacatgtttttgtttgcgtctgtctcctttagacattacccttctccaacataagaactagattttactcatgcttatctcccaagcaactcacatacagcctgtcacctactaagtaaattatatggataacaagaaaaacaacactgacgttctatttataaggcttatatgtgaaacactatcataagtatagcatgtgtattaactcattaatcctctcctcacctctctatgaagtaagttctatcatctgtgttttacagataaggaaattgagacaaacagaaattgagctacttttacaaggtcacagcaatggtaaatggcagaacagagaatggaacccaggtaatatggctgcagacttcaccatcttaaccactgcacctacagtagtattagtttgggaaaggggcaattctcattttagggaattccgtacaaaaaggaagtgggccatgcctgggaggcaggtggcctgctgtacgttcccctcgccacttaaccccacccagcggaatcaggcaccaagcaagtacccaatgggtgcttactgaatgaagaaacactcacctgaaacgtcagggagaaagcgaggctgccagagatccagcagaaaataggccaaaagtgagacgctgagtaggaagaagggccggagggacgaggaagacagcaaccttagggagagacaggcacctcagcagtgagtgggtgagacaggctcatgcatccatctcagaaggtggaaaggcgcctactgatggggtaatggcacctccaggcctaactcgcgactcacgactcagagatagaaaaaaatgggcaattcaagcggatgtcagcctgcaaaaactggggatgggtcatgcccccaggccaagtgataacccagaaaggggaatggtgctctcgacccctccctcccccgctcatcccggccccgccccctcctccgcggccgttaccagaagaggccgttgagcgcggccgccgtgaccaggctgtgcagcggcttctcccacaccagcaaccgctgcgccgccgccagcaccgcctcccagccgcggagccgcagccacagcgtcgtggccaggcgtcccaccgcctcggccgtggccgcctcctcctctgcctcactggtggcctcactcatgcctaggctcagacccagacccaggcccaggctcaggcccatccccggccccccacccgcgccagtgttacccccgccaccgccgctcgccatagccccgccgcagccgccgcccgagcccgcgaggagccagggctgcgcggccgccgccgggggcgcgtcaggcggaagggggcgccgcggaggacagcagaggttgcggacgagcgtcacgtgactgcggagcgctgagcccgtcacgtgacgcggcctaacccccccccccccggatagggcgggccgcgcatgcgccccggcggctgccgctgacactgcgcctacacaggttcgttttctggttgacgaagtaccccgggttccgagtccgggtctaggtccaggcagtcgagcccgttttcttatcccacagtaggcagggcggctagggagtgtggtgctgccccggtatccccgtgtggggcaggaagtgggcttccagattcccagtatccccggtagggtctgcttctgctcgctcgggaagggcggtggccgtcccattactcaaccaaccctcaacgcactggtcctcccagttccctcccctcagtgggtaaacaaacacacaccagcgcttgactcgacagactcgaaaa

SEQ ID NO: 25508 - DNA, 2300 bp, Homo sapien
tgttctgccatttaccattgctgtgaccttgtaaaagtagctcaatttctgtttgtctcaatttccttatctgtaaaacacagatgatagaacttacttcatagagaggtgaggagaggattaatgagttaatacacatgctatacttatgatagtgtttcacatataagccttataaatagaacgtcagtgttgtttttcttgttatccatataatttacttagtaggtgacaggctgtatgtgagttgcttgggagataagcatgagtaaaatctagttcttatgttggagaagggtaatgtctaaaggagacagacgcaaacaaaaacatgtaacagctcccccattggcatctgaagaaggtgctctggggctgcagaggagggacaactatttctgccttggggagtgtctcccagggcccctaccactcaataatttgcccccctcctctctctctagcatcatccccagaggagccacactctgacaggtgagtacaggccacctcttgaagacaaatgcccacatcctgtcctgcttgctggtgccagtgtcaccatggagcagggcagtgccccagcattgtgaatgaactggtaacaagccatgggtttttcatggtcctaggctcctgtgtaggtgtttgcgtgcctgctccttttggggcagagggttgggtcctcctggctttgcttctaagaccaggacagcctccttttgagaggtggggtcatttgcttttttagactaaagatatctttggcattctcagagggatttaagtgtctaggaagctggtatctgaggcctccaggggtcatgtcatgtctccccagtgagggtgcggggtcaggcgcccggccgcacctgctgagtgtgcccgagttgtgcagatacctggctgagagctggctcaccttccagattcacctgcaggagctgctgcagtacaagaggcagaatccagctcaggtaacctcccctacatcatacaacagttcactacactgaaggggaatagaggtggcgggggatgggagtggagtgatataaactccccgcttggagaccctgaaagaagaggcctgggcgccttcttgaggcaacattcacagctaatccctggtgcaggaggcagtctcacctcaggaaataagcttttgatagcctgacactttctcctgccaaggcagaccagtgtgaattacaggtggtgggcattatgtattgccagcttcctgaattggtggtcttgagcatcctcttaaccaaactggaccaccccattccttgagtacatacccatccttctaccagctgagcagtagtttcttacccagccgagcggggcgcatatctcagcgtgatgttcttagacttttgctcttctctgcagttctgcgttcgagtctgctctggctgtgctgtgttggctgtgttgggacactatgttccagggattatgatttcctacattgtctgtgagtagggtctgtccctgccctatttaaagccctctcctttcttctttccttggactgacccagagggaagactatgctctctctgctcagtttctgatttgtggagatctccagggatgctttagtattagtaactgtggaagacttacctggggaggagggcagtggatgtggcaagaagaggttggcacagccttgggaaaggaccttgcctaccttcagcacttcagtttagggaccagttgaatgggggctcttaggaaattggcgtagggagctcttagttcacgttcttaacccatagtgttgagtatcctgctgtggcccctggtggtttatcatgagctgatccagaggatgtacactcgcctggagcccctgctcatgcagctggactacagcatgaaggcagaagccaatgccctgcatcacaaacacgacaagaggagtaaggggctgccctaagccaggagggtgaaagagcgggagggccttggcttggggttcatgagatgccctggaattgagatcttctccagttctttagctgtgtttgtctcccctcccatcattcatgcttggtcattgctctactactcttgcttttctagagcgtcaggggaagaatgcacccccaggaggtgatgagccactggcagagacagagagtgaaagcgaggcagagctggctggcttctccccagtggtgaggtccagggaaagcgggggtgtcaaatagaaagccagaggaaaaatctttctgctttggagctgccacctccaaaggaggtggaagccagaggttttggga

SEQ ID NO: 25509 - DNA, 2300 bp, Homo sapien
tctgcagaaccatgaataaattaaacctctttctttataaatcaaccagcctcagatttttttttttttttaaagacagggtctcactttgttatccagctgaagcacagtggtacaatcatagctcactgcaacttcgagctcctaggctcaagcaatcctcccaccaaagcctctcgagtatttgggacaacgggtggatgccaccatgcccagctaactttttaaaaattttttttgtagagagggaggtcttactatgttgcccaggctggtctcaaactcctggactcgagtgaccctcccaccttggcctccgagggatgggattacaggcatgagccaccatgcctagcgaggtatttctgtatagcaacataagaacaaatgactacatttgcacttcaagcattctggctcatgctcaaaaatgagatccgaagatttttattttttgagttccacaaggctttggttatctgagcatttgtaaagtgggagtggggagagaggcagtgtttatctttgtttagtctgctccatacacgtttctccaaactgaaagcctacaattctttctatttttgtagagacagggtctcactatgttgcccaggctggaactcctaggctcaagcgatcctcctgcgtcagcctcccaaagtgctgaaattacaagcgtcagccaccatgccgggactggaagcctacaattctaaattgtactgatgaatatagagaggaaaaaaaatgaataaacaaaattcttagaaccaaatgattataatgagactgggaaaaaattatttgaaatctgacagttatatattgaaacaaaataaaagcatttataaagtcctggatgcaatttaaaataaaaagaatattggctgggagtggtggctcatgcctgtaatcccagcactttgggaggccgaggcgggcagatcacgaggtcaggagttcgagaccagcctgggcaacatggtgaaacgccgtctctaaaaatacaaaaattagctggacgcagtggtgtgcacctgtagtcccaactacttgggaggctgaggcaggagaatcgcttgaacccgggaagcagaggttgcagtgagccgagatcatgccactgcactccagcctgggtgacaagagtgacactgtgtctcaaaaaaaaaaaaattatattggtcaggtgtggtggctcacgtctgtaatcccagcactttgggaggccaaggcaggaggatcacttaaggccaggagttcgagaccaatctgggcaacaaagagagacccctccccaaccccatttctacaaaattaaaaattagctgagcacggtggcttgtgcctgtagtcctggctacattcaataattactaagaatattctaggctagggtttttcagagtgtggtgcatggcaatctgtgtcagaattccttcaggtgcttcctactgaattagaagctccagggcccggaaatccgcattttaaactagctccgtaggcgatttggattcacactaaagactgaggaccacactgttctaggcactgttaggtgctgggacctaacacgaaacaaggtagacgtggttcctgatttcccagtatgctcatataggggttggtcgcattagtgatatgggtgctagaatggaagaagtaagatcacatagcaggtgcgcctagttcagactgaggagggatctgcagctctagagacgtctgtacttcagagaaatacaggagctgtcagctcgtggaggcgaagggcagccgtggccgtgaacaaaatggccaggaggagggcatcgtgtgtgaagcgggctaaggaccgaattgtgaaagaccccaaaccacccagccttccatcccccaagatatccgtctttgccttcgctggccttcctctgcggagctacgcccgcgcccagggtggcggagccgcgcatcaacaccctctcgcctcgggacagtcttccgactcagccttctagagcaaggcgaggcggggcggggctcaaccgaggccctccccggctgcccggagactgcgccggacgcgccagccctgcgggatgacgtcagcgcgccgcgcgcgccgagggaggagcgggcgccgggggccggctggcgcgggggctccggtaacccgggctgggcgggggagaggaaggggcggggcagggagcccgccagagtgcggggtcgcggtgcggacttcgagcacgagccctaaagacgctcagcactcgtcgcttctcctagcagaccctgcccggcttggcgatgga

SEQ ID NO: 25510 - DNA, 2300 bp, Homo sapien
tgatagccagctggtggggtgtgtctttgctgagtcactgtggttttgcttttttttttttttttaagcctgtaagtgctgaatgtgttcatgacaccagtccccggccctattataagtagtaatacaatgaaattttatcctcaatgatactctctccacttatatttcattctaggttcagtttagcctgtgggtgctgcggtatgtggtctctggagggctgtttgtcctgggtctctgggcccctggacttcgtccccagtcctatacattgcaggttcatgaagaggaccaagatgtggaaaggagccaggtacacctcagtttctttttttttttggagacggagtcttgctctgtcaccaggctggagtgcagtggcgtgatctcagctcactgcaacctccacctcccgggttcaagcgattctcctgcctcagcctcctgagtagctgggactacaggtgcatgacaccacacccagctaagttttgtatttttagtagagacagggtttcacagcattggccaggatggtctcgatctcttgacctcgtgatccgcctgcctcagcctcccaaagtgctaggattacaggcgtgagccactgcgcctggcctctttttgtttttaagacggaatcttgctccgtcacccaggctggagtgtagtggcgcgatctcagctcactgcaccctctgcctcctgggttcaaacaattctcgtgcctcagcctcccaagtagctgggattacaggtgtgtacccggctaatttttgtatttttagtggagatggggtttcaccatgttggccaggctagtcttgaactcctgacctcaggtgacccacctgcctcggactcccaaagtgctgggattacaggcatgagccactgcaccagaccccacctcagtttctgaatcctggagtctcttcatttcattccctgtcatcattccttcccccaaaatgaaatgcttcttttccaaatctcagtttgcaacttagtttttctgaccccatcaaggatcacttgtgggtctgagatacctgggagctgtaaccccataggtttttccctgaagggtttctggctagtgcacttacttgatttctgagctcccttcctacgtgtttcaccatcctaggttcggtcagcagcccaacagtctacctggcgagattttggcaggaagctccgcctcctgagtggctacctgtggcctcgagggagtccagctctgcagctggtggtgctcatctgcctggggctcatgggtttggaacgggcactcaatgtgttggtgcctatattctataggaacattggtgagcaggaggagcaccagctcagtgtgctggtccttcatcagcctggtggctgggatggtccttacctagggaggtgggacagagctgggtggtcagaaagagactgtggctggtacctggggccattttgcctgaagagagtcctgggcgccataagtgggttctgactcgtttcctccacagtgaacttgctgactgagaaggcaccttggaactctctggcctggactgttaccagttacgtcttcctcaagttcctccaggggggtggcactggcagtacaggtatgagagactccgccctcaccctgctaggtataggtccctcccacaggcattccctcagcatccgcctctcccagcattcctccccagcccccatgtactctcagacctttcacatcctggtgctgggctgacgtccctcagctcccaggccctactgaggcgtcccccggctccctgcaggcttcgtgagcaacctgcgcaccttcctgtggatccgggtgcagcagttcacgtctcggcgggtggagctgctcatcttctcccacctgcacgagctctcactgcgctggcacctggggcgccgcacaggggaggtgctgcggatcgcggatcggggcacatccagtgtcacagggctgctcaggtgccgccccagtggaaagggcatgtgggagggtggagccggagaagcagggataggggcccgtgggaggaagagaacagaccccgcctgagaagctgccgctcccaccttggtgttttttaaagtataggattattgtatacatgctctcctaataacttaggtaatgcgggcagagggcaaatctctttcgagctgcacttactttttcagagcttcccactctgtttagtatgttgggttctgctctttttttgagacagggtcacgctctgtcacccaggctggagtacagtggcataatctctgct

SEQ ID NO: 25511 - DNA, 2300 bp, Homo sapien
ctggggactctggccttggtgctggctcttccctgcagacgccgggagcggcccgctggtgctgattcgctgtcttggggggccggccctcgcatctctccctacgtgctgcagctgcttctggccacacttcaggcggcgctgcccctggccggcctggctggccgggtgggcactgcccggggggccccactgccaagctatctacttctggcctccgtgctggagagtctggccggcgcctgtggcctgtggctgcttgtcgtggagcggagccaggcacggcagcgtctggcaatgggcatctggatcaagttcaggcacagccctggtctcctgctcctctggactgtggcgtttgcagctgagaacttggccctggtgtcttggaacagcccacagtggtggtgggcaagggcagacttgggccagcaggtgagggactctgtgggaagggggaagcctctgctggccgggcttgggagaaagcactgcatgtccagtcacactgcttccaggctttaggatgcctctaagcaaagggagaagggaggggctgagtcctgccgggagctgatagccagctggtggggtgtgtctttgctgagtcactgtggttttgcttttttttttttttttaagcctgtaagtgctgaatgtgttcatgacaccagtccccggccctattataagtagtaatacaatgaaattttatcctcaatgatactctctccacttatatttcattctaggttcagtttagcctgtgggtgctgcggtatgtggtctctggagggctgtttgtcctgggtctctgggcccctggacttcgtccccagtcctatacattgcaggttcatgaagaggaccaagatgtggaaaggagccaggtacacctcagtttctttttttttttggagacggagtcttgctctgtcaccaggctggagtgcagtggcgtgatctcagctcactgcaacctccacctcccgggttcaagcgattctcctgcctcagcctcctgagtagctgggactacaggtgcatgacaccacacccagctaagttttgtatttttagtagagacagggtttcacagcattggccaggatggtctcgatctcttgacctcgtgatccgcctgcctcagcctcccaaagtgctaggattacaggcgtgagccactgcgcctggcctctttttgtttttaagacggaatcttgctccgtcacccaggctggagtgtagtggcgcgatctcagctcactgcaccctctgcctcctgggttcaaacaattctcgtgcctcagcctcccaagtagctgggattacaggtgtgtacccggctaatttttgtatttttagtggagatggggtttcaccatgttggccaggctagtcttgaactcctgacctcaggtgacccacctgcctcggactcccaaagtgctgggattacaggcatgagccactgcaccagaccccacctcagtttctgaatcctggagtctcttcatttcattccctgtcatcattccttcccccaaaatgaaatgcttcttttccaaatctcagtttgcaacttagtttttctgaccccatcaaggatcacttgtgggtctgagatacctgggagctgtaaccccataggtttttccctgaagggtttctggctagtgcacttacttgatttctgagctcccttcctacgtgtttcaccatcctaggttcggtcagcagcccaacagtctacctggcgagattttggcaggaagctccgcctcctgagtggctacctgtggcctcgagggagtccagctctgcagctggtggtgctcatctgcctggggctcatgggtttggaacgggcactcaatgtgttggtgcctatattctataggaacattggtgagcaggaggagcaccagctcagtgtgctggtccttcatcagcctggtggctgggatggtccttacctagggaggtgggacagagctgggtggtcagaaagagactgtggctggtacctggggccattttgcctgaagagagtcctgggcgccataagtgggttctgactcgtttcctccacagtgaacttgctgactgagaaggcaccttggaactctctggcctggactgttaccagttacgtcttcctcaagttcctccaggggggtggcactggcagtacaggtatgagagactccgccctcaccctgctaggtataggtccctcccacaggcattccctcagcatccgcctctcccagcattcctccccagcccccatgtactct

SEQ ID NO: 25512 - DNA, 2300 bp, Homo sapien
ctgagcagggttcctgtggcccaggatggaggccaccgctgccctgccatcccgtctgcctgccatgggacggctcctctgagtgttccctggccccacgtgtgtggtgtttgtgtgtctgtgcctggccaagggaggtgccaacactgggcttgccacagccccaggagaggaatttggggcctaggaaccgagggcacacgggactctagcctcatccccaggacccccttggctcagagtgtggtgctagaaactggcccccagcccagccccagtactgccacctttacacctacccctgcaagtccccagagggctgcccacgatagaagctgccaagcagggagaacctgtgccaactgtggagtggggaggttgggcctggaccctcaacccctgcaaccttccctagccccctcaatagatgagcaggtcaggctgtggcccttacctcacccgcagttctcgcccagtgctgcagccggctcacctctctccgcttcttgcacatcactggcctgtgtgtgctgcttgctcctgttctgttcgcttgctcccgttccgttcggcttttgctttgcgttagggtgaagaccctagcgtccagctcccctcaacgctatattttgacactaaaaaagaaggtttctaaattgtaggagcaggatggaaatactttgctgcccttgccatcttttaggatgggcccccaggagactgaggtcttcctgggccctcattgctgcttatcgtaccccccatcacctgcacatgggacagaccgggctggagggtgaccttggctgtgtgcgtcccagcaaaagagctctggcccgcatctcgctgtgccctgaagggggatgaagggcgatgcctcgcccgaggctttgggctgctgcactgcatgctgggactgctcctactctctgtcccacccctcacccagctgtggtccggctttgggagagtggtgaattgcgctgcccgaactcggagcggagcagggtagggaccgtgtacagcttgataacccttaataaaaagggagtttgaccagacttcttgttgtctcgcgcggctagaatcctgggaacaagagaaatgggatggggactctgccggggtctagaagaaagtatgtttaggccgtcgctcagatacgctgagcaaggcggctggcggaagggcagcttccgacccacagttccgtggaggtctgtgtcctgccccgagccaggattccgtgaggtctgtttccagccccgagccacgattccgtggaggtttccagctcggcctggtcgtcagatttcccgccctgggcacgtgaccaagccggctctgcttctctaatttgcattcgttgcctgcaccattccccccgctcccccctcggagacatttggccaatgggagccgtgggtaggggctgtgggcggggctacagccgtggagcgcggtgcgagtccaacaccgagcattcccgtgggcctgcagttggcaggagggtcccgggcccagagccagcggggccgtgctgagacggcgtacgtgccctgcgtgagtgcgtggcggcggcgcgtgcgctaggggagtgggcggtgaggcctggtccacgtgcgtcccttcccgggacccccgcagcttggcgcccagcggctacgtgagccaaggcacccggatgtccgcgcccctctccgagtgaccagtcccggcctccggtcccgcagtgcccgcagcctcggccggcgtccacgcattgccatggtgactgtgggcaactactgcgaggccgaagggcccgtgggtccggcctggatgcaggatggcctgagtccctgcttcttcttcacgctcgtgccctcgacgcggatggctctggggactctggccttggtgctggctcttccctgcagacgccgggagcggcccgctggtgctgattcgctgtcttggggggccggccctcgcatctctccctacgtgctgcagctgcttctggccacacttcaggcggcgctgcccctggccggcctggctggccgggtgggcactgcccggggggccccactgccaagctatctacttctggcctccgtgctggagagtctggccggcgcctgtggcctgtggctgcttgtcgtggagcggagccaggcacggcagcgtctggcaatgggcatctggatcaagttcaggcacagccctggtctcctgctcctctggactgtggcgtttgcagctgagaacttggccctggtgtcttggaacagcccacagtggtggtgggcaagggc

SEQ ID NO: 25513 - DNA, 2300 bp, Homo sapien
aggctgcagggaagggtggttcttccagggcctctcaaggggaggaaagaggtctgagagaacaggcccaaagactcaccccccaagcagccccccagccctgttcctcattcttgtgttccttctatgagtatgcttactcttacttgtctctccagatcctggcacagtgcccagggttccctctcatttctctcggctgcctcttggagggtgggcagaagatgggcagtcggcatcaaggcaccctgagcccgtgcccgaagagggctcggaggatgagctaccccctcaggtgcacaaggtaagggccccggggcctaggaaaaactgccagaaatagtaacttccagggtgaggtaacagcttttcaggggaaggaagatatgccccacccccacacagagatactgtaccctcccttccaaaacacactaccccttcttttctcaactgctctgcagggcttggtttttccttaccttacctccccaggaatcaacctttcctgtccctttacctctaggtttctatggggctagcaggtatcaaccagaagctgaagactatctccattaccaaccctttctccccacaggtatagacaaggctgagcagggttcctgtggcccaggatggaggccaccgctgccctgccatcccgtctgcctgccatgggacggctcctctgagtgttccctggccccacgtgtgtggtgtttgtgtgtctgtgcctggccaagggaggtgccaacactgggcttgccacagccccaggagaggaatttggggcctaggaaccgagggcacacgggactctagcctcatccccaggacccccttggctcagagtgtggtgctagaaactggcccccagcccagccccagtactgccacctttacacctacccctgcaagtccccagagggctgcccacgatagaagctgccaagcagggagaacctgtgccaactgtggagtggggaggttgggcctggaccctcaacccctgcaaccttccctagccccctcaatagatgagcaggtcaggctgtggcccttacctcacccgcagttctcgcccagtgctgcagccggctcacctctctccgcttcttgcacatcactggcctgtgtgtgctgcttgctcctgttctgttcgcttgctcccgttccgttcggcttttgctttgcgttagggtgaagaccctagcgtccagctcccctcaacgctatattttgacactaaaaaagaaggtttctaaattgtaggagcaggatggaaatactttgctgcccttgccatcttttaggatgggcccccaggagactgaggtcttcctgggccctcattgctgcttatcgtaccccccatcacctgcacatgggacagaccgggctggagggtgaccttggctgtgtgcgtcccagcaaaagagctctggcccgcatctcgctgtgccctgaagggggatgaagggcgatgcctcgcccgaggctttgggctgctgcactgcatgctgggactgctcctactctctgtcccacccctcacccagctgtggtccggctttgggagagtggtgaattgcgctgcccgaactcggagcggagcagggtagggaccgtgtacagcttgataacccttaataaaaagggagtttgaccagacttcttgttgtctcgcgcggctagaatcctgggaacaagagaaatgggatggggactctgccggggtctagaagaaagtatgtttaggccgtcgctcagatacgctgagcaaggcggctggcggaagggcagcttccgacccacagttccgtggaggtctgtgtcctgccccgagccaggattccgtgaggtctgtttccagccccgagccacgattccgtggaggtttccagctcggcctggtcgtcagatttcccgccctgggcacgtgaccaagccggctctgcttctctaatttgcattcgttgcctgcaccattccccccgctcccccctcggagacatttggccaatgggagccgtgggtaggggctgtgggcggggctacagccgtggagcgcggtgcgagtccaacaccgagcattcccgtgggcctgcagttggcaggagggtcccgggcccagagccagcggggccgtgctgagacggcgtacgtgccctgcgtgagtgcgtggcggcggcgcgtgcgctaggggagtgggcggtgaggcctggtccacgtgcgtcccttcccgggacccccgcagcttggcgcccagcggctacgtgagccaaggcacccggatgtcc

SEQ ID NO: 25514 - DNA, 2300 bp, Homo sapien
ggggtcgaggcaacaaccccaccttccgtaccttgtctcttccccaccccaccccgcagtctgcccttccgtattgcacgtggcaagaagtgcaggcccggatcgtgcagacgcagaaggagcaccagatctgcatccacaaacgtgagctgacagaactggacatctaccaccgcatcctccgtttccagaactacatggtggcactggttaacaaatccctcctgcctctgcgcttccgcctgcctggcctcggggaagctgtcttcttcacccgtggtctcaagtacaactttgagctgatcctcttctggggacctggctctctgtttctcaatgaatggagcctcaaggccgagtacaaacgtggggggcaacggctagagctggcccagcgcctcagcaaccgcatcctgtggattggcatcgctaacttcctgctgtgccccctcatcctcatatggcaaatcctctatgccttcttcagctatgctgaggtgctgaagcgggagccgggggccctgggagcacgctgctggtcactctatggccgctgctacctccgccacttcaacgagctggagcacgagctgcagtcccgcctcaaccgtggctacaagcccgcctccaagtacatgaattgcttcttgtcacctcttttgacactgctggccaagaatggagccttcttcgctggctccatcctggctgtgcttattgccctcaccatttatgacgaagatgtgttggctgtggaacatgtgctgaccaccgtcacactcctgggggtcaccgtgaccgtgtgcaggtgggccagggccacaggcgggagcaagccggctagcattcctgggaaaggcatacatctcaccatgatcctgatcccactaggtcctttatcccggaccagcacatggtgttctgccctgagcagctgctccgcgtgatcctcgctcacatccactacatgcctgaccactggcagggtaatgcccaccgctcgcagacccgggacgagtttgcccagctcttccagtacaaggcagtgagtggagttggagttagggcctgctagagactggctggtagctcggtggtgagggctgggctccctcctgctcgcttgtgaccttggtcccgcccttttaggtgttcattttggaagagttgctgagccccattgtcacacccctcatcctcatcttctgcctgcgcccacgggccctggagattatagacttcttccgaaacttcaccgtggaggtcgttggtgtgggagatacctgctcctttgctcagatggatgttcgccagcatggtcatccccaggtactgggagaggagggagccaggtggcctgggatgatgctggaacatacagtgtctttgggaaaaccgcaaaaagacacctctcctgagtcacacaaaggcagtcctataccaggggcacactgcttgggagcctgggctggatttcagccctaattcgcacccttggccaagctcccttaagaaaggcacaacacggccaggcgcggtggctcacgtctgtaatcccagcactttgggaggccaaggcgggtggatcacgaggtcaggagatcgagaccatcctggctaacacggtgaaaccccttctctactaaaaatacaaaaaaattagccaggcgtggtagcgggcgcctgtagtcccagctactcgggaggctgaggcaggagaatggcgtgaacctgggaggcggagcttgcagtgagccgagatcacgccactgcaatccagcctgggcgacagagcgagactccatctcaaaaaaaaaaaaaaaaaaggcacaacacaagtaactggctcagcatgcagtgcagcccctcctgggtctgggggggcaccagtgccctgggaaagattgacagtatactgtggtctccgttctccaagggtaaggcctccccactaacaggaaaggtgcaggaaggctcctggaagagaacagccctgcttactctgctcttccttgtgcagtggctatctgctgggcagacagaggcctcagtgtaccagcaagctgaggatggaaagacagagttgtcactcatgcactttgccatcaccaaccctggctggcagccaccacgtgagagcacagccttcctaggcttcctcaaggagcaggttcagcgggatggagcagctgctagcctcgcccaagggggtctgctccctgaaaatgccctctttacgtctatccagtccttacaatctgagtctgaggtgtgttcctggtgactgggagatgatgggc

SEQ ID NO: 25515 - DNA, 2300 bp, Homo sapien
catctcaacgctccaatggaacgtacattgttcagtcaggaggtctcagagatgccagccacagagaaaagcctctgttctgccttgcctgttccatggcctgctcctaggcagagagcctcctgggagagagaagccatatagcattgccgaaggggaaggggttaggaagccctccctcaatcagaaaactcccccaagggcttttaactacaacctcaaaaggaaatcagagactggagatcagagacccacaggatgaaaccttcgagagtccagtagtggtggctgaggttaccatgaggtgaggaaagtaggctgcagctgtggcagctgaggctaagagcaaagagtgggcctgagacagtcctgtggggctgaggagcagagagggcccactgggagttctccaggcccttccagttcccagtcttgttctgccacctccagactctcctcttcccactgggtttcactggagcctctctggctctcagactgcaccccttcttcccaactccccaggcagttcctctttgtggttgccttcactaccttcctggtcagctgcgtggactatgacatcctatttgccaacaagatggtgaaccacagtcttcaccctactgaacccgtcaaggtcactctgccagacgcctttttgcctgctcaagtctgtagtgccaggtaagggctgcaagtcaagaggacaccatagccttgagttctgctagcaggtgggtaatagagtggagtctgaggcagcaactcatactccagaactgactcaggcttggtctagcaaaaatacttcaggatagcagcgtctctgccaagactccttcctcgagggccacctctcctccccttctttttccccaccaggattcaggaaaatggctcccttatcaccatcctggtcattgctggtgtcttctggatccaccggcttatcaagttcatctataacatttgctgctactgggagatccactccttctacctgcacgctctgcgcatccctatggtaagactgggaagttgggcagttagcccatagtctaagacgtattgggaggtgtgggtgtattcctgggcatcagttatccttatctgtcattgacaaatcaggaactgtctcttaagctcacaacccctgaatctcacttctaatatagggcaaaggggtcgaggcaacaaccccaccttccgtaccttgtctcttccccaccccaccccgcagtctgcccttccgtattgcacgtggcaagaagtgcaggcccggatcgtgcagacgcagaaggagcaccagatctgcatccacaaacgtgagctgacagaactggacatctaccaccgcatcctccgtttccagaactacatggtggcactggttaacaaatccctcctgcctctgcgcttccgcctgcctggcctcggggaagctgtcttcttcacccgtggtctcaagtacaactttgagctgatcctcttctggggacctggctctctgtttctcaatgaatggagcctcaaggccgagtacaaacgtggggggcaacggctagagctggcccagcgcctcagcaaccgcatcctgtggattggcatcgctaacttcctgctgtgccccctcatcctcatatggcaaatcctctatgccttcttcagctatgctgaggtgctgaagcgggagccgggggccctgggagcacgctgctggtcactctatggccgctgctacctccgccacttcaacgagctggagcacgagctgcagtcccgcctcaaccgtggctacaagcccgcctccaagtacatgaattgcttcttgtcacctcttttgacactgctggccaagaatggagccttcttcgctggctccatcctggctgtgcttattgccctcaccatttatgacgaagatgtgttggctgtggaacatgtgctgaccaccgtcacactcctgggggtcaccgtgaccgtgtgcaggtgggccagggccacaggcgggagcaagccggctagcattcctgggaaaggcatacatctcaccatgatcctgatcccactaggtcctttatcccggaccagcacatggtgttctgccctgagcagctgctccgcgtgatcctcgctcacatccactacatgcctgaccactggcagggtaatgcccaccgctcgcagacccgggacgagtttgcccagctcttccagtacaaggcagtgagtggagttggagttagggcctgctagagactggctggtagctcggtggtgagggctgggctccctcc

SEQ ID NO: 25516 - DNA, 2300 bp, Homo sapien
atgggatgtaaataatcgtaataagtaacgtcttttgactcattctgtgtcagctctgtgttaaatgctttacatgcattatcttagacctaatactcctatgagacaagtgttatttattcctaatgtaccaccatggacagacaaaagtttagacaggttaagtaacttggtaaagtcacacagctagaaagtcacagagccaggacttaagcttgagtgtgttgacaccaaagtctgtgctcttacctgctttctttactgactactttttcttaacaattacacgtttataatctgcaccagaagaatggcttcacatgtatgctcatcggggagatctttgagctcatgtaagtataagaagggacagatgatgtggtgaaagaatacatcttagtctttcctctccttgcactcacacttggcccaacctgccagtacaactcagtcctaggctaaaactccgtaaacctttgtagttcagggactgggtgtggcaccaaaacttacagcttcacctttctttttttttgagatggagtgagtctcactctgtcgcccaggcaggagtgcagtggtcttggctcggtgcaacctctgcctcccaggttcaagtgattctcctgcctcagcctccttagtagctgggactacaggcatgtgccaccatgcccggctaattttttttgtatttttagtagagatgggatttcaccaagttggccaggctggtctcgaactcctgacctcgggttatctgcccgcctcaacctcccgaagtgccgggattataggcatgagccaccacgcccggccaagctttcttacaagaaaagctttccaagccttatctcttccatgaaaagaacccaagccttggttgggcacggcagctcacacctgtaatcccagcactttaggaggctctaaaaatacaaaaattagctgggtgtggtggcacacgcctgtaatcccagctacttgggaggctgaggcacaagaatcgcttcaacctgggaggtggaggttgcagtgagccgagattgtgccgctgcactccagcctggctgacagagtgagactctctcaaaaaaaaaaagaatgcaggccttgaccttgatcatctcaacgctccaatggaacgtacattgttcagtcaggaggtctcagagatgccagccacagagaaaagcctctgttctgccttgcctgttccatggcctgctcctaggcagagagcctcctgggagagagaagccatatagcattgccgaaggggaaggggttaggaagccctccctcaatcagaaaactcccccaagggcttttaactacaacctcaaaaggaaatcagagactggagatcagagacccacaggatgaaaccttcgagagtccagtagtggtggctgaggttaccatgaggtgaggaaagtaggctgcagctgtggcagctgaggctaagagcaaagagtgggcctgagacagtcctgtggggctgaggagcagagagggcccactgggagttctccaggcccttccagttcccagtcttgttctgccacctccagactctcctcttcccactgggtttcactggagcctctctggctctcagactgcaccccttcttcccaactccccaggcagttcctctttgtggttgccttcactaccttcctggtcagctgcgtggactatgacatcctatttgccaacaagatggtgaaccacagtcttcaccctactgaacccgtcaaggtcactctgccagacgcctttttgcctgctcaagtctgtagtgccaggtaagggctgcaagtcaagaggacaccatagccttgagttctgctagcaggtgggtaatagagtggagtctgaggcagcaactcatactccagaactgactcaggcttggtctagcaaaaatacttcaggatagcagcgtctctgccaagactccttcctcgagggccacctctcctccccttctttttccccaccaggattcaggaaaatggctcccttatcaccatcctggtcattgctggtgtcttctggatccaccggcttatcaagttcatctataacatttgctgctactgggagatccactccttctacctgcacgctctgcgcatccctatggtaagactgggaagttgggcagttagcccatagtctaagacgtattgggaggtgtgggtgtattcctgggcatcagttatccttatctgtcattgacaaatcaggaactgtctcttaagctcacaacccctgaatctcacttctaatat

SEQ ID NO: 25517 - DNA, 2300 bp, Homo sapien
ggcccccaggggctgcacggacaggtgagtaccacctcgaccatgcctggcttacaggacctagggaacccacaaattcacctaggatcgggggtctacactgacccagtcaaggtttcccatccagaaggtttgctcaccggctggatctttggtgctagggaagtaagagaaggggttgaccagaaaggtcctcttcaggaaagactcttgaggttttgtggaccctgagaagtatgtcatttctgaggctaaggtagggcaatggagaaatagtccagaggcgcccctggcctcaggtctgtacccactcattctccatggggtccctaagttacttcttgagaccctggagttggaagagtggcccggtttagcacagccagaggaagtgctcgtagtcctgggctggaagggtgcttcttccccactgcagccttcctgccccatgcttggcctcctcttggtggggtgtggatggctgggagggttgggttcctttttatccccactgcccactctctggggcctgacatcttctcctccagcagctgcagagcatcgagggctggagaggagcacatactgtccatggagctggtagggccatgtgcttttctcaaacatttgtttgtgaagtgcttccaaactgttagtctcttgggagaccagggttcccaggatgggcgggggagggactcttctgtccgttaaatagaagatgaaacagcccccaacaaagggacagattctggctttgggccaggaaagcagcagtagacacccagactggccagagttaaggctcccccagccctgagcttactgcctttcttgtgtcactactcctctgcctctgagccaaggaggctggtagtggacaaagcccaagggtactttctccttttggcagtaggcagggcagcccatgggcagcagctggaactgaatcagggtctcttcttcctccttattggcaggtggtcaaggtggacagggggcggtggtgatggcgcagtttgacactgaataccagcgcctagaggcctcctatagtgattcacccccaggggaggaggacctgttggtgcacgtcgccgaggggagcaagtgtgagttcttggatatgacagccatagggagagttgatggaagaacatggagagagcaaggggcttgtgttctcccagggctctgacatctctgttcctatcccacagcaccttggcaccatattgaaaaccttgacctcttcttctctcgaatatcctttgtgtttctgagttggagctctgggacctttaatgtctctctaagccggggctctggtgggaggtgggggtaggtttgactctaatacctggaaacgggaatggagctcatcctgaggctgaaagaggctggtgaaatcatcgttaagtaatgatagcccacatttaccaagatctgtgtgcctgtgtccactttgtggtgttaatttgtagaagcctttctaagggtgagcctccttttttttttgtttgagatggagtctgtctctgttgctgctagagtccaggggcgatctcaacacactgcaacctccacctcctgggttcaagagattctcctgcctcagtctcccacgtagctgggattacaggcacctgccacgatgcccagctattttttgtatttttcatagagacagggtttcaccatgtggcaaggctggtctcgaactcctgacctcaagtgatccacctgccttgccctcccaaagtgttaggattacaggcgtgagccaccacacccagccgagcctcctttttgatgggatgtaaataatcgtaataagtaacgtcttttgactcattctgtgtcagctctgtgttaaatgctttacatgcattatcttagacctaatactcctatgagacaagtgttatttattcctaatgtaccaccatggacagacaaaagtttagacaggttaagtaacttggtaaagtcacacagctagaaagtcacagagccaggacttaagcttgagtgtgttgacaccaaagtctgtgctcttacctgctttctttactgactactttttcttaacaattacacgtttataatctgcaccagaagaatggcttcacatgtatgctcatcggggagatctttgagctcatgtaagtataagaagggacagatgatgtggtgaaagaatacatcttagtctttcctctccttgcactcacacttggcccaacctgccagtacaactcagtcctaggctaaaactccgtaaacctttgtagttcagg

SEQ ID NO: 25518 - DNA, 2300 bp, Homo sapien
agagagacattaaaggtcccagagctccaactcagaaacacaaaggatattcgagagaagaagaggtcaaggttttcaatatggtgccaaggtgctgtgggataggaacagagatgtcagagccctgggagaacacaagccccttgctctctccatgttcttccatcaactctccctatggctgtcatatccaagaactcacacttgctcccctcggcgacgtgcaccaacaggtcctcctcccctgggggtgaatcactataggaggcctctaggcgctggtattcagtgtcaaactgcgccatcaccaccgccccctgtccaccttgaccacctgccaataaggaggaagaagagaccctgattcagttccagctgctgcccatgggctgccctgcctactgccaaaaggagaaagtacccttgggctttgtccactaccagcctccttggctcagaggcagaggagtagtgacacaagaaaggcagtaagctcagggctgggggagccttaactctggccagtctgggtgtctactgctgctttcctggcccaaagccagaatctgtccctttgttgggggctgtttcatcttctatttaacggacagaagagtccctcccccgcccatcctgggaaccctggtctcccaagagactaacagtttggaagcacttcacaaacaaatgtttgagaaaagcacatggccctaccagctccatggacagtatgtgctcctctccagccctcgatgctctgcagctgctggaggagaagatgtcaggccccagagagtgggcagtggggataaaaaggaacccaaccctcccagccatccacaccccaccaagaggaggccaagcatggggcaggaaggctgcagtggggaagaagcacccttccagcccaggactacgagcacttcctctggctgtgctaaaccgggccactcttccaactccagggtctcaagaagtaacttagggaccccatggagaatgagtgggtacagacctgaggccaggggcgcctctggactatttctccattgccctaccttagcctcagaaatgacatacttctcagggtccacaaaacctcaagagtctttcctgaagaggacctttctggtcaaccccttctcttacttccctagcaccaaagatccagccggtgagcaaaccttctggatgggaaaccttgactgggtcagtgtagacccccgatcctaggtgaatttgtgggttccctaggtcctgtaagccaggcatggtcgaggtggtactcacctgtccgtgcagcccctgggggccgtggatcttggcccagcctggccccggtgggattccctgggctagtgagagccctgcccctcagggaagtcaccactcacagggtcagtgtggaccagggcccgtggagccccggccggctgggcctgggctcaggggttcctgcggatgttgcagggatcgagtcagccttacagctgatagcccgggtgggttggcttgcctccccacacccagccgcggcgaccgtggaccggagtccacctcgccccagggtcgcccggccccaggccaagggctggcagctcccaacagcggacaacctcgcgcgcggccccggcgcccgcgcgcgcccccgtctgcgcgcgccagcaatcaaaacattccggctgcgcgcccccgccccgccggcggcgccccttcctccgttacccgccgcgagctcacttagggctccgcaggcacccctgggcaaggccagacacggggcctgggattccaataaccggtctcacgtcttacctcaggaacagcgacccgggtgattccagaggctccgccggctccgctcggctcggctcggctcggcgcgacccgcggcgctaggccgggtgtctgccactcactgtcacccgcagccaggctggccaataagcacggggggcggagacacaacggccaattctcggcttcagggacgggactaaagtctcgaggcgggtcttggacagtcagcggcccaatagtgtgctctacgtggggcggggctcaggtgcggacgccgccggttgtcctcttcgctgctccgtagtgacggggattgttgtgttgcagaaatccggcaatcgacctgaggacttgcgagccgctcagctcccgggacgtttggtgcgtcttctaagggcgtgggcgagtttacgcgggccagttgttgctggtcgcatgggtaacgaagaaagttcggctaggcaagctcagtgatttttaactctgttggactcgatttg

SEQ ID NO: 25519 - DNA, 2300 bp, Homo sapien
gggataaaaaggaacccaaccctcccagccatccacaccccaccaagaggaggccaagcatggggcaggaaggctgcagtggggaagaagcacccttccagcccaggactacgagcacttcctctggctgtgctaaaccgggccactcttccaactccagggtctcaagaagtaacttagggaccccatggagaatgagtgggtacagacctgaggccaggggcgcctctggactatttctccattgccctaccttagcctcagaaatgacatacttctcagggtccacaaaacctcaagagtctttcctgaagaggacctttctggtcaaccccttctcttacttccctagcaccaaagatccagccggtgagcaaaccttctggatgggaaaccttgactgggtcagtgtagacccccgatcctaggtgaatttgtgggttccctaggtcctgtaagccaggcatggtcgaggtggtactcacctgtccgtgcagcccctgggggccgtggatcttggcccagcctggccccggtgggattccctgggctagtgagagccctgcccctcagggaagtcaccactcacagggtcagtgtggaccagggcccgtggagccccggccggctgggcctgggctcaggggttcctgcggatgttgcagggatcgagtcagccttacagctgatagcccgggtgggttggcttgcctccccacacccagccgcggcgaccgtggaccggagtccacctcgccccagggtcgcccggccccaggccaagggctggcagctcccaacagcggacaacctcgcgcgcggccccggcgcccgcgcgcgcccccgtctgcgcgcgccagcaatcaaaacattccggctgcgcgcccccgccccgccggcggcgccccttcctccgttacccgccgcgagctcacttagggctccgcaggcacccctgggcaaggccagacacggggcctgggattccaataaccggtctcacgtcttacctcaggaacagcgacccgggtgattccagaggctccgccggctccgctcggctcggctcggctcggcgcgacccgcggcgctaggccgggtgtctgccactcactgtcacccgcagccaggctggccaataagcacggggggcggagacacaacggccaattctcggcttcagggacgggactaaagtctcgaggcgggtcttggacagtcagcggcccaatagtgtgctctacgtggggcggggctcaggtgcggacgccgccggttgtcctcttcgctgctccgtagtgacggggattgttgtgttgcagaaatccggcaatcgacctgaggacttgcgagccgctcagctcccgggacgtttggtgcgtcttctaagggcgtgggcgagtttacgcgggccagttgttgctggtcgcatgggtaacgaagaaagttcggctaggcaagctcagtgatttttaactctgttggactcgatttgggagccgaatgcctatttcattcttttgtgggctgagactgggggtttgagaaagtggacgggggccaaggtattcatctcacagttggtagcaggatgagagacgagaagtcttgcggtgcaggagaaaccaagtcaggcaggcaggagacgcagcagtaggatctcgtttgcaggagccctgtttcttacacgctttctactccaggagctgctgctaaataatttctgctcagccatgtcgccggctccagatgcagccccggctcctgcgtcgatctccctgtttgacctcagcgcggatgctccggtctttcagggcctgagcctggtgagccacgcgcctggggaggctctggcccgggctccgcgtacttcctgttcaggtatcctggaaggtttcgtgtgaaacgtgacagggctccttacagcgtattgcccgttcagggaacacattcttattggtattcccgagcttaggaggccaattgatttatctttctgcttgattaaattcacttaatctctgggtaatgtccagcacagcccttgttttcaaacaagtctttttgccattgcatgtatctcctcacgttaacaccattcccttcaaaaacactttaaactttgtagagataaaattctcagatgtattccacatttaaccaggccccactcaaattattcctttttgctgaatatgaaacaatttattatttgtttcgtatagctttattttttgagagtctcgctctgtcgcccaggctaaagtgcagtggcacgatctccacccactgcaatctcc

SEQ ID NO: 25520 - DNA, 2300 bp, Homo sapien
aaacatgtacgtaaaatgaatgtaaataaaataaaattggccaggtgcagcggctcacgcttgtaatcccagcactttgggaggccaaggcagacggatcatgaagtcaggagatcaagaccatcctggctaacacggtgaaaccccgtctctactaaaaatacaaaaaattaaccgggtgtggtggcggatgcctgtagtcccagctacttgggaggctgaggcaggagaacggcatgaaccggggaggcggagcttgcagtgagccgagatcacaccactgcactccagcctgggcaacagaacgagactctgtctcaaaaaagatgaagaaaaataaaataaataaaacgaatgtaaataaaaactggccctgggcattctggaaaagaatccgatgagggtaaaagccttggggtcggttaaacttctccaacgtagccctctcccgagatccagcgtctgcaagtcctccccactggctgagtttgagtcttgtctaatttaaattagccaaacagattgtttaggtgaatcctaaagaaaataatttctgttcagtttaaaattatttttcactgcacaaaaactacttcccaaatgctttttaaagtttacatttccaattagtgtacagtttgtctaaggagaggtgcaagaaaagatgtagccaaactaaagttacacaaaacaggaccgacacggtggctcatgcctgtaatctcagcactttgggaggctgacccaggcggatcacttgaggccaggagtttgagaccagcctggccaacatggtgaaaccccgtctctactaaaaatacaataattagccgggcatggtggtgcgggcctgtagtcccagctactcgggaggctgaggcaggagaatcacttgaacccgggagacggagattgcagtgggtggagatcgtgccactgcactttagcctgggcgacagagcgagactctcaaaaaataaagctatacgaaacaaataataaattgtttcatattcagcaaaaaggaataatttgagtggggcctggttaaatgtggaatacatctgagaattttatctctacaaagtttaaagtgtttttgaagggaatggtgttaacgtgaggagatacatgcaatggcaaaaagacttgtttgaaaacaagggctgtgctggacattacccagagattaagtgaatttaatcaagcagaaagataaatcaattggcctcctaagctcgggaataccaataagaatgtgttccctgaacgggcaatacgctgtaaggagccctgtcacgtttcacacgaaaccttccaggatacctgaacaggaagtacgcggagcccgggccagagcctccccaggcgcgtggctcaccaggctcaggccctgaaagaccggagcatccgcgctgaggtcaaacagggagatcgacgcaggagccggggctgcatctggagccggcgacatggctgagcagaaattatttagcagcagctcctggagtagaaagcgtgtaagaaacagggctcctgcaaacgagatcctactgctgcgtctcctgcctgcctgacttggtttctcctgcaccgcaagacttctcgtctctcatcctgctaccaactgtgagatgaataccttggcccccgtccactttctcaaacccccagtctcagcccacaaaagaatgaaataggcattcggctcccaaatcgagtccaacagagttaaaaatcactgagcttgcctagccgaactttcttcgttacccatgcgaccagcaacaactggcccgcgtaaactcgcccacgcccttagaagacgcaccaaacgtcccgggagctgagcggctcgcaagtcctcaggtcgattgccggatttctgcaacacaacaatccccgtcactacggagcagcgaagaggacaaccggcggcgtccgcacctgagccccgccccacgtagagcacactattgggccgctgactgtccaagacccgcctcgagactttagtcccgtccctgaagccgagaattggccgttgtgtctccgccccccgtgcttattggccagcctggctgcgggtgacagtgagtggcagacacccggcctagcgccgcgggtcgcgccgagccgagccgagccgagcggagccggcggagcctctggaatcacccgggtcgctgttcctgaggtaagacgtgagaccggttattggaatcccaggccccgtgtctggccttgcccaggggtgcctgcggagccctaagtgagctcgcggcgggtaacggaggaag

SEQ ID NO: 25521 - DNA, 2300 bp, Homo sapien
gccagtacaaggccaggctggggcatatttccacctttatctcactctttgtctttgtactagagggaacattataagcttgactggcatcggtttaacctaaagcaacgtctcaaggacaagcctctcctgtctgccctggactttgaaaagcagagctccacaggtgatgagtggtagggggacctatgtaggagtaggacatggaggtataagaaagcactagtttagagtttgaggaaagaacaaaaatggggtaccaaacttgtgtatctcatattgtctgtcttcaggagatctttccagcatctcgggatcagaagactcagactcagccagtgaggaggacttgcagacactggatcgggagagggctacatttgagaagttgagccgacccccaggcttttaccctcatcgagttcttttccagaatgcccagggccagtttctttatgcctaccgctgtgtcctaggccctcatcaggcaagtgacagtacaggttgcatggctaaccccagccttttgtacacccagcctagatttcccttagcctagtgcatttctccctgcttctcttccttcctgttggttgtgggtatcacgcttgacaacatagtcttgaattgaaactggcctgaattgtggaagggttaagtgtaatggaattaagtttggaaacaaaccaatttaggtttgaattgtgattctaccacttcatcttgactgcctcgccaagcctcaaatttccttgtttgtcaaatggaaacaagcctcagggtggtaatattaaatgagataatgtttgtgaaaattggcccttagtttcttgctctcagtgaatgcaacagatatgtttctgatgcttctctgtcatcaaggatcccccagaagaggcagaactgctgctacagaacctgcaaagtagaggtcccagagactgcgtggtgctcatggctgcagctgggcactttgctggtgctatatttcaagggtgagagggtgctgcatgggggtaaggatggagtggatcctgttagccagggagcaccagctggtctccagtactgagtctgtgctgtctacagaagagaagtggtgacacacaaaacttttcaccgctatacggttcgggccaagcggggcacagcccaggggcttcgggatgcccgaggtgggccatcacactctgctggagccaacctgaggcgctacaatgaagccacactatataaggtgagttaagccttttagatctggtggtactgatccatactttttttgcatctctgttcaactcactgttaagtagggaggtttttgactcatatccttccaattttcattataggtagacaaaggtagatgagggattccccaggagccttagtcctctattctttctccgtgttatcctctactttccaccccttgcacttctgtgggccattttttttagttggagatttataaatagcaagtgaaggtatgcaggactgagttactctcttctctaggatgttcgtgacctgctggcagggccaagctgggctaaggcgctggaggaggctggtacaatactgttgcgtgctccccgctctggccggtctttgttctttggaggcaagggagcacccctgcaaaggggggatccccgactttgggatatccccctcgccacccgcagacccaccttccaagagctacagcgtgtgctccataagctgaccactttgcatgtctatggtgagcctttgctccagatcccaattccctagaccttcctgttctctccaacctaagcctccattctcattggtatatccagaggattttctaagccttggactgcagcccagctacatctgcattgagagaaacctgcgctagcttctcctcagctaaggttgagaaagatcttttcttttatggcagaagaagaccctcgggaagcagtcagactgcactcacctcagacacactggaaaacagtaagagaggagagaaagaagcctactgaggaagaaataagaaagatctgcagggatgaaaaggaagcgctggggcagaatgaggaatctcccaaacagggtttgattactatctggcaactgtcagatctgagtttctgtcctaaaaatgcactggcaaattccctactctcataactgacccatttccttatttaaacacacacccacagtgtctatcttagcaattactgagacatgtttagtgacctttccaaatctattatctcttttgttatggatgtttccccagagctaagaaaatcttt

SEQ ID NO: 25522 - DNA, 2300 bp, Homo sapien
aaagcttataatatagtggaagaaactgattaaaaaaaaaaaaaacagctgggcgcggtggctcatgcctgtgatcccagcactttcagaggcccaggcgggtgcatgacctgaggtcaggagtttgagacccacctggccaacatggcaaaatcccatctctactaaaaatacaaaaaattggctgggcgaggtggtgggcacctgtaatcccagctacttgggaggctgatgcaggagaatcacttgggcccgggggtcagaggttgcagtgagccgagattgaacaactacactccagcctgggtgacagattgaagagactttgtctcaaaaaagagaaaatcctatcagctgtatcttgacaaacattaaatttaagtgctttttatcacccccattgcccccaccctggtccaaaccatctctctcagctggcttattttatagcttcctaactggtttcccttgtttgccctctcccccatacaatctgttctcagtagagtagccagtgtgatcctgttcaagtataagtttaaagatacatctcagatcttgtcatttctctgcttaaacctctctagtaggttctcatctcattcagaatatgaaccataaattccttaaagtggtaggtcctacacaattggccccagtcacctcctcgacattattgctcttctcccccatgttcactctgctccagccacagtggcctcattgctgttcttcagacccaccaggccttgggctttgaggcctttgcatgtggtgctccttcatcacaagcctcctgcagaagtcaccttggtgaggccttcctggtctctctctcgctctctctatacatacatatatatgtatgtatatatatatatatatatatatacacacacacacacacacacacacacacacatatatatatattatttttattttgttttatttttgagatggagtctcgctctatcacccaggctggagtgcagtggcgcaatctcggctcactgcaagctccacctcccaggttcacgccattctcctgcctcagcctcctgagtagctgggactacaggtgcccaccaacacacccggctattttttgtatttttagtagagatggggtttcactgtgttagccaggatggtctcgatctcctgacctcgtgatctgccagccttggcctcccaaagtgctgggattacaggtgtgagccgccgcacccggcataattgttatttttttttgagacggagtcttgctctgttgcccaggctggagtgcagtcacgtgaccttggctcactgcaacctccgattgggttcaagtgattctcctgcctcagcctcccgagtaattgggattgcaggcacctaccaccttgcccggctaattttttgtatttttagtagagacaggtttttgccatgttggccatgagggtctcaaactcctgacctcaggtcatccacccctgccttggcctcagaaagtgctgggattacaggcgtgagccaccacacccggccatcccctctatattttagtctccccatataccaccatttttgtttgtttgttttgagatggagttttgctcttgttgcccaggctggagtgcagtggtgcagtctcggctcactgcaacctctgcctcccgggttcaagcgattctcctgtctcagcctcctgagtagctgggattacaggcacccgccaccatgcccagctaatttttttgtatttttagtagagacagtgtttcaccatgttggccaggatggtctcaatctcttgacctcgtgatctgcctgcctccgcctcccaaagtgctgggattacaggcgtgagccgccacgcccggcccatttgtttttaagaaacactattttaaggtttcctatgttcaaatttcattggcgtgcaaatatacaaggtgcttagggttgggaatttcttgacaagagtcattgcttcccatatttagtggtgagcaagtgtgatggtagcacctaacacagaagctctgctccttcctttagacttccttgccgcagtggactcctggttcaaggtcttgctgcccaagatatatccatggctttatcacaatgggggcaacatcattagcattcaggtacaagggggaagtgactggagcaggggaagaaggtacaaggggtccttgacctccatcccatagctgggttccactttccctcccctctggcaggtggagaatgaatatggtagctacagagcctgtgacttcagctacatgaggcacttggct

SEQ ID NO: 25523 - DNA, 2300 bp, Homo sapien
tcggatccttacttttggtagctgtaaaataggtataatagtacataaggttaagtagcttaactgtgaggccagactgactagttcaaatgacagctccgttaacgtagttgtgtgaccttggacaggctacttaatgtttctgtcctttcctctcctcctctgtaaaatggaaataattatctacctcatggagttgaagattaaatgagatgtacagtgtttaatacaatatctgacacatagccttcagtacgtgtcaataaaccgtaattattattaccctgatcttcacatcccattcttgagactgtaaaggcaaaaggaacggaaattcacagattttcgagctttggcacaaagcagttgtccttaatatctgttgcggaggcaggcaggggtaagctggagaggggtgcacttccaaagaaggtggaatggccaggagggaatggctgttttgctgaaacaggactctccaggaaagaggtccttcttgtgacctggttcctcccttccacaccccggatcaccctgaagattttccaatggtttcccctggttctgaacctgttttagccttttggttatgacattgattcatccagatttaacctactatatacccggccctgtgctagaggctgaggatttgagatgaacagggcactccctgtcctcagggagcccagtcaagtaaagccatgcttctcaattttgaaggtgcctaggatcacctgggaatcttgttaaaatacaaattctgattctataggtctgaggtaggatctgagattttacatttcttttgtttgtttgtttgtgttttttgagacagagtctcgctctgttgcccaggctggagtgcagtggcaggatctcggttcactgcaacctccgccttccgggttcaagcaattctcctgcctcagcccctacccccacccccacccccacccccacccccaccctcggagtagcttggaatacaggcgcgtgccaccaggcccggctaatttttgtatttttagtagagacagggttttgccctgttggccaagctggtcttgaactcctgacctcaagtgatccacccgcctcggcctcccaaagtgttgggattacaggcgtgagccatcgtgcccagccagattctccatttctaacaagttcccaggtgatgtcgatgaagctggttcgtgaactgcactttaacatgatgtagaaattttacaaactagtagagtaagggggtggctgcaggctggagaggaagtccaggctaaacgcctggcaacttgaggtggtttccgcccccttgctcgctgaggttccctcccaggaatccgacacgtgacggtctgtccgccgtctcagactagaggagcgctgtaaacgccatggctcccaagaagctgtcctgccttcgttccctgctgctgccgctcagcctgacgctactgctgccccaggtaagatgagacggtgaaccagcctgccgggtgcggtgagcgggatcagatccagcggatgagagaaagtccaaagtaacaaccaaacaacccgcagggctagttccatctcttccgctcttggcaggcgctgaccctcgacgctccctccaggcgtctgctgagcagcgtctctttctctttataggcagacactcggtcgttcgtagtggataggggtcatgaccggtttctcctagacggggccccgttccgctatgtgtctggcagcctgcactactttcgggtaccgcgggtgctttgggccgaccggcttttgaagatgcgatggagcggcctcaacgccatacagttgtaagaagtgctcgcaagagccgcggagggatgggatctactttttctaccgcccccttataaagaaggtcgggacaggaagactgccaggactcctaggccaagggtgggaaagggcaggccaggacctccttccaaccgcttcctggagattccctgcaaggcctgagccgttaggcctccctggcgtctcttcaccttggttcctattaacctcttcctttctcagttatgtgccctggaactaccacgagccacagcctggggtctataactttaatggcagccgggacctcattgcctttctgaatgaggcagctctagcgaacctgttggtcatactgagaccaggaccttacatctgtgcagagtgggagatggtgagttagctggagaagggatagaaccagttatccttgtgcagttcctagactactcccatctgcccacactctagggccatctccagcacta

SEQ ID NO: 25524 - DNA, 2300 bp, Homo sapien
agcgcctgccaagagcggaagagatggaactagccctgcgggttgtttggttgttactttggactttctctcatccgctggatctgatcccgctcaccgcacccggcaggctggttcaccgtctcatcttacctggggcagcagtagcgtcaggctgagcggcagcagcagggaacgaaggcaggacagcttcttgggagccatggcgtttacagcgctcctctagtctgagacggcggacagaccgtcacgtgtcggattcctgggagggaacctcagcgagcaagggggcggaaaccacctcaagttgccaggcgtttagcctggacttcctctccagcctgcagccacccccttactctactagtttgtaaaatttctacatcatgttaaagtgcagttcacgaaccagcttcatcgacatcacctgggaacttgttagaaatggagaatctggctgggcacgatggctcacgcctgtaatcccaacactttgggaggccgaggcgggtggatcacttgaggtcaggagttcaagaccagcttggccaacagggcaaaaccctgtctctactaaaaatacaaaaattagccgggcctggtggcacgcgcctgtattccaagctactccgagggtgggggtgggggtgggggtgggggtgggggtaggggctgaggcaggagaattgcttgaacccggaaggcggaggttgcagtgaaccgagatcctgccactgcactccagcctgggcaacagagcgagactctgtctcaaaaaacacaaacaaacaaacaaaagaaatgtaaaatctcagatcctacctcagacctatagaatcagaatttgtattttaacaagattcccaggtgatcctaggcaccttcaaaattgagaagcatggctttacttgactgggctccctgaggacagggagtgccctgttcatctcaaatcctcagcctctagcacagggccgggtatatagtaggttaaatctggatgaatcaatgtcataaccaaaaggctaaaacaggttcagaaccaggggaaaccattggaaaatcttcagggtgatccggggtgtggaagggaggaaccaggtcacaagaaggacctctttcctggagagtcctgtttcagcaaaacagccattccctcctggccattccaccttctttggaagtgcacccctctccagcttacccctgcctgcctccgcaacagatattaaggacaactgctttgtgccaaagctcgaaaatctgtgaatttccgttccttttgcctttacagtctcaagaatgggatgtgaagatcagggtaataataattacggtttattgacacgtactgaaggctatgtgtcagatattgtattaaacactgtacatctcatttaatcttcaactccatgaggtagataattatttccattttacagaggaggagaggaaaggacagaaacattaagtagcctgtccaaggtcacacaactacgttaacggagctgtcatttgaactagtcagtctggcctcacagttaagctacttaaccttatgtactattatacctattttacagctaccaaaagtaaggatccgagaggttaagtaacttgcccgaggttacacagctagcatgctattaacactcaatttagaaactggaagtctggttcacaagcctgagctcttaaccactgagactaggggtagtgggatacaggccagagcccagaaggttgtacgggatcaggagaccaggccaccagacccgcccctcactggatccccctccaggctgcagtgtagttggccgctttctgccccagagcgccagaggtatgaagcctcctacctccaacattgggagatggaggtcctgggggcctcgggccgagcccggctttgctcccctttggcgtaggtgcctgcgtcttgacccccaccgaaggccaagtagagaaccctcaccagggtcctgggacccgtccacccctacacctagctagcccggagcctctcagctccgcgtccccacatcctccggatgcccagcggttgctgagataccgcgggccgttacgccggcgcggactgatgatgtcagcactgcttccggtcggtggcgcttctctctggcccgagccaggtcagtccggcagtgcagatggcccatcccgggctctgggctcctagaccggggtgggccctgccaggagtgggcctgagcctcgcacgtcctctgaaactacgctatgctctgcttttgcggcgcgatgggcgtgggagcgggggc

SEQ ID NO: 25525 - DNA, 2300 bp, Homo sapien
ggtcagagcctggcgggagccctccacatggatgcatgcttgattcatggaacccaagtccattaaaactggctgcccctcatctccaagcaatatattggtgggcttcaagtctctgtagagaagtagaagtgacctatgagcatctctggacaggaaggctggaatcccagcaagcaaaagaatcatacaggctgtttcttgggagaacagagacctcccatgtctcctggtgaggctcttcctctgggccccagcaagcacacagggtcctcccactgacctgtgggcataacccttggcatgaatggcctcaaggcctctgcagatccccagcagcagccaaaggatttgatcctcggtcaggaagttgcctttgtccttcagcctttctatctcattccacagcgtacctctctgcaacacaagtttccctacagttggagatgtttttggagcctctgctccttaggcctgatcccttccctatgtcaaagcctatcagccctttcatgatacacacctcaaactcaaaatctaaagtggccaaacccaggacatggtccctgcttcctaacatgctggactgctcacacagcccttgagtaggtggctctgctgcaaccccctccataaccaggagtctttctgaccttgaagaatggtagcagcagccaggcctcatgcttagcaccccgttccctcagacagtaagccacgaggcgaaggatgttggggtgattgaagaggcgatgcatgtcggcttctcgctgggcctcctcccggtcctgctgctcgtgacacaggattcgcttcagggcgtagaagtgtccatcatgtaacccttccactaggtccacatagctgaacccactgtgggccaaaggggtcaataaagggccatggtcatctcccacatggcttggacctagagaaatttcctggtggggagtggggtgtccttcccatttagcagaaaccttcccaagatgtggctctaagagaaatctgaagaatattacaccgtgagctcctcaggagcagagatatagaaatctttgaggtcctatggtcgtaatagagacctctgcacttgacagatgctaaataaataatagccaacacttatcaagtacttgtcaaccccgcattgggtgagacattttatacacattatctcatttaatcctcacaactccatcagtgagggataataatcatctccattaagctgatgaaaaaaacatggtttatcaaggtcacacgaggtggatttagcaggcctggctccagaatccaccttcttgatactgtgtagctaggttctgtcaggtgagagaggacagggatagggataaaacccttgtgccccaagcatatgcacaccgctgtccttcaatgatcataaacttgaggactagttaactgacttccaaacactcacccctcccccagtttctggatgaagaggtagcgcttattgtcaatgatgacagttccccgagagcagacacacagcgcgtggcccataatgtctcagtcatcctcttcaaggacggtctgaggctaccgaagagctcgtccagggtgagtgggctcttccaggagatgcgctgggggcccagcggatcatgctggaaagaaaacaacggcagggtcacaggtccggcacaatccagacgacccatgaagtaccaatgcggagagctcaggcccaggtctctggaacctacactatagtgtagagaaaacaggccctgctccgtcgccagcttcaggggtggggtcaggcgccttacggcctcaggacacacagcggctaccgggccacttcctccaaccccagcccatctttgggcagcccccgctcccacgcccatcgcgccgcaaaagcagagcatagcgtagtttcagaggacgtgcgaggctcaggcccactcctggcagggcccaccccggtctaggagcccagagcccgggatgggccatctgcactgccggactgacctggctcgggccagagagaagcgccaccgaccggaagcagtgctgacatcatcagtccgcgccggcgtaacggcccgcggtatctcagcaaccgctgggcatccggaggatgtggggacgcggagctgagaggctccgggctagctaggtgtaggggtggacgggtcccaggaccctggtgagggttctctacttggccttcggtgggggtcaagacgcaggcacctacgccaaaggggagcaaagccgggctcggcccgaggcccccaggacctccatctcccaatgttgga

SEQ ID NO: 25526 - DNA, 2300 bp, Homo sapien
tgtagggctcgaccacggctgtagacacctggggggctgggtagatggagaattccagcttggatttcttgccatagtcaacagagagccgctccatcaggagtgaggtgaagccagagccagtgcccccaccaaagctgtggaacaccaggaagccctgaagtcctgtgcactggtcagactgaaaggcaagaacgagaaagaacagtttaggtaggggaggggcctgagggactctatcacctggctccataaagcgtaagatacatcagcagtcagggcaaatactgaggatgccatagcagcaccacactcgagaccatgtatagttagagatgacctcctgaaaggatctgaaaaaaaatattcctgaccattagcacagtctcaaaagttccctccctcccaagacacactctcaccagcttgcggatccgatccagcactgggtcaatgatctccttgccaatggtatagtgaccacgggcatagttgttggcagcatcctctttcccagtgatgagctgctctgggtggaagagctgtcggtatgggccatttcggatctcatctggaagggcaaaaaccacaaagctatgctcagcagggaccttcctcccccagggtggtagctgtggccagatgcatggaaggactcatcctcctgccagcctgagataccagagtgtgagagaaacccagaccagctgcccaggccagtctcagatcagcttgccttctgcagcttcaagtacggctaggaattttcagggctaggaatgcctggtctaaataccctctctctccagggagaagctttgagtcatgctccacccccttcaattttgtccccacttcctctcaccaatgaccgtaggctccagatccacaaaaactgcccggggtacgtgttttccagcaccagtttcacagaagaaggtggtgaaggagtcgtcccctccaccaatggtcttgtcactgggcatctgcccatcaggctgaatcccatgttccaagcaatagagctcccagcaggcattgcccatctggacacctgcctgccccacgtggactgagatgcattcacgctgagggatagagagaggggacacagcatgagccccacatccacaagtcctcaccttgcgagtctctcttccaccctatcatctaccagctaggatgactcagttggcaagagtggagggttggggctgggcagaggtgagaagagagtagcagcctgcccgggctcccaggtacaggactccccacctggaggcacccagcaatgcaggccaacctcttagcccacttctcagtggggaatctgtcaagtgagcactgtggctccacatgacaaaaggtttcctagaggtatgggtttacagctagaggccccccccccacttgattaattatttgctttgagtatgaacagctagaattcatagaaccctttccctctttctttcctgtaagctgcagaggtgtctcagccatccaatctggcatcaactgaccacacgccatcaggatgccctcctccctcacctttaaatcccatctggctctggggatcaatcccatctggctcctctccccacctccacccccgcaccctgggtgtcttcaccactttcatctcccgtgtcagcccgcacggaaatagcggcggtaatgcttgtaagctcagacagcaggggccagcaataaggtttgagggtactggggcgctcactgccttaggctccgtccctgtcagcccgaaattaacccctaaagcactaaagtccggcagggcccgcgcgctcttcccacaccgaaatggcggggtgacggtttccaaatacccagaaaggaagtggaacctgcggtgaggccccagaggtgacccgccttgtcccgggcaggatgggcgccatcctgcagcccagccctacatccgctctccctctggagtctttacagttatttcccagcccaaagcggggattgggtttcggcccccgctcctgggctataaataccaccccctacatgcacctctctcccctccccccaacctggcctcggcccgcgcagtgctcagcgccagctgtctctgcccatccgcgcacccgggcttcggctggagagggccagctcgcttcaggaggccgaaccccgttcccaccaaccctctcagctcagacgcggggtgctgagtcacggggggggggtggttctgtggatagttggaatgcatacacagaggaaagggggatgcggcaccaggtaacctgaccccttccaccttc

SEQ ID NO: 25527 - DNA, 2300 bp, Homo sapien
gaccttattccccaaagaagcctcattatacgcccctgtcagttttctttttatgaatgagtcttgttctcccaatcagatggcaagtctactgggaagaaagaccttgtcatatttcactatattcctttccatgccttgcctattttgttgatagagagttgccatcactagttctttcatggtattatgttgtgttgtcaggtgatgggggagggaggggtgaatcctttccaagtgatgtagagccaggaagacaggtttcttaagatctgcaaaccagcagcacctggggcactgccagatgactttccccagtgaagggagacaattagaaaatgcaaggcaggctggggtggttgctcaggcctgtaatcccagcactttgggaggttgaggcgggtggatcgcttgagctcaggagttcaagacaaatctggacaatatggcgagaccttgtctctactaaaaatacaaaaaataaggccgggtgtgggggctcacacctgtaatcccagcactttgggaggctgaagcaggtggatcatctaaggtcaggagttggagaccagcctgaccaacatggtgaaaccccgtctctactaaaaatacaaaaatcatccaggcatccatgcctgtaatcccagctactccagaggctgaggcaggagaatcgctagaacccgcgaggcaggtgttgaggtgagccgaaatcgtgccattgcactccagcctgggcaacaagagcgaaactccatctcaaaaatagataaataaataaaataagctgggcatggtgttggtgcacgcctgtggtctcagctactgaggaggctgaggtggaaggatgaggtagaaggatggccttgagccgggagatggaggttgcaatgagctgagattgcaccactgcactctagcctgggtgacacagcaagacactgactcaaaagagagagagagagagagaaagagaaagcagaagtagcttgaaaagatggggtggagagaacggaatgaaatgtagaaagaagggcttctgcggagaccaggggctgagtgctgagaccattaaggtgcgggttgcagatcctgctcttgggttagagacagaagagaccaagagtcagaatcatccaagatatgagaatctcgattttcttcttttctcttcagaggcaacagacattttgatagcttacaacaatgtttccactatgacatcactgtctccttttcacccacgaaaatgtcaaggactcagtgaggttaagtcacttgctcaaggtcacacagggtagcctggaggagaatccaggtcctgaggtcccccggtcagcgctcccgcagttctggcagcaggggagtgggcaggtgccctcagcgagggcatcatagtgactgcgctgatgacagcgccactgacccgcgggcggccggcgagccgcggcagattccggggtcggccccggcagacaggctgcggggctcgactctgcgggagcgcctaaggcattggcaatctggggctcaggctgtgcagttctgggtcctcggccgcccacaggcgtcggcgaaaggctgccgccccggccggggaccaggaagcgtcaggcagctggcaagggctccccggggacgcgccacagcctcacagccggcccgagtctcctgggaggcagggctggaagggcaggggtgaaggccagctgtggccgcttgggaaggaccgcctcgcctgctcccgacctaagtcagaacacctggatgaccggtgcctccaggacgcaggtgcaggtgagactcgccctgccacagcaccctgcatctccgcggaggccctcgggagcccagcgtgtctgctcaaaacgaggaaagaatggttaaagcccgaatcgcgactcttaatcccagcgggacaggtgagggacccccgcgcagcttggggagggtaccaggccaggctccgcccctcgggggggccgcttaccctcccgggaggcgtggcctgcgggccgcccagcctctagtgggcgagcggggaacgcgggccccgccccccccccgcctataagggcggtgcggcactgcagctagcgcagttctcactgagacctgtcaccccgactcaacgtgagacgcaccgcccggactcaccatggtgagtgcggcccggccggggtcgcgcctgtcccctaattgcccctctcctttgggggacacttcttccaggcatgctcggggacctccaccgggcgttccgggtctccaggaggtgcgagggttttgcatcctccctc

SEQ ID NO: 25528 - DNA, 2300 bp, Homo sapien
taaaaatgtcattgtctttcattagttggcatttctttgtggacaaaggaaattaaacctttgtctgctagatgtgctccatataatttccctcagttgtcatttgtctatgtcctatccccttgagcacagagattggaatttaaacttttttatattctttttcttaatataacaagacatacacggtaggtgctagacaaatgtctgttggcacagcagagtaagaagaaaaaggcagagatctggaaaatttggagtgacttaacccaaccactccttcctcttataccaagtctaacccttagtctttgtgtcagtcaggactcttataaacagcagaagctaactggcaaattgtttcaagtcccctgcccccaacaattatagagatatcggatagcacacagaatcaatgcaagggccagcaaacaagggtcagcaatcagacaggcacctagggaagctgggcagccagtaccacagtcaaggttgggcacaggacagcctgtgtaggagactcctgtcccctccaccctccgcagtgatcctcctactctcgtccctcacctgcggcagtagcgctgacacttcctcctccagacactagaggccgctgttggccccatcgcctccaccgccgccgcagaaatgaattcctaaaccagccttgctattccgtgacttgctccagattcaaagtcccagttggagcatccgattggcggagctcatgtcttctgcctgcaaccccagagccgagtcagggagagcaagcattggggctttgtggcaaatggtggcctgctttccattagggcccttgcgatgggaattccccaaatgtaggcaggaggttctgatggtgggcagccaggaaaccaggacactcacaccaccttcttctctcacgtccgcctcaaacccttctcgttggcgaagtattcctgggtcccccagcctaaagcacttttctggactcacataaccattattgcttgagccaatcacgatgccagcaggaccgcagtaacacctaattcgtaccatgtctcatttgactttcaaacaaccctaggcactacctatatttagtgagaaaaaaagagtgctcagagattttcccaagtctcacagtaatgccaggttgtactctgtttccaaagcctcgggtttcccagcgggctacactgatgggctggtatcttatcaagttcaagctctgcaaaggcagggcttgggccacattcttctttatacggcctggcagcatcttgaatgcagaaaaatgctcagctaacgcctttggattggcctggatgggatcaagcaggagccagttctggaaggtttcctaactctccaatgaggcctgaacccagggagcattttgaagtggaataggcctactcaggatcagtttgggaagacttgaacctggggaattccgttgtacggccccctttacctcacctcccccaaatgtgtcaaaactgtcaacaagaggtttgcaggtgttcattatttattcatcccacgggtagttttgaacccctacgactgctctaatagaccagtgagaaaaaacacacaattcctgtcctgtgaaatcgacattctagtgggggaggtgaatggtaataaaaaataatcaaaccaataaatgctaatttgtggctctaacaagcctgatgaaggaaatgccacgagatgctgtaaaaggcagttctgacctactcaggaaagccagggcagcctgctgggggacctggggctggagctgggagctgaagaagggggaggagttagaaccgtggtggggggagggagggaagagtctgagtcctcgaggtgggtgagtaagcatggatcatcgctcatgtttataagaaagtgacagaggaacctgggggccgagcggcttgtttgtgggctgccccagcctccgtgcgagcgcttctcgcttggatggaggcggggccgcagtctcccaggtcccagctggggctgacgtcgtcctggtgtgtgcccaaaatagccggctccgccctcttctcccggcagcccctgcaggcccccacccccccaggggacaggcggagccggccttctccccgtctctagtagtttccgcaccgctgacgcatgcctgcgcgcacagctgggccgggcgcgtcctacgcagcagccgcgagccgggctgcgggtgccagacggttcccggcggggggcaggggcggggcgccgcaggaggccgggactcctggcggaggaggtgcggccgggggcccgggtcaggc

SEQ ID NO: 25529 - DNA, 2300 bp, Homo sapien
ggcccctgctggacttccgcaggtgagcgcgggcgcccccgcctggagggaccgcatgggcgggggcggagccggggtccgcccgccgctcggcctggagccccgggtcgggcctggagcctcggcctctgacttctggccgcccgctccagaccccacgctcccacccctaaaagcaggcctgaggctccggctgtgcccttccccgagcctccaccacccgcgtgggccagctccgcgccggccgctgctgctctgctccctccctctcacgctcccgggactggctccttctcctccacctgcttcctccagagggccctctgctttctgtctcccctccctctccaggacccctgcttcctttctccttccagttccctcctgccccgctgtctccaggccctgcactgcgctgccttgctgccccctccgtctctcactcccgcctgcccgtctcccctccttcatccctctccgtccctccttcatccctctccgtctcttcgcctcttttttctgtgtctttcattctttttcctttcctctttcttcctcttctctctccccatctctctctcactctgtctctgcctcaccctttccctctctctccatttctccctctccgcgcttctcttcctttctctctgccctctcccctgtttttctccacctccttcccctgtctgccagtttctctctgctgctctgtccgtctctccctctccctcccgctgcctgtctttcctctctctgtccttccctctcccttcttccctctttctctctctccctcacagctgccagtgtcatttttgtgatctgcagctagtattctcactccagttgcatagtcacaaaagtgatcattggcaggtgtggctgctgcatggacagacaggacatgtggcccggggaccaccccgagctgggagcaaggggtacagggaagaggcaaagactgtcgaaaggagtgtgggaggatctctggattctggggggctcagtggagcaggtggggactagacaggggctacctgagggacttacccttttccaacactgacaccaagacaggtcagccctccagcgtcccctgcttttcctagccccagacaggtacttgggaagcccactaccaagggcaggggcccacccacactgcgcccttctcctggttctctgtcccttgccaagctggcctgatgtctctaggtactggacagaggagcagagctgggggtggggacatgggtatagtttctgaacctcaggacagcagtttctaactggggtccctgaggcctgagacacaggcgtcttgaaagcagtgccagggtatcagagctatttccttttttccatatttaaaaaatcctggtagaactagtgcatggatctgttttaaagctgcacagataagctaaaagattgctttaggctggaattatgtaaactcagttggcattagacatccagaacaaataaactgttgcttaagaaatgcagttcggggccgggcgcggtggttcacacctgtaatcccagcactttgggaggccgaggtgggtggatcacttgagatcaggagttcaagaccagactggccaacatggtcaaaccctgttctgccaaaaatacaaaaattagccaggcagggtggcgagcgcctgtactcccagctactcgggaggctgaggcaggagaatctcttaaacctgggaggcagcagttgcagtgagacgagaccgtgccactgtactgccacttgggcaacagagccagactccctctcaaaataaataaataaataaataaataaataaatgcagtttggtcaagcccccctagaaggaaaacaaattaataaaagagaccctaagaaagtgaccctgagtaagttccttggcttccctccattccgctacctgtgagatggggatgattacacatactttagagcagaggttcccaacctttttggcacaagggaccggttttgtggaagacaatttttccacggctgggagagggggtggtttgaggatgaaactgttccccctcagatcatcaggcattagattctcataaggagctcacaacctagatccctcacatgtgcaggtcacgatagggttcgcacttctgtgagaatctattgcaatggctgatctaacaggaggcggagctcaggtggtaatgttcgcttgcctcctgctatgcggctcggttcccaacaggccatagactgacactggtccatggcccagggattggggacccctgctttagagggc

SEQ ID NO: 25530 - DNA, 2300 bp, Homo sapien
ggccactcctacggggaccttccagggccttcacctgcccagctttttcaagactctgggctgctctatctggcccaggagttgccagcacccagcagggccagggtgccaaggctgccagagcaagggagcagcagccgggcagaggactccccagagggctatgagaaggaaggactaggggatcgtggagagaagcctgcttccccagctgtgcagccaggtaacaaggtcctcagcatccacctccctgtgagggctgctttgggggaaccatggtggggcccttccctgacaatctatgcgtttgttaacttgtccttaaagtcattcatacatttaaggaatgtctactgacaagctgttctatgccaggcactagggaagtggtggggagtggagttgacgtgactctccttccagtggagagtcaagatgtcctgaagtttgatctgggtcccaggaagaactttcccccaaagtgtggacaagggctgggaaagggagggcatctcttggtgtcctggtgtctgggaagactctcttaacatgctagtcccttcccaccctcactcactcatctgcatccctcaagttcactgcgcaatcagccctaagctctgtgtctggctcccagcagatgcggctctgcagaggctggccgctgtgctggcgggctatggggtagagctgcgtcagctgacccctgagcagctctccacactcctgaccctgctgcagctactgcccaagggtgcaggaagaaatccgggtaagtgtccaggcagagggagggaccaatatctcccggctccatggaggcctcttgccctgcctcgagaccacttggagtagcctggagaggaagagtcaggcttcaggggaaagagttcctttgagacatagggtcattgccagcaaggcagggagcaagggggtagggtggcaagcttaggagttagatcaggaaaagactagatggtggaagtaatggaaaaagcagccaacagagggtgtgagcagggaaaaggaggcatcgggaaggatgggttggtgacaatgagggcctaaaaacgggcatagccagtactaagaagaagccagtaattgatgggtagagaaataactgaacaaagaatagctttgagagagatggccaatggtagagggaggagttaataaaacagtaaattgggaggaggaagcaaaaaggaatgaggccaggcttaggatgagaccagtaacagggtcttggtcactgactgagatgaagaccacagcaaatgttccaggctcagggtctctggccctttctcccacttgtgttgtgtagaccttggccatggccatttttccagactcttgtttttcctgtctcgcaggaggggttgtaaatgttggagctgatatcaagaaagtgagtccccagcacctccttgactcataatcaccccatggcagcacgcccccttgccaaacctaaatttcaaattcaggacctagaatctgtatcctcccacccctcattttgggggaaaccaaggcccagagaccgcaagttattgcctaaggtctcccatcaagttgatggcagaactggagccagaaaactgaattcttaattcattcctcttttcactacaatcatttcagaccatgctctgaggattcctaggggaggagggaagtttcgagcagagagcccttcctgagcttctgtagcaggaggagctctgcttctttctgtttcatgtgttggatttctaagactttgtggctaaacaaaagtctagaaaccatcgcctgcctgtttgtcttttaccctcaccccagcttctcttgctgcaggggttttctgtctccagccccattctgtggattagtacagaccattttcaatcattcaatcctttattcattcatgcatccacttacttgtctcagatgctctggtgtcctctctgtacccagcactgcagtggtccctgggggtagaaagtgaaaagcaggtcctgagctccactgtggagagctccgagtccagggtaccccttcccccagcactgtccagaggccacacctccaccctcttctgaacagacaatggaggggccggtggagggcagagacacagcagagcttccagcccgcacatcccccatgcctggacaccccactgccagccctacctccagtgaagtccagcaggtgccaagccctgtctcctctgagcctcccaaagctgccagaccccctgtgacacctgtcctgctagagaagaaaagcccactgggccagag

SEQ ID NO: 25531 - DNA, 2300 bp, Homo sapien
ggaataatgtgaataattcagtagagaacaaaggaaattatgtaggaaagaagagagaattgcaaggagaatgttcctgaataggtgagaggggatgaaatctagtgctcagaggaactggctttaaataggaacacagacagctcatctaatgtgaataagcaaggaggcaggtgtggatgttggtagataccagaatacaagttaagagcagcacagattttaaatccagaactagagaagaaaaaatgagggtgaaaagtgggaaattattcctttagaataagtgactgaactttcctgagagcagagtttttttgggggaaagagtcaaacaggagagctgtctatgaataagatgatgatgataatggtgatgatgatgatgatgacgacaatgaagatgatgatacatgtttaaaacatgtggattatgctttagagttttctaagcactttgatttccctgatcacacttgatcttcacaacagccccctgaaatatgtatcgtttccactttacaaacagagaaagttgaggttcagggtcaacacaaagaataataacaatagtaataataattatggtaatagcatttgttaaaagttcactacatgacaggcactattctaaccgtttgatatgtatatgtgttattttaatgataataacaatcctaggaggtataaatccccattttattgatgagggaattgaggcttggagaggttcagcaacttgcccaaggttacataattcatcagtagcaaaggcaggattcaaacccaggtggtctggctccaatagctgtacctgagggtgggaagaagacagctcagatcacccactgagtttgtccctctactctgacaaaccccatgagctgcagggcagagggtacagttctgatccccagtggtccccgttactggatccccagactcctgaaccaacttacgctgtcctctttcctgacaggattgtcctggcacgatgacctcacccagtatgtgatctctcaggagatggagcgcatccccaggcttcgccccccagagccccgtccaagggacaggtaggcagcctttctctacaactctagcaatggtgaggctgatgaatctgtggttgtcctaattgatggagagaaggggaaggaagtgggcaccaaggccagcatgctggggcacaggtaaagaggtgcaggaatggtcactctctgacatgctcacatgaccaagaggagctgagctcatctctagggatccagaaaaacgggcattttttgaatgttttgaaaaacattgacattggctactttaaaagaagcatcaatgtagtcatcatgggagaaattagaatgctgttggactgaagttgttcaatattccatttcattactatgtgaatttctatatgacaggagccaccatcatctttttgtggttagggcctctaaaggcatcattcagactgcaaagcagaggaaagtaaatgaggtttagggagctcagatgatgataccaggatgaagatggcatagtggtggggggtggaggagcagtcctgaatatttggacatatacttggagagccaggtgtggggacatggcacacaggggcaacggggacagctgcagccacagttcatctagagaaattcctggttgccttcccctgctcctgtttgccccttctccatccccagcctcatgattacccagcctttgcagttgtttcagagactcagccatgctcaccagggaggcagatacctctgccctcagcttggccctctggtccctccccattcccacccagcccatctctcttcccctgaggtcactcagtttctaaagaggtcaggcctgctcttaaccgctgagcctgcctggccccgaatagttctgccttgcaggctctctatgccctttcccccgctccaacacacacactttgctttcctctacaggtctggcttggcacccaagagacctggtcctgctggagagctgcttttacaggacatccccactggctccgcccctgctgcccagcatcggcttccacaaccaccagtgggcaaaggtggagctggggccagctcctctctgtcccctctgcaggctgagctgctcccgcctctcttggagcacctgctgctgcccccacagcctccccacccttcactgagttacgaacctgccttgctgcagccctacctgttccaccaggtaagtccttgactctggtcccaccccaaccgcagtccctcagcccggacttctgctcttaccca

SEQ ID NO: 25532 - DNA, 2300 bp, Homo sapien
gtttacaggaaatacaggtgatatacaggttatacactggagaaatacagggaaatacaacatgaagaaaaaaatcagataaacccagaagaagagttctaaagaaaaattgacctggtctatcaacatgacaatgtcaaaaatgggggaggggagagaggatatggtgtctatgctaatttacagagattaagaaacataacaaaggccgtggttgttcttaattgactgttattttgaacaaaacacctgaaaagaaaaggcatttttggggaaacaatctgagaaatttgaatatgaactgagcattaaattatattaaggaatgcccgggcgcggtggctcacgcctgtgatcctagcactttgggaggccgaggtgggtgcatcacgaggtcaggagatcgagaccatcttggctaacacggtgaaaccccgtctctactaaaaatacaaaaaattagccgggtgcagtggcaggcacctgtaatcccagctactcaggaggctgaggcaggagaatggcgtgaacctgggagggggagcttgcagtgagccaagatagtgccactgcagtctggcctgggcaaaagagcgcaagactccttctcaaaaaaataaaaaaaaaaatttaaaaaattatattaaggaattattgtaaatttttttaggtgtcataacagcacttaggttatgcaggaaaatgtccttatttcttggagatgcataatgaaatatttagaagagaaatgtcatgatgtctatcattcatgtttaaatactaaaaagaagcaaatattgtaaaacatcaataaccattaagtatggatgatgagtatgtaagtattcattatgcatttctgtcctttttaaattttattttattttactggaaagcaagagaggaaggagatcaaatctgaacttaagaagctcactcccctacttattggatgactagagtggaagcaaaagagcagttactagctgattgctgcagtggtcgtggtgaaagagcacagtgtttcagttcaggtagtgaggatggacagaagtggactgatgggagatgtattttgcagggagaaaccataaaatgattgatagcctcgaggtggcacagacggagagaaaggagagtcaaagctaatgatgaggccaggcccggtagctcacacctgtaatcccagcattttgggaggcgaaggccgttggatcacctgaggtcaagagttcaagaccatcctggccaacaaggtgaaatcccatctccaataaaaatgcaaaaattagccgggcaaggtgctgtgcgcctgtaattccagctactagggaggctgaggcaggagaatggcttgaacccagaaggtggacattgcagtgagccaagatcacgccagtatccagcctggccaacagagcaagactccatctcaataaaaaataaataaaagctaatgatgacagctaatatgtatggagcatgtagtatgcaccagtccagtcatccttctaagtgatccatattagtgtaacgaacaaaatcttcacaatcactgtgtgaggcgggtagtaactattaacacctccactttgcagatcaggaaacttggacgcagacaagttaaacaaggtgcccaaggtcatacccttagtagatgccctgctagaactggaatctaggcatgcctaaccattttttcttaaggaagagaacagtatcttcaatgacaatgagtaagagtacttattctacccacttttctgcttcttgtcttcgggtttatcgttctggacccacctatctttcctggccccccacttaacttaacccttttcacccaccctggggcggggagacagaggtgatcctagaagagggctacagggatggggccaagtgggaattctagcgaggcgcctactatttgatggaggagggatgggctaggtaggtcccccgctccgacagggctcttacgccatatgtgacgcaaattagcttacgagccgggggtggaggtgtcgtcagcacccgcctgcggttggccgcgttgcagcgagaggggcatgtagaccccgcctcgtagggaggtggggagcggcaagccccgcctcagcccctctggcaggctcccgccagcgtcgctgcggctccggcccgggagcgagcgcccggagctcggaaagatgcggcgcccgcggcggcctgggggtctcgggggatccgggggtctccggctgctcctctgcctcctgctgctgagcagccgcccggggggctgcagcgccgttagtgcc

SEQ ID NO: 25533 - DNA, 2300 bp, Homo sapien
ttatcattttgatagccattctcctggtggtttaaaatcttaaaatacagagaggagcacactcacctttgttcagccgacccaaagaccaatatttccctttttccaggagcattatacttcacaaagcaggttcacgttcatttgctcttaggcctcaaattattgctataaatttattttaaaatagcatgtccagtacataatcagtgacaaccagataaacctctagtttttggcgtgacaagacagaaacttgtgtcggatcctcctaacattgggtatatactctaggcaaaatataaaaataactgtatgaaagcatggagactgatcaagagttagaaacctacagggagtatagtcctcaaaaaaaggaagtccaccaagtgacttatacatgtataggcttttcctctgaagatacttcagagttcactgcagtacacagggaaacagctctgtcagcaactggcagtcttactaaggaaacagcttttggagtacagagatgccagagcatctggaaattgaggaagaaatttagaaaatgaataaattacagagagaggaactcaaaatctgcatcctaactcccctccaattcttagctatcttctaaatggcacttgcgcagggtgagatttcaaggaacctagtgaaaaagtcaaatatctgaacagagattttggcagctgtcacagtgttagggtgactgagtttggagttcaggacccgtaaaatagagagttttggtaaatgactttgggttatgttgaaatccaaaaaggaccacaccttagccataagcaccatatcccaggactaagagatacaggctagaattgagaataggatgaagtactccttccctaaccagactgccacaggatcaagactttttaccaaaaatttaattgcctgccagaacaaactcaaactattaccctttaaagataataatataattcagatcctttgtaatgtatcaaccccaaatgttcactatacaaacccttaggtttaagtaatccactatctcgacctcccaaagtgctgagattacaagcatgagccaccatgcccagtttaataaatgttttaagcttaatgaaaaaaaatttaaatgccagtctaagagttagaaagctcacaaactagcttgtaagtacacaagagtgaaagcaagaggtcagttagctagttagttactacaacaactcaatttaaaagagtacagtgtccaaggcctggcatggtggctcatgccagtaatgccaacactttggggggccaaggtgggaggattgcttgagcctaggagtttgagatcagcctgggaaacatggcaaaaccctgtctctacaaaaataaataaataaataaataaaattggctgggcatggtagtgtgcacctgtagtcccagctactctggagcctgaggttgagtagaggtcgagcggaggttgtggtgatctgaaattgcaagactgtctcaaaaaaaaaaaaaaaaaaaagtacagtgtgcagtggtttggaccaaggcgatggcagtggatgtggagtaaagtggatggatgtgccatatataatatataatatataatattatatatatatatatagcagatcgaacctatatgatttctaaagggttttaagtgggccagagtaaagagtgtcaaggataataaaataaactaaattccttgagtgcctactgtttcatcgctgttcatatttgattctcacaacaaacctgagtaggtacaacttgcacccgtatcttacgtgccatccgtttctgcagccttaggactgggagtacaggcggtggttcttgggacccagctaatgcccgaaaggagccgggtcaggaattccaagagatgagggtggggaggcggtaggggaaggagctggggaggcgaccgcaggggcagggcccgctcacgattggctgaactgccgaggagggttaaacagattcggagtcgcgggctggtgggaagctgcagccccgctcagcccctcggccgtggccgctaccttcactgagacttggccggggagtgagcgcgccgagcctgggaggatacagcacccactgtggcctgggagctccgaggggctccagctgcttgtctgcttcctgctgctgaacagctgcccggggggctgcagcgacactagtgcccacggtcaggaggaaccctggggggtgcgggcagggccaagaaagcgatcctgagaagtgggggtctgcagggggcctcaaggctaggaaacttggaagta

SEQ ID NO: 25534 - DNA, 2300 bp, Homo sapien
ggggcggacgaggaagcgtgacgagcggcggggcgggtggagcagcctggcgaggagcggggcggggtgggcggcacggcctgacaaggggcggggagcgcaaggaggcctgacgaagggcggggcggagcaagggcgggggcagggcgagtagtggggtacagcgagggccggagcggatgggggaaacctggtgaggggcgggacaaagcggggagggcggtgcagcctggcgagaggcggggcggacgaggaagcttgacgaggggcggggcgggcggtgcagccctgcgaggggcagggcgggcggtgcttcctggcgaggggcggggcggggcgggcggtgcggccaagctaggggcggggcaagggcggggcaaggcgggtggtggtgcccagcgaggggcggagcggacagggtaagcccgccgaggggcggggctgaccgaggtgggcggggcggatgccgaggggcggggagaggtgggcggggaggccaaacatggggcggggcggcgcggccggggaagcgtgatgaaggcctacgagtgcggcgcggcctgaaggggcacgcgggggacctgcaaagctagtgaggggcggggcaggcggcgcggtgggggcgggccgagcccggaggccagatgagcggacacagccccacgcgcggggccatgcaggtaagtggctcccgacggccccacttgaatttcgatcccagaccgggtccggcgccctccggggcccaagcttagcgcggtgctgcagtggggccgcctgacccaaagcgaaaccgaaagccccgcggagggtgacctgacgactttcccgggactggaagggggagtcctgcgagagactaggtgggtgcgagagaggagtcagggtgctccttggggtacagggctttggctccgggctgggtacgcgcacgtgatgcaggccgcctcagagtatggggcccgcttgggatcccggagtttgggagcagaacaggatttcctagctgggcagggacatgggggcgggacttagggagtcgggctaaagttcggattaaggggcgggcctggctcatgatcctgggccggcgggctgaagctttcaacggagtttcagccctgggtttgggtctctcggtggggacgggcggaagcagaggtctgtgccttagagtggtcacttctgggggtggggatgggagaatcctcggaacctgggtgaaaggtcaggggtcccagaccttgtaaaagtctgagcatccccctcccctaggtggccatgaacggtaaggcccgcaaagaggcggtgcagactgcggctaaggaactcctcaagttcgtgaaccggagtccctctcctttccatggtaagcggtggccagggcaagggaggagggtggaggctgatgcgcccttcaccagcttccatcgctgtgagagggtgcttttcccacagctgtggctgaatgccgcaaccgccttctccaggctggcttcagtgaactcaaggagactgagaaatggaatattaagcccgagagcaaggtactgggggtggggtgggggtggaaaggcaggtccctaggctggtctccaagccctgtgtgccagctgagtaatgcaactcacacccctgtctttcctccccttctcctcagtacttcatgaccaggaactcctccaccatcatagcttttgctgtagggggccagtacgttcctggcaatggcttcagcctcatcggggcccacacggacagcccctgcctccgggtaaggaactcggacggtgttggggtgggaggagatgtcagagggagtacagggcaaaagagaactaggaggtacaaactggggcctctatcccctggagtaagggagaaggtaaacttgttggccccttccttcacaccttgagcctttcatgtgacactaatattcgctgtctgttacttatgagtagccaaagtctcatctccacatatcgtcatgaagccttctctgacttctccatctttacactcaggtgaaacgtcggtctcgccgcagccaggtgggcttccagcaagtcggtgtggagacctatggtggtgggatctggagcacctggtttgaccgtgacctgactctggctggacgcgtcattgtcaaggtgggaaccgaggttggggatggcggagcctcctcagaagactgactgccacactcctcagggtacccgtggggaagaggggtgggggcagtctggtcagaggaccaccctgcttagtctgagtgaagtaaagactgaccactgggg

SEQ ID NO: 25535 - DNA, 2300 bp, Homo sapien
gagaccgacgtttcacctgagtgtaaagatggagaagtcagagaaggcttcatgacgatatgtggagatgagactttggctactcataagtaacagacagcgaatattagtgtcacatgaaaggctcaaggtgtgaaggaaggggccaacaagtttaccttctcccttactccaggggatagaggccccagtttgtacctcctagttctcttttgccctgtactccctctgacatctcctcccaccccaacaccgtccgagttccttacccggaggcaggggctgtccgtgtgggccccgatgaggctgaagccattgccaggaacgtactggccccctacagcaaaagctatgatggtggaggagttcctggtcatgaagtactgaggagaaggggaggaaagacaggggtgtgagttgcattactcagctggcacacagggcttggagaccagcctagggacctgcctttccacccccaccccacccccagtaccttgctctcgggcttaatattccatttctcagtctccttgagttcactgaagccagcctggagaaggcggttgcggcattcagccacagctgtgggaaaagcaccctctcacagcgatggaagctggtgaagggcgcatcagcctccaccctcctcccttgccctggccaccgcttaccatggaaaggagagggactccggttcacgaacttgaggagttccttagccgcagtctgcaccgcctctttgcgggccttaccgttcatggccacctaggggagggggatgctcagacttttacaaggtctgggacccctgacctttcacccaggttccgaggattctcccatccccacccccagaagtgaccactctaaggcacagacctctgcttccgcccgtccccaccgagagacccaaacccagggctgaaactccgttgaaagcttcagcccgccggcccaggatcatgagccaggcccgccccttaatccgaactttagcccgactccctaagtcccgcccccatgtccctgcccagctaggaaatcctgttctgctcccaaactccgggatcccaagcgggccccatactctgaggcggcctgcatcacgtgcgcgtacccagcccggagccaaagccctgtaccccaaggagcaccctgactcctctctcgcacccacctagtctctcgcaggactcccccttccagtcccgggaaagtcgtcaggtcaccctccgcggggctttcggtttcgctttgggtcaggcggccccactgcagcaccgcgctaagcttgggccccggagggcgccggacccggtctgggatcgaaattcaagtggggccgtcgggagccacttacctgcatggccccgcgcgtggggctgtgtccgctcatctggcctccgggctcggcccgcccccaccgcgccgcctgccccgcccctcactagctttgcaggtcccccgcgtgccccttcaggccgcgccgcactcgtaggccttcatcacgcttccccggccgcgccgccccgccccatgtttggcctccccgcccacctctccccgcccctcggcatccgccccgcccacctcggtcagccccgcccctcggcgggcttaccctgtccgctccgcccctcgctgggcaccaccacccgccttgccccgcccttgccccgcccctagcttggccgcaccgcccgccccgccccgcccctcgccaggaagcaccgcccgccctgcccctcgcagggctgcaccgcccgccccgcccctcgtcaagcttcctcgtccgccccgcctctcgccaggctgcaccgccctccccgctttgtcccgcccctcaccaggtttcccccatccgctccggccctcgctgtaccccactactcgccctgcccccgcccttgctccgccccgcccttcgtcaggcctccttgcgctccccgccccttgtcaggccgtgccgcccaccccgccccgctcctcgccaggctgctccacccgccccgccgctcgtcacgcttcctcgtccgccccgcccctcgctaggctgcaccgcccgccccgcttccgccccatccctctccaggccgcgcctccgcctccggcccgccctcgtctccgcccctgcgggggctgctcgttaggccccgccctgcacccccgtcacccacgccgcgcgacccgcagccgccgccagggccctctgctgccgcggaggtgctaggacagccgcggacggcccgcctccccgtgccccgggcctcgaggccaataaaaagctcgcccctcca

SEQ ID NO: 25536 - DNA, 2300 bp, Homo sapien
gcatgtactcttttctgtgatcagaaagaacattaaaggtggttccttattcaggttgtctccttcccttatacattgtagccttgtttcggccctttcactgtcctccttgaatgtgtcccctccccaggaggtagaggacaagaatgctctctccatgtcctgctcagcattgagctttatacataattttatttatttatttattgagacagaatctcactctgtcgcccaggctggagtgcagtggcacgatctcagctcactgcaacctccacctcccgggttcaagcgattctcttgcctcagcctcccaagtagctgctgggattacaggcacgtgccactacacccggctaatttttgtattttttgtagagacggggtttcaccatgttggtcagactggtcacgaactcctgacctcaagtgatctacccgcctcggcctcccaaagtgctgggattacaggcgtgagccactgcgccaggcccataatggtatttcaacaaacggttagggaatgccatgaatttaagccagcacctagtgggtgaattcttgaaaactcccctgccatatctactagtttgaagtgagggctgcaggacctttccagcctctccccatcccaccctgtcactccccaccccaggtatataaacggcaggttgctccataaacctgtgatctctggaattttgtttgaacccctggtagctgggccctgttttggatctagaggccaccaagagtcctgatcagttcctgcagctaggaaggtgcatggggtttaaacgtgctactcactactcctgacatgggaatactggaactgccaataatgtggaatttgtttttctgttgtttttaacaaatggaaagggcacagatatcagagtcaaatcccagatccacccaaacagctatgtgatcttgggcaagtcaacttctgtgtcccttgtggacctcccgtgtaacataacacttaccaaagcgcatagaaaaaggtccagaaaagatctgagagaaggctgtagggttgttccaggcctctgcaatcaaactgatggagttcaaaccccacctgtgccgtttattacctcgacggatcactagtctccgtatctcagctttctctgttcatgcataaactggggacagtaagagtacatagttgatggggcagttgtgaagattaaacgaggtaacaggccaatctttatcataaagctaaagctcaccgtgagcgccccatggacattagccttattgcttttattgtcacaaaggtggctgtggcgagagacagcactttgtaccgtacccgtcggacccggtgagctggaggggcgagctttttattggcctcgaggcccggggcacggggaggcgggccgtccgcggctgtcctagcacctccgcggcagcagagggccctggcggcggctgcgggtcgcgcggcgtgggtgacgggggtgcagggcggggcctaacgagcagcccccgcaggggcggagacgagggcgggccggaggcggaggcgcggcctggagagggatggggcggaagcggggcgggcggtgcagcctagcgaggggcggggcggacgaggaagcgtgacgagcggcggggcgggtggagcagcctggcgaggagcggggcggggtgggcggcacggcctgacaaggggcggggagcgcaaggaggcctgacgaagggcggggcggagcaagggcgggggcagggcgagtagtggggtacagcgagggccggagcggatgggggaaacctggtgaggggcgggacaaagcggggagggcggtgcagcctggcgagaggcggggcggacgaggaagcttgacgaggggcggggcgggcggtgcagccctgcgaggggcagggcgggcggtgcttcctggcgaggggcggggcggggcgggcggtgcggccaagctaggggcggggcaagggcggggcaaggcgggtggtggtgcccagcgaggggcggagcggacagggtaagcccgccgaggggcggggctgaccgaggtgggcggggcggatgccgaggggcggggagaggtgggcggggaggccaaacatggggcggggcggcgcggccggggaagcgtgatgaaggcctacgagtgcggcgcggcctgaaggggcacgcgggggacctgcaaagctagtgaggggcggggcaggcggcgcggtgggggcgggccgagcccggaggccagatgagcggacacagccccacgcgcggggccatgcaggtaagtggctcccgacgg

SEQ ID NO: 25537 - DNA, 2300 bp, Homo sapien
gatggagttgctttagcctccagaaaatgcttgcattaccccaagccttctccaacacttgatattacccatcttttccatttttgttaatctgctcaataaaaagaaaaagtatctcatttttattatttattaattttttttttgagttggagtctcgcacttgttgcctgggctggagtgcaatggcacgatctcggctcactgcaacctctgcctcccgggttcaagcagttctcctgcctcagtctcctgagtagctgggattacaagtgcacaccaccatgtccagctaattttttgtatttttagccaggctagtctcaaactcctgacctcgtgatccacccgcctttgcctcccaaagtgctgggattacaggcatgagccaccacgcccaactgttatctcatttttaacttgcattttcctgtttaaagtgagattaggtgtctcatatgttcatgactagaaatttaacaatatttcttgctcttgtaaatatagcccttttacttttttcttttttacccaaaccaaaaatggtcaataagaacctttttacttttatattttctaggtgattattgtacaagaaagtcagtgttttttaaattaggctacccttcctaccagttctaataatagcttgatcgtttattttcttggggattctagataatcatataatctataaataatgaccaattttacttttgcacatatagaattgttaattttgttttgtggtactggctctgactacagctccacattgtctagcagcagtaatagctcatcaatgtctcacttctgatttgaataggaacacttctgtatttccctcccaaaatgctgggatgacaggcgtgagccaccactcccggctcactttctaagttatgcattttggtgatgtttgaatctcttactcaagcatgtactcttttctgtgatcagaaagaacattaaaggtggttccttattcaggttgtctccttcccttatacattgtagccttgtttcggccctttcactgtcctccttgaatgtgtcccctccccaggaggtagaggacaagaatgctctctccatgtcctgctcagcattgagctttatacataattttatttatttatttattgagacagaatctcactctgtcgcccaggctggagtgcagtggcacgatctcagctcactgcaacctccacctcccgggttcaagcgattctcttgcctcagcctcccaagtagctgctgggattacaggcacgtgccactacacccggctaatttttgtattttttgtagagacggggtttcaccatgttggtcagactggtcacgaactcctgacctcaagtgatctacccgcctcggcctcccaaagtgctgggattacaggcgtgagccactgcgccaggcccataatggtatttcaacaaacggttagggaatgccatgaatttaagccagcacctagtgggtgaattcttgaaaactcccctgccatatctactagtttgaagtgagggctgcaggacctttccagcctctccccatcccaccctgtcactccccaccccaggtatataaacggcaggttgctccataaacctgtgatctctggaattttgtttgaacccctggtagctgggccctgttttggatctagaggccaccaagagtcctgatcagttcctgcagctaggaaggtgcatggggtttaaacgtgctactcactactcctgacatgggaatactggaactgccaataatgtggaatttgtttttctgttgtttttaacaaatggaaagggcacagatatcagagtcaaatcccagatccacccaaacagctatgtgatcttgggcaagtcaacttctgtgtcccttgtggacctcccgtgtaacataacacttaccaaagcgcatagaaaaaggtccagaaaagatctgagagaaggctgtagggttgttccaggcctctgcaatcaaactgatggagttcaaaccccacctgtgccgtttattacctcgacggatcactagtctccgtatctcagctttctctgttcatgcataaactggggacagtaagagtacatagttgatggggcagttgtgaagattaaacgaggtaacaggccaatctttatcataaagctaaagctcaccgtgagcgccccatggacattagccttattgcttttattgtcacaaaggtggctgtggcgagagacagcactttgtaccgtacccgtcggacccggtgagctggaggggcgagcttttta

SEQ ID NO: 25538 - DNA, 2300 bp, Homo sapien
tgattggccctgctcattcccaggcccattccttgacccagtcactgaagtcagggagatgcagtaataagactggctggaatcagggtctttaggggtggagggatggggaggaggcacagcatgtcatcaaaataaggaaattgcaaaagaaagcttgcaggctactttgaatgacaatgagaaagacggtgctgcctgagtgtgttaaggatccacatggtctccaaaatcctccaggagcatacagtctagtctgggagatgagacacaaaaataaccagaacacaacagcttgcactgactcgagggctggataagaatatctggaactcccccatctatttcagaagcttgtctcttggatgaaaattagacacttaatgggaaagggctttgaaaagagtgcagtaacaaagccccctttacaatttacccggcacattcacacccatcctgaggccaaagccacaggctgtgaggtctcactgtctcagcttcctgagctataaaatgggaatgatgctagtgtctacctcctagggttggagaattgggggtcatgggtgtgaagtgctcagcagcttggcccacactaggtggtcagtacatgtaaggtattattgttgctacatacattagtagggcctgggcctctttaaacctttatagggtagcatggcaaggctaaccatcctcactttatatctgacaagctggggctcagagaggacgtgcctgagctggggctcagacaaggacacacctactagtaacccctccagctggtgatggcaggtctagggtaggaccagtgactggctcctaatcgagcactctattttcagggtttgcattccaaaagggtcaggtccaagagggacctggagtgccaagtggaggtgtagaggcacggccagtacccatggagaatggtggatgtccttaggggttagcaagtgccgtgtgctaaggagggggctttggaggttgggcaggccctctgtggggctccatttttgtgggggtgggggctggagcattatagggggtgggaagtgattggggctgtcaccctagccttccttatctgacgcccacccatgcctcctcaggtaccccctgccccccacagctcctctcctgtgccttgtttcccagccatgcgttctcctctataaatacccgctctggtatttggggttggcagctgttgctgccagggagatggttgggttgacatgcggctcctgacaaaacacaaacccctggtgtgtgtgggcgtgggtggtgtgagtagggggatgaatcagggagggggcgggggacccagggggcaggagccacacaaagtctgtgcgggggtgggagcgcacatagcaattggaaactgaaagcttatcagaccctttctggaaatcagcccactgtttataaacttgaggccccaccctcgacagtaccggggaggaagagggcctgcactagtccagagggaaactgaggctcagggctagctcgcccatagacatacatggcaggcaggctttggccaggatccctccgcctgccaggcgtctccctgccctcccttcctgcctagagacccccaccctcaagcctggctggtctttgcctgagacccaaacctcttcgacttcaagagaatatttaggaacaaggtggtttagggcctttcctgggaacaggccttgaccctttaagaaatgacccaaagtctctccttgaccaaaaaggggaccctcaaactaaagggaagcctctcttctgctgtctcccctgaccccactcccccccaccccaggacgaggagataaccagggctgaaagaggcccgcctgggggctgcagacatgcttgctgcctgccctggcgaaggattggcaggcttgcccgtcacaggacccccgctggctgactcaggggcgcaggcctcttgcgggggagctggcctccccgcccccacggccacgggccgccctttcctggcaggacagcgggatcttgcagctgtcaggggaggggaggcgggggctgatgtcaggagggatacaaatagtgccgacggctgggggccctgtctcccctcgccgcatccactctccggccggccgcctgcccgccgcctcctccgtgcgcccgccagcctcgcccgcgccgtcaccatgagccaggcctactcgtccagccagcgcgtgtcctcctaccgccgcaccttcggcggggccccgggcttcccactcggctccccgctgagttcgcccgtgttcccgcgggcg

SEQ ID NO: 25539 - DNA, 2300 bp, Homo sapien
catgcttgctgcctgccctggcgaaggattggcaggcttgcccgtcacaggacccccgctggctgactcaggggcgcaggcctcttgcgggggagctggcctccccgcccccacggccacgggccgccctttcctggcaggacagcgggatcttgcagctgtcaggggaggggaggcgggggctgatgtcaggagggatacaaatagtgccgacggctgggggccctgtctcccctcgccgcatccactctccggccggccgcctgcccgccgcctcctccgtgcgcccgccagcctcgcccgcgccgtcaccatgagccaggcctactcgtccagccagcgcgtgtcctcctaccgccgcaccttcggcggggccccgggcttcccactcggctccccgctgagttcgcccgtgttcccgcgggcgggtttcggctctaagggctcctccagctcggtgacgtcccgcgtgtaccaggtgtcgcgcacgtcgggcggggccgggggcctggggtcgctgcgggccagccggctggggaccacccgcacgccctcctcctacggcgcaggcgagctgctggacttctcactggccgacgcggtgaaccaggagtttctgaccacgcgcaccaacgagaaggtggagctgcaggagctcaatgaccgcttcgccaactacatcgagaaggtgcgcttcctggagcagcagaacgcggcgctcgccgccgaagtgaaccggctcaagggccgcgagccgacgcgagtggccgagctctacgaggaggagctgcgggagctgcggcgccaggtggaggtgctcactaaccagcgcgcgcgcgtcgacgtcgagcgcgacaacctgctcgacgacctgcagcggctcaaggccaagtgagggcccggcaccccagactcctctttctgcgggcagggcacaggaggctaggcctggggtctggggtcccgctgtcagcacctgccttctcccggggcccgggaccctctcctgccccatgtggagaaagggtcctccacctgtgtgtttcaaggggccgtgacctccaggtctctccccctgcgatcccatcttgcacaggagttttcttggggacatagatcagggggtggatatgggagaatttaggggacccggtgccctgtggacagccccgttaaaaagcattttaagatgctggggcgatatttatggggtcaggtagttgatgggcagaggaagggctgcaggaggcccagagggcagtgtagccagagggagaagggaggctgataggagacagggaaagcagggcaagggcccagagtccaagcaacagctctcagctcagctgtgatgaggccctgggggaggtggggggaggggggagcttggccctggggccttgccgagactgtgtctttttacaaggtgaatggacaggctggagaaaaagggagtaggtgggggtcacagctctcagagagcttgggaggacctgactgtagacttcaccaggctccaagaacgaaaagggcagcaagtgtagcatatttgttggtcccacttctgacaggccaagtgagcacagtcaccctcctgccaccaaagtcataaatattaattgagcagctatattggccaggctggagctgggaaccagaaacacagaggtggataaaatagacacagtttctaaccccagggaggtcacacagtctggtggggacatagacttcaagggtgtggctcctgggcagagattgggccacttcctgtgccctccctgggtgggtggggcctctccactccctgtctctcctgcctctacccagcagccaggccctcccgctctgtcctggacccaccccctggtcagcccccggccagtcgtttccactgccagctttatcacccgcaactgtctgtctttctgtctgtcccacccaggctgcaggaggagattcagttgaaggaagaagcagagaacaatttggctgccttccgagcggtgagtgcccttcttttccccttgcatggcctctggccttgctctgccccacctgggtggcggtgaccatgtccttctcgcttggcctctcccaggacgtggatgcagctactctagctcgcattgacctggagcgcagaattgaatctctcaacgaggagatcgcgttccttaagaaagtgcatgaagaggtataccttggcccctcttcctggggtcactgggccatggggaaagcagccggaaagtggggttggggtgaggctctggctgggaataggggtgtgagggtgc

SEQ ID NO: 25540 - DNA, 2300 bp, Homo sapien
gagcgggacgccccagcccagcctccgctggttccgggatgggcagctcctgcccgcgccggcccccgagcccagctgcctgtggctgcggcgctgcggggcgcaggacgccggcgtgtacagctgcatggcccagaacgagcggggccgggcctcctgcgaggcggtgctcacagtgctggaggtcggaggtaaagggcaggtgggggccgcgcccggcaggggcggggtgctcagaggtagaaaagggctgcccaggccacgcgggtaaggtactggatactggttccgccgccttcttcccaggtgccctggcttctcggctgcccggccccagaagtgagacgaagagccaagtgcagggaatggggtgtcaaggtagagaggctccccacaggaaggtcagaggtcaaggggcagcaagcggttgataagccaagcctgagacccactcccacctctcagggaattctggggtggaagttcttctcctcctgtggagaaaagcctcctgggggaaagggtgtccttcagttccatgatttaaacttgagattgacactccgatcagctccttaacaggggagtccatgtccgaaggagggggccagctcctctggtccaggctgcactgttgaagggatggctcagagctccctgcaggccattgccgtggcagggttgatgtggtcagctctaggtggggtgtggaagaggcctatggttggccacgtgtgaacagggtccagggtaggaggaggtggagcccgagccagggccccatgggcatgaatggaggtgagtgcttgagaatccacatgcaggtgtgtgcctgcatgggtgctgtggagggccctggattctgtgtggtggtgcaaacaggtgaggtatgggcacgtggagctggaatgggaagctcctggaccatgtctacctgagcttccagagtggatgtttccagagcatggaagggggatgctatggaccagtgcttgtcccccgcccatagatttccaggtgcagtgtgaagaaaaggctgagggtctgaggcagaaggggagggcaagaggctgggcccagtgctcatggtccagctggggctaccatggaggccaggccagggccgttagccttggatccatttgggggcttcctttttgatttcctcagtccttgagtaagccaagtggtacttctctagccaaaggcagagccttgggcaggctgcgccttgagaaacagaattctgaggaagtaggctacagctgggagagatggcaaggagctgggggttcactcccttggacgtttctaagagggacatgtcactcccctgggtgctgctgtgtaggggtaaatccttggaggctggggaggaggcacagggaggaaagccctcagcagcaggtgggcaagaagtctctaggacacagccaagtcaggagagggagccgggctggcctccctccatcggcatctcctccccccagccctgctctgcccaccttcctggagtctctgtggccaggcctgggccagagagggccaaggctggcgtctcctggttggcctagcacctggacaagtacaggcctcccgagcctgggatcaggggatggggtgcattctagcagacttcggagctggggaaggtgtggactccttggggatctcagctctggtccccccaggggcaaagagggctgaaaatagaacatagatcaaagggtaagatagatgagttgatgagaatatgactgggggagagattagggaagggaacgaaagagctgacaaggagagtaacagtcataatataagttaaggttggaaaggaccacagagaactgcagctccaaacacatcctttcacaggcaaggacactgtgggccaaagatcagggagctctgcctaagacgtactagtctagttagagacatagctagttatggccatcccagaactaagaacccagtcctcctggttttggttctgggggccttgtactcctcaagaagttctggagagagaggaaagagcgagagagggagggagagtactgggaaagtagctgtcacatgattggcccaggcctggcatttctcaagatggatgtctcctggcctgccttggtccctcaaagtggtaagtggtgatgaggtgtgagagcccccagcagggctgtttgctcagcctctctgcagtcttggtggtgtggtcagcagcgctgagcctggctgggcgtacctagacagaggccaggctgacagtgtgcaggctgggctgctctggtggaaca

SEQ ID NO: 25541 - DNA, 2300 bp, Homo sapien
agagaggccccgcgggaggaggtgagggtgggaggaggctgcgctgggctgccagaaagtggcctgagctagaggccattgcacccctttctgtgcctcagtttcctcatgtgcctagggctccggaggcagatgcagggtgggggtccgtggctctcggcgttaggaggtgaccggtggtcgtgtagggaggcaggtgagggcctccccgggggaagtagggggacaggacaaggaaggggccccaggtggggtgcaggctggcgagggaggggcggactccagcgccgccgccgccgctgctgccgccgccgtcgccgccttacccccacccggctcccgaggccccaggctccttccgccacccgcgccggctcccgcccgctccccagctcgcccccggccccgcctccgactccgccccgcccccgcccgtcccctcctcgcccggccgccggcccggccccctcccccgccatgaagaagctgtgggtgaagaagcgtttccaggtgagggctccgggggcgggcggcgccgggagggggcagggaggcctgggcgccccggagggagggcgggtcaccgcagctgggcccggtggagggggcgctggatcggcgcctgccccacccgagccccgccgagggcggcgggccgggcgcgatctaggggcgcccgggtctgtgtcctgagcgcgcaggcccctccccgcgctgaagggcagatcccccgctccccgatcgcccgcaatccccgcgaccaccggggaaggcccccgctgcagcgttcggcgtggagcgcccacttgcttctttgccacatcttctctctcctctgtccaacctcaaccccgggccccggccccccgcccggcctgccccagccccccactctgaagctttccatcttccggagctcctgaaagcaacgcacacggatccgcgctgagctcaatacattccccaagccctgccctgtcctccgcgcacctgggcctcctgcattcgtgaggctctggccctctgcccccatcatccctcccccacccccttgacacctacccaggtttctgtcctccccccagcaggaatctgtgccctcgttcctccatctcccagtcactcaagcaccccgccccccgcatccccatcttctccttctcctcactgagcctgactacctcgtcttctatcctctttctctcgggctgttgccctggtcccgggctgttgccctggtcccgggctgtgagcctctgtccagtgggatgttccagcttccacctgcagcctgcagttctctccttcctcccctgctcctcccaagagcccagctgggtaccctggaagaaggcaggggagtcattccctacaggggaagctggtcactctgggtctctgcccacctcccctctcacacacacactggccagggaatgagtttctgcttgatgttgcaggtctggatgggaggcacagggaccttaggaacaagcctccccctcaactactcattctggcttttctctttcagaaaaccggccattcccgccgggcctttggccgactcacccatggtgcgtggaccgtgggcgtccttgctctagcccatgcctactcctcctcttggtccctgtccctctgtgaggcatcgagttcctgaagacagcccatgagatgtggaaccctcccactcacccccacacttatctaccacccacccgaccaggccccctgtgccctacagctgagagaggacccagcagaagggagggcggctcactagcacacccctgcatggactgggtgccctgttctccatgtgaggcctaatgggaaggagttcattgccatgctttggcaaccagtacgtggctcctgcttgtcatggcagccagagggaaactgaggcacagaacctgctagaatctgggaaagttgaaaatactcccaggaaccttttctcctaacctaaccactgggcatttttgaggacgattcaacagtagaagggagggaccttgaggaaggtgcctgtcacatcatgatgcagacagataaggggttggtttgcaaagaggggtcaaagcacaatgcaaatattgtaatagagggtgggcctgactcctaatgggaggcccaggtctgcggctggactggacacaagcaggtgtgtgtgtgtgtgtgtgcatgtgtgtgtgtggccagtggcagcaccagtaagtgccaaggataccagaaccactggggcagctggaataacaagcccaagtatgggggtccccagtgctgggcacatc

SEQ ID NO: 25542 - DNA, 2300 bp, Homo sapien
agcagaaagcggcctcgctggacgagcgcacgcgtcagcgcagcccggcctcagacctcgagctgcgcttcgcccaggagctgggccgcatccgccgctccacgtcgcgggaggagctggtgcgctcgcacgagtccctgcgcgccacgctgcagcgtgccccatcccctcgagagcccggcgagcccccgctcttctctcggccctccacccccaagacatcgcgggccgtgagccccgccgccgcccagccgccctctccgagcagcgcggagaagccgggggacgagcctgggaggcccaggagccgcgggccggcgggcaggacagagccgggggaaggcccgcagcaggaggttaggcgtcgggaccaattcccgctgacccggagcagagccatccaggagtgcaggagccctgtgccgccccccgccgccgatcccccagaggccaggacgaaagcaccccccggtcggaagcgggagcccccggcgcaggccgtgcgcttcctgccctgggccacgccgggcctggagggcgctgctgtaccccagaccttggagaagaacagggcggggcctgaggcagagaagaggcttcgcagagggccggaggaggacggtccctgggggccctgggaccgccgaggggcccgcagccagggcaaaggtcgccgggcccggcccacctcccctgagctcggtaaggcctcagggagggctgacaaggtgcctgaacccccgtcggggggcgtttgtggagagcaagactgctcagcaggagccggggggtcgggggtttcgcctggggctgctagccagctgcaagggtgggtttgccaaagaaggcacagacacaggctcgactttgagtgaaggattgtcaaagtccttgtgctaggactgctactggtgaggcagagcgtgagtgttgtgatggaggctaggtgaggctgagatgtgagctaagactggtgcccagatgcccgccatagctcccctgggtccagtggcctgctaggctgttggatcaagaaccactactggggggatgcactggtgggaacctaaggacccccctccatacccccaatccctctgttggggagagatggtagatggtctgaaataattttcaaatccctgttacagacacgctttgtgccagataactctttactctgcctctcccacccgggcaccatcccctgacccatgtgtggccacccagcctgcccttctagcctcctcacctcaggcttacaccccgcatggctgagctcactgtggtccctacacaatgcctgcctgtgtgttgtctcccaaccttcccatggatgatgaccaacaccaccaacaggagaatggctctgcaccccacccctcatcctgcacatcaactcgaggcccactcctggagagaggcagaggaaggcgtccttgacccacttccactgctcctccagaatagatgcctctacctgctgctcctgggagaccctgccaggatctctttcattgcacttaccatactgtatttttcttcatcaaaattattttgcatttaagtattaccaccttagaatctttagagataattaggcccctgtccatcatcctcctggacaccattattgcaaacacacaactatgtgccagcattgtgttaactaggcccttacagatgttatttcatttcagcctatatgtcagtttcagagggtcttttcccctccatcttacagataacaaaactgaggctcagagaggctaatttgcccaaggttttgtagctaggaaacagcagaattgggattttcactgcttttttggctatgtacattgtcctttatctagcttatggaatgtcagagttggagaatgcccagagacccatgacagtggagtttgtcatctctctgtatgtatgagcttcctgtaagcagggaccactggtccttcctctagtgttcttggtacccatacagtactcagtatgccgggagtacagggtcactatttggtgaacggatgaaatcaaatctgatcttcgtaggcctctcagactgcctaccattcactcttttgaatctgacggcttcacacatttgacaattcacctcgtgttgctctgtgacaccgctgttattgcttaagtcttgggttgcttttagcttgttctttgtctgtttgaaagcttgtgcccctccaggtgccttgcatggggcctggtacgccatacatgatggctgacgtgttaaagacatacacagtgcagtcctgtctttctccagaagccaa

SEQ ID NO: 25543 - DNA, 2300 bp, Homo sapien
aaagatcagcagtggtccctaagctttcatgtgcctaagagtcatctggggtgctttttaaaatgcagtttcctgacatctcatttcagaaaatctaattctgcaggctggagtaaggttgaggaatctatattttaaataagcccgaggtggtcctgatgtgagtaggtcaagtaacattctgagaagccctgaagcaaagggctgtgtgcgacaccttttatgtactagataattcgcagtggtggctgcaactctgtctattgtgagaacacatcaggggacgctgaaacagttggggtcggtggatgtgctggtctgaggagagggagttccctgtgtgcttcctaacgccagtattttcatcaaatgagtttgacctgagagtgatgttgaaagggcagacatgagcatggggtcagcgtgggggattgggagccagtgtgaaggggcggtacttccgtggtgggttgttcggggccattgagtgtatgtgcctattaggtttaggggggcacctgccccctccttcctggctggtgtaactgtgtttgccacagtgagagttgggcttgtgggtgcagcagggctgggatgtcagggactggttccaaagatggtttttgctatgtggccagggaaaaaactaggtggcaccggattctggtatggagcctcaggaatcctcgatcagcttccttggtcactcacttttggaggtatggaggggcagaggctactgccttgtctggaagaggcctgggctgctctgacagtctgtctctccaaggggcttgaggatgggggtctgcttcatggctagatgccctccagcatgctgttcccctgggcaccaccaggggtctctgaggctccctgcaaaccttgaccatctggccttcagctctgcttccgttcccagtccctgggcccgtgagcctcctcagtactgtccagcctggaggtgaccctggggcaggactccaggctccatagaggggtaggaccgcccacctgcggagccatgcctgtgatctcagcatcaaatgccttaagcaccaaatgccattctgacttccctccccaaccctacctcaagacagccagcctgaaccgtgggcccctcctctgcccggcccccagccctccttccttactggccatgctgggaaacacaggtcatggcttgggaatgtggccccgggttgcggggtgaggtgataggaagagggagaaggacatgtgacccctgctcaacagcccccttctctcaggttctgtgtccaaaccctttccccatcccagatacaaatgggttctcatgataaggggccatttgggggaggcagcccccgctgtcctctttagcggggctaaggtgggtggcgggcaagttgccaacaggtgccctggcggtttgggtaggaaggctggatgtgggcttaggccctgtggtggctgctggccagaccttccatggcagggatgagggggcagaggtgggattctgggccccctcagattcttcccccacctctgtgaaggagggcaaagatcttgacagttctccgattttcggggccaaagaaaacaggtatgccctggctctgtagtatttgaggctcgttagcgcattccccggtcagggatcttggtggttccgtcagagcaaggggcaacacagggaacatttcccacgggcaccttctttggtggacgtgtcagaacaaatgggtcagggcaagtgtccctattggcacagcgcagtgccacccctcccctgtcttgctcggggacggaggccccacaccttgagtcaaggcaccgcagagcgggctttgctcttgtcagggtctgaagctgtaaggagaagaaaggcagatcccgcggcttgggagtgagcagagtggctaaatccagacggccgcgctccgccctccctcccctctcccctctcctccccctccacaccagggcccaggctgcctgtggtctcggcaggcaccaccttcctagccagctgcctgccggcctgccatccaacctcctccttcccctcctcaggcgccttcccctcccccagggccttctccgtgcagggcctcagctgggtcagccgagtgagtggggctgggcaggctggacaggctgggctcctgctccctggggagccacgctggggtgggcagtgggcaggcagcaggagggcctggtgccagggcagagccttcaggacaggcacaggctggggtctgtgtgcagagcctcggggtgagttggggtacagccctgctgggggc

SEQ ID NO: 25544 - DNA, 2300 bp, Homo sapien
gtgagagttgggcttgtgggtgcagcagggctgggatgtcagggactggttccaaagatggtttttgctatgtggccagggaaaaaactaggtggcaccggattctggtatggagcctcaggaatcctcgatcagcttccttggtcactcacttttggaggtatggaggggcagaggctactgccttgtctggaagaggcctgggctgctctgacagtctgtctctccaaggggcttgaggatgggggtctgcttcatggctagatgccctccagcatgctgttcccctgggcaccaccaggggtctctgaggctccctgcaaaccttgaccatctggccttcagctctgcttccgttcccagtccctgggcccgtgagcctcctcagtactgtccagcctggaggtgaccctggggcaggactccaggctccatagaggggtaggaccgcccacctgcggagccatgcctgtgatctcagcatcaaatgccttaagcaccaaatgccattctgacttccctccccaaccctacctcaagacagccagcctgaaccgtgggcccctcctctgcccggcccccagccctccttccttactggccatgctgggaaacacaggtcatggcttgggaatgtggccccgggttgcggggtgaggtgataggaagagggagaaggacatgtgacccctgctcaacagcccccttctctcaggttctgtgtccaaaccctttccccatcccagatacaaatgggttctcatgataaggggccatttgggggaggcagcccccgctgtcctctttagcggggctaaggtgggtggcgggcaagttgccaacaggtgccctggcggtttgggtaggaaggctggatgtgggcttaggccctgtggtggctgctggccagaccttccatggcagggatgagggggcagaggtgggattctgggccccctcagattcttcccccacctctgtgaaggagggcaaagatcttgacagttctccgattttcggggccaaagaaaacaggtatgccctggctctgtagtatttgaggctcgttagcgcattccccggtcagggatcttggtggttccgtcagagcaaggggcaacacagggaacatttcccacgggcaccttctttggtggacgtgtcagaacaaatgggtcagggcaagtgtccctattggcacagcgcagtgccacccctcccctgtcttgctcggggacggaggccccacaccttgagtcaaggcaccgcagagcgggctttgctcttgtcagggtctgaagctgtaaggagaagaaaggcagatcccgcggcttgggagtgagcagagtggctaaatccagacggccgcgctccgccctccctcccctctcccctctcctccccctccacaccagggcccaggctgcctgtggtctcggcaggcaccaccttcctagccagctgcctgccggcctgccatccaacctcctccttcccctcctcaggcgccttcccctcccccagggccttctccgtgcagggcctcagctgggtcagccgagtgagtggggctgggcaggctggacaggctgggctcctgctccctggggagccacgctggggtgggcagtgggcaggcagcaggagggcctggtgccagggcagagccttcaggacaggcacaggctggggtctgtgtgcagagcctcggggtgagttggggtacagccctgctgggggcttggggtggggggaccctggggagaacctagggggctgtggcagtttcatgtctgtatttggcagtcggataggagccagctcagcgagactgggaccctggccagttgcaggggagggcgtcagggccctggggacacccctcccccaaggctgactctggtgcccccctcctcttcccccaggctgagctgccctttttggtggatgactccagctctgctttcctatccctcgagcgtttgggggtgcaagctgtagggctgtggccaacaggtgcccctggggtttgcacggcaggaagctgagaagggaaagggggaggggcaggctagatagtgccgcctcattggccctggaccgaggtcgggatgtgacttgtctgcggtgtgtgttcctctgcaccaggcccagctcacccaagaaatgggcgtcctagccatgctgctccagggttccatagacctgcttcccctgcttttggagcctgcagttggtagtttaggtctctagtccatgtcaggaatgtgggtgccctgctccagtggaattctcccacc

SEQ ID NO: 25545 - DNA, 2300 bp, Homo sapien
cactcatctgctgagtcacccctcagtgcccgttagcactgactgggcaggcagtactgcctgctactaacccgcatcgggcccatgagcaagttacagaagccctctgtgcctcagtttctcatctgtaattgggttgttacgagactaaatcagttaatgcatataagccccagagcagggcctggcacctggcaagcagctgggaggtgtgaagtctcagtattcttgttttagtagccattatcatcagcggtggtacttcctggagacattgcaatgaaaaagcaggtgtgggcagtgtctggcatggaagggatgctctgtccagggttgctaacaaatagcaaataacgaagaaggggccaggggagacacagaggaacgtatttgggttggtgtcctcttagcctgggatactttcttatgggagcatctcagttccatccttgaaggaatctgagtcttgtgtgagaaggtctgcccccctcccataagacagtgcccactctttgacccacgatgatttcctcttatggctgcaacatgacaaagatcactttcattaagtgctttctaagtgccaggtcctgagagctaaaggtatgacaaggaccatcttaccttgccacaggcctataaggcggatactattagccccatttacagatggggaaactgaggcttagagagatacaggaagctgccaagaggcaagaaaggactgtctgaccctggtgcccagctcttaaccaggatgtccctgtcacccatgctgcatcctccctgcccacccgcctgcccatctccagtgatgccaccccggctccaacccctgcccacagcctcccatgactgtcattctcagcagcaggcctccctgtctcccagtctgctctgaggccctgggtgagtgtctgtctcaggatctaagctggcgtctccgcttctgcctgtatctggggtcactggcagcccttggcttctcttctcttataaatagtgtcagcagagataaatgaatgggtgactgttctatgcagagataactgcaaagagaagggaagggtgtctagggacagccctgacatgaaggaggacagtgcaggcctcctctctgtgtcttcgccagagacagcctccttatcatccagggagcagggagtagggaaagagctttggaatcacatggtaccaaggtcaaactatcatttattagccgtgggaccttgaacaagtcaatatctctgacctcattggtaaaatggggataattttgtagagttgttgcaaggattcacgagggggaaagcatgtcaggtacctggtataggctgggcacagagcaggcaactcttgtaatatatcatagaatgtatttggtacttactgtgtgtgaggttctgggtctggtgggacaagcagatctgacaacgtcagccctctctttaaggagcttgcagaccaggtcaggagctatgactgatgcaagaggaagagcccccgcccatgaaaagcagcgtgggccagtgcccatcgatgtgcaggcgagagggttggggtcctgggaggagtcagaggatgaggggtagagagcgggccaggggcaggggggcttcatgggctgtacccacttaaactatgtcttgaaggacaaggaagccttaggtaagaggagagcattccccaagggaggaatgttgtgagcaatgacctgcagatggaactcggtgtctcgttcaggggcctgatagttagccagcatcaagatgcagaggagcaacagagacgtggctggcagggagtttgggttgagggctttgctgtcctcctggagggcttccctgcagctgtgctggagacagaatggcagtggccttggggatggagaagaagggcttaggggaggggccttgggaacaaagctttgttcgagttttgacatagaggttgtgaccatgcagaggtgggaagacgaggggccagtcaacagaggcagggaccccagagggtggcccagtgtaggaggaagagaagatgataagttgcctggcctgacacactggagggacagaccagaggggccagggcagatgtagacttggaagccagcccgggcccagacccagactttgctgcaccatggatgcacttcttgctgcctgccccatccttgccccatccttgcccactcgcctcctccctgcagtggatgggggtgagggaccaggcccgggatggcatgggcctacccctcaaggtatcctccgggctcaggcccagtgtcactgtccctcccc

SEQ ID NO: 25546 - DNA, 2300 bp, Homo sapien
cctgactcggcccgcgggtaggtcccggaaggagctgcgcgagaaggggccgccgcgggtgctggagccgctgaaggacgtggtgctgatcgaaggcagcgcggccaagctcacttgccgcatttcggctttcccggacccattcatccgctggagtaaggacggcaaggagctacgtgacggtcccaagtaccgctacgtcttcgaggaccctgacgtggtggcactggtggtgcgcgacggcgagctggcagacctgggccagtacagcatcaacgtcaccaaccccttcggccagtgctccgactcggcgcgcatcctcgtggaaggtacgcgcgccccgggcgcagcgccagggcgcagaccagcaccactcagccagagcccgcagcccggtccagctgcgcgtgtttacctctgggcctagctacagggtccccgccagcccagctctgggcacggcctggggcgcatcgccgcgccagccaagtgcgtccttccctacctcgggatccagctccacccgggctgagcagtcagctgtggacttccatcacgcggctccgggtccccaaggtcacacagcaagccagaggcagagccagggttggacccgggtcttctggctcccaactctggcaatttccactacccggagcggtctctgaggcaccgcgagatgtgtgaacattcaggggctttcgcccgccttatctctcttgatcctctattcgaccccgagaagtaggagaggcagggataagtccctttaacagccaaggagatgaaaccagagaggctaatgatttgctcaacgtcacactgcgagtttaaatgcatctgtatttagtgccgggtattagccggtgaggtgatgccctgcctcatctccgggtccttcacggggtttcgctcccctttccttccgctagtcccgacgaagattcaaaagggacccgacaacactaaggcgcgcaaaggcaccaccgtgacgctgactgcggagatcctgggagagcctgcgcccgacgtaggctggaccaaggacggggaggacatcgaggaggatgacaggcgagggccgggacctgcggcacggccagggcctggggctggaacctgggtgggactgagcccagaaatctggctggagtgacgggggcggggactgggcagcgaggaacagagctggctaaggagccccgcccagtgcgcccgtgtactgaccacggctccgccctcctccccgccgcccttccgcagggtgttcttcgagatcggcagcaccaccacgacgctgaccattcgccgggccacgcctcaggacagcggcaagtacgaggtgtacgtggagaacagcctgggcatggaccagagcttcgctcgcgtcgacgtggcctgaacggcacccccggaccttccgccctggcgccgagcccgggggtggtgggacccacagccctccaccagcttgcttaataaagctgctctctgaccctccgcgtctgtcctgctcttccgcgtcgccattccctctcccccgcaccagcgcccacacgtattccagacccccacgccaaggtcacagcctgttggagtcacagggaggtctggagagcgcctagcgccgtgctgcatttcagacagtcaaactgataagagttgccctcgccgtccaaggcgccctcacttcccagcggtaccgccggctgggcctgggactccgccttctccgcttttgagcgcctccagccccagccccttgtggctgtttgcccctggccccgccccttccagggctggccacacacccctgctgtccttagtcccgttttcctgtgggacccagttcctcacttcggctgctgccccgaggccgattccccaacagctcgggtcccagtcttaagttccaggctgggcttctcaggccccacccttcttcgcatttaaccccgccccgcgatcccttggtcacacccctggacttcagcacctctttcctctcccataaagttagaaagcgggtaaagggtcagactacaattcccggcagaccctgcgaatgagttctcgcgacttgcgagaagacacgtgcgcggaaggagcttgcagtagcgggcggcagagctggagtgaagggagctagtggtaaagggagctggtggaggggtggcggcaggggtaaggggcaggggacaccctctagacggagagcgggctccgaggtcctggctggccctcggtgcgcccgcccctgtgttggtcccacaatccctggcaatgagaggccagggttt

SEQ ID NO: 25547 - DNA, 2300 bp, Homo sapien
ccctgtcctggccagcctcccccaagtctgtgttcttggctcagcctttccccctcggctggctcctgaagcccatccaaatttctctccacactcggtccctgtccccggctctcctcccctgtcgccctatccagcttggtgccagggacccacccccctccccggcccccagcttgctccccctcgctgattttacagaataatctttttatggaaactgaaaaaagcactaatggcaggagcgcacccctcccccgcatccctcccccgctcatcccccacttcccaccccagttccctcttgtttctcccttcccagaccctccccgggctggcgccctcctacccctaaacagccaatgatggttgggcacagggtcccagcagcggtggacaaaggggccccctgcaccccgtccaggggcaggtgctccatcttgggtctctcagagatggatgggactttaggtccctcccagcacagaagtgggttggggaggagtggggggggcatgtccttcttagaccccccccaacaatggtgactccttcaatctcgggggcatgttacaaagacctctggggggcatgttacaaagacctcagctttgctagcggcaccccccttcaaacactgaccctttccccttccactgcctctccccaccatgtccccacccccactgggtctaggagggggatcccgggggccagggcctgacacagacttattggatttcacggtgttttgctgagaaaataattaaattatcatatttatgatggagctgccatggcctctgccaaccactcggaacagaagggtcaggactaggggggaggagagggaagggacctagcccctggtcctatggcccaccctctcccagccccttccttggggtgatgaccccagcccagagtggggacctgcagccccctcccactcccatgaagagagataatgaaggtctgggctggaggccaggacaggaggaactgaggaactagggacagcttataggtcaggactgctaaaccccacactgtgtagatcgttccctacatgctggcacacagcccacgggacctgaggggcctgggaggtcacatttggcccaatccccaagtcaacctcagtccagctcctgagaaggcgcagcttcctaactgccaggctatgaagctatgaaaccctgggctctgtcccagagcctggtgctgataacaaggccccagcaccctgctgcctgccacccctgcctgctgccaggaccccctcctttctcccacccatgccctgcaccccccattctcttcgggtaattagattcctctcaattagcagattacgatcattaccagctcatctggcaacacagctccacacccacagctggggaaggggggcaccaagaggggcacatgggggtcatgggcaaacatgagagatggctgggagaggagggctgagacctaccaaagggcagggccagggggacaggaggtggtgagggccttcccagaacagggtacctcccactgtgcttccgaagagaatggcaccagctcaggcccacccagcctgccaggggagtagaagacagagacatgaggcctcgggcagaggcaaaacccccaccctgccaaaagccaagctgggagcagatggagctggcaaagcggaaaaccggccagggctgggctcagcgggaaccgagcagagcgggctgtggggatcagcctctaggcctgtggccccagttcctctgcctgctgcccaaccaaaatccttcacccttcccttcggaatccttgcacatgggggcctgagccaggcccggtgaggaggaacagggaggcagggaggcaggggtgaagggggggaccaggctggcaggggagcctagagggccttcctcccgagcagcacgaggctgaggcagtgggagggggagatttaccagggctccagattcattattcatgagcccacagcaacgactccaatttaaatgctaatgtgggggggcctgactcagctgccccgcttccgcccccacccccagcccagacataagtacagtctgtgctggctccaaggttcacggggtttattagggagtcgggagggagaaaacccaggagtccccaggccatccacattgctccccggcatgtgacgatccagcctggctttctctggtcctttctggacagaggctggccaagcaggcagcagcctcaaggggagtgggtaggagctgggggccttctggcagccctactcagaggat

SEQ ID NO: 25548 - DNA, 2300 bp, Homo sapien
tgggggcttggggacaattggagacagctggctgtggggcagtggtgggggtgtgcatgcagctaattgctgctccacttcctggcagcctggagctcccctcacagcaccccccgcatgccccttatacccagttaccacccgatttctttccttatagaggttgaaggcatcctgcctaccctcaggaggaaagaggatgtgatttgtctcatgatggaggccagtatgttgtcggggaagtgtgaccccaagatctcaatagatggtgggtgaatttagagatatgtatgcactccagggtagcaacgagtgctgcggagagtttggggggcagtttcccgctttcttggcaaagccccagactaaagtaaccttaaaaagcaattaaatcaccttttaaaaaaaacagtaaagaaaaatcaatattaggagaaaggagaagagagagaaggatggggaggaacagtggggggagttctggaaaggtttggaagtctaccagggaggggagagcataggaggcggctgcctgggcatgggacagagagagggggctgtctgtggtcacttggccactttcagtgctaactcagcggctttgtccaatgccaatcccactttcccttctgggacactatgtcccagccagatgcatcaccctgccccaggggtcttatcttcccagcttggggaaccagctgacccagactcattggaggcttgtggggaagcccagctgtggggtccctggggaagccactttgcctaaaggctagggacaacctaagcagggcaccacgcatggtcagggctgggtgtgtgggcaggctccatgctggggtgaccctgatggggcctgacctggccttgcagccagggtgggcaaagtggcttccagctgctaagggagccatccctaggcccctcccctggggccaggcagaggctgcggggccaggcctgacgcagggggcggggtggccgttgggcagcgggtggacctcgggctctaatccccagcagctgccgtttccctcagatcgattcctttctcactttttttctcagctgctggttctgcggcttggatcgatggagccacctccccccgcccgtccacgcttcctctccctgctgctcattagcgccccgattaatcagcccccctttcctcccggggacaagggcttcctcccccgtgagggcacatgctgtcggatggggccccagagcacaagcactgattcttgccacccccaccctgggggcatggatgcatcccctcctggccagtcaactgaggctcccacccccacctatgatgatggcccacatgcctgttcccctccacgagaacacagcagaccccttagggctctcctgccccactctgccaggcacccctcaaacccctttctttaggagagcattcgctcccattgacgcccagcacatcttcctgctcccttccacgcccccactggggctcttcctctccctccattgcatgccctgtccccctacatatagagcaccccggaagcacacctcccctttgctccctggcttgcttacccaacagccctcccccgaagcctggttgtggcaagggatttggggaacatttggggaagcaaagtggccacagatatgcaagctggccagggtgctgtctgtcccagacatatgaatgactgagattggggttgggggcaaaatgagggtgagggcagccagcctcccagagggggcaggggcatggtgggtgttgaagtctggagcaaagctccagggaagctgagaatcttgaagtcacagttgtcccctggtctgtctagcctgccctcctctgcccccctccctccgtcattcaaacaagtggctctctcaaggagtttctggaagctgctgtgagtcgggtagtgggatcaggtggtggctgggtgctggagtcaggagtctcagaggccaggaggtggggggatagagttggctgacccttcatggggtgtgggccaggaaagtggcaaagaatgagctgaggaccctgggcacggcacccttccctgggtggccaggaagtggggagatctggggacccagtgagcggctagggtgcagcaggagtttgggggatagccccagtcttgggatctctgtcctgggctggggactgccccctcccctggcctggctcctgacgcccgtgctgccggtgaaacgctgttgacatgtcctgaattattaagcgtggggagggctccggagcacatgctgagcggagcggctggggctgc

SEQ ID NO: 25549 - DNA, 2300 bp, Homo sapien
tgccccagccccagtggcgggcttcccggctgtcaccctctgcaatatcaaccgcttccggcattcggcactcagcgatgccgacatcttccacctggccaatctgacagggctgccccccaaagaccgggatgggcaccgtgcggctggcctgcgctacccagagcctgacatggtagacatcctcaaccgcactggccaccagctcgccgacatgcttaagagctgcaacttcagtgggcatcactgctccgccagcaacttctctgtggtgagttctgccagctgggctgcctggccttggatggccggaggctggggagtggggaggagtggtggcagtggtgtacaggggcatcctcaacagggcttcccttcattccaccaccagaggctggcctcgtgtttccccaagcctggcgtctccctctggcttcccagccatggagcagtggccgctcataggggcttaccctggggcgcctgctgctcctcttcttggttttgctgctgctgcagtgcccaggtctgggagttggggtgggggttcctaggcatgggcccaggtgtcctggagctggctggcttgcagggaacgcacgcaccatcccaaggccagaccaactgactctcacttttctcttgctccctttttcttctgaggctactggattcttcccaccaaacgaaggagatagggaggggaggtttggggggctccatctagggaaggaccccgggtggcctcctggggagctggcctggtgggcaggctggagagacccggtcttcaggacactgggtgccagtgtctcttctggatctctgtgtgtctctcacatgcctgcctcacagactccctcacacatccctctttcattctgccctccagccctcctggggtccagtccccctctgtctcctgttctagcggctcccatgcccagctctggctcttacactgggaatcactggttcactcttatgtgcataactcaccctcactgctgccccagcacgggtgcatgcacacatgcacacgcacacacgcacacgcactgctgggggacacagtttcctgcacactccctctctcactcactgtccctgtcactacactcacatgcacacctgcacacccacacccagagagctactcatctccatgtctagctcccagctctcgcttagctgccaaggacagggtcccactgtggatgccatcccttctcatgacacccccacccccatctatcccaaccgctgctccccatttggagactgctggcgccatctgtcacctacgtgtgagcacaaacacaagcaccctctccgggagaggggtgtgagcttgggctgctctgccatgcacgcctcccacagtcaggtatgtgagggggtgggcgtgtcttgtacactgcctgtctgtcagggctccattcacccatagtcacagggtatctagtattcatggcgctcgagatgcttgtccctagtccacagtttgctcccagcattgtgtgtgcatgcgtgtatgtttcatcctcgttgccactgcccagtgcatatgcaaatgtttggcgtcaacatggtgcccactccagcccagcctccagcagccagccccagtgatagggacccccgccaggttctcactcacccgctgcctcaggatcaccaggaaacatgctccagccaacgaggttcctggcccccaccatgcctgcagtgtctggggcctcccgccattgggcaggggagttaggtagaaatagagggacaggagcaggagcattgtgcagggagaagagtcgggggcattggcctgttgtccggctgtacaccccctttcctagggaaaagcactgctccccaaagcaagggttggtagagtccccgaggaggaggtgggatatggagggtgagtgtggcctttgggatccatagggctctgctgtcctcaatcctcaccactccgtattgggagctgggcagagctcagtcttagcaggtgctgttgggacagaaatcaatgggatctttgtgtccccgagcgggagttgggggtgggcaggaaaggggaagggtgatgagacctcagtgagaggaaaggagaggaagagctggagggggtgaggaagtaaggggagggaggcagagggttctgcttggtctccaggctaggaggcggtgcctggaggatacaggaacggggatcctctgatcaaggctggtgagtccccggaatcctggggatggcctggaggagtgtgggtggatttcccacaggccctctggta

SEQ ID NO: 25550 - DNA, 2300 bp, Homo sapien
agagggatttgaacatgacaaggaggtatcagtgggatagcttatcatcccacctcgtggtcaccagtgcagcccaccccggtggcatcgagaatgcagcgacccagccactcgtcagggcgcgcactgacgatgtcgttgcggcagccttccaggtgggggcgcagttgttgcagcagcatgcgcgacagcagcaccccaaagcctccgtggcagtagcggccgggggtgggctctccgccgatgaagtcctggggccggcccaggtacaggtgggcggcggaggccaggctgaggtggccagttaggcgtgccaggccgtgcgcctcggtgtaggtggtgtcaggcaccaggaagaaccagtcaaagtcgtcgccgtgctgctccagcaggtggcgcagcgccaggtgcaggtgtccaatgggtcgctcctcgcctagcgtcaccactgccatgccaggtggggcccggcggccccgtgcgcccgtcaggaacaccacacgctccagccggtgccccagcgtgcggttcacggccacgcccagcgtgggcagcgtggtctgagaggtcagcaccgccaccagcagcctctgcctgatgcccagctccgtgctgatgtagcgggtcctaggggaggagatggcacaagcttatcaaaaggacaacggggcggggggtgggggggaggtggtcagcacagaccctggcaggtcacgtcttctctgtatctgttctctcacctatgaataggttaaaaataaaccctctctcccaggggtcatgaggatttaaacgaaatggtcttaaacaggtagtgctttgcatttgggagatggcaatacccacccagataggagagagatattgtgggtctgactccggggttcgctacttagtagttatgtccttgagcatgttatttaacctgagccatctgtaaaatgggactgattatatctgtttaaagcacccagccaaacgctggacacaccatgtatctactcatttctatataaatatgccattatgccacaaatgcctcacataaatgacataaaggaacgtttggcataggggtgtactgagtgtttttgcggggaggggcaaactgcactcaggggctctaggaacttaccttttggtaaggcagaaggtaaattgcagaaccagcatttgaacccaatgttacttagaagttatttcaactcatcagcagagacattaatgagataggtacattcctccctcccccatctcaccctgaggtggcccttgtaacccactcaggaacaagagatccaggtaaatcctagttctctcctttctcttcccctgtctctatacactcaccctatatataagtcatttctctaacaccagcagcccagccagggagctagtaggatctctggggcgccatcgggtcgagccggtttaggacacagtccagtaagttcagcccaggccgggatagggcccagagaaagtctcggactggccccacggctctcgggaaggcagggccatcggaagttatcggggcccaaagacttcctggctcgccagccccttccttccggagcctgacccgggcccgggcgacctccccgcgcgcttcccggccgctgcccagggggtagagcgggcgcagccgatcactacctgacggcctttttggcggcctggccgggctgtgcagggtggtagggcaagacgcgcggctcccaattctccccggcgccttcgccggccccgggcttctcgcgctccgctccgggctgcaccgagttgggccggcgcgccgcgttggtgttgccgcgcggcggcagctcagagtctccaggttggggcgggcctgggccgcacggctcctccacccaggtgacgctgagcaggctcagggtgaagcccagggagatgcccacggccacgggccctgcgggccgcagcaccgacagcagcagcgatgcccgcatggcgcccggaccgcgggtccccggccccggcgaacccccagagcagccagaggagtctccgagggggcgggaccggggagggggcggatccggagggctcgggccccgcgggcgggcccgctccctccccgcagagcagagccagcggcccgagccgaatccccggagccgcgcctcgattcccctccagcagctgctctgggctgcgcagggttcttgcgctcggcactggagcctcagccgcggccgcagctgtccgacgtgtcactgcaagggccccgcccccggggtggggtctcgggctctcgctaccggagagggagg

SEQ ID NO: 25551 - DNA, 2300 bp, Homo sapien
ccatctggctcccaaccctgtctacccacccattgcagggggaggctgcagaacacaagtcttgcactacctctgctcaacctggaaccccagcccccaagactcatttgcccccactggtcccactcacctacaattctcctggaggctttctttgggcccccagcccatagagctcactctcctctctgaagttctgtaactcttgctgcaaagccactggtcacttactcccattatactgggccactagcccatctggcacctttatgcatattagaaaaaggtgtgcctttctctaggcaaagcagctttgtgccaaggcccagagtttgtcagagcatgagctggactttagcccccacttgcccactcagctgagctcccttatttagtacccgtcctgtacaagtattcacagcagctctgattaccggagcctgccttgtaggctggatggatgtgtgtgaccaccatccagcccactctaatatgtatcccaggtgtaaatgctccagggagtctcctccctgtcagacaatatgccctgtggtaagggaccatgtgtaataaccctgctaagtgttttcagtggctacctagcacagttagccaaacacatcctcacaatagctacaatttattgaatgcttactaattcttacaacactacatgagacaaatattgtgatcattgttcagatgagaaaactgaggctcagacagattaatgtgcccaagacatcacaattagtaactgcaaagctaagtaaattcacactcaggtgtgcctaatccaaaaacctgtttttcctataatctagagtctagacaatctataaatgtgtgggatgaaagaaaaggaagaattattcatgatggtagagggattcagagaagacttgggggcccagaaaaagaactcggggaaacactggggagcccaggtgagggatgagatggggatctcaccgaagaagcagtagacgactccaaacaaacagcacatgatgcagacgagggccggcagtgcctggtacctgcgctccaggggctgttcacaaggtgcaccccagaaggcatcatctggctcagggggcagcagctggaaccgcagtgttgccacagtccccggcatagtgctgggaatagaagggagtcaccctcccaagttaacctgacagagggaaagttggggtcacggaggagtcctgggtccccaccaggatgggggtgggagagggattgggagaactcagcaaggacagtggacaaaggaatagtatccacatttgtgcagctccggaagcatctctggagtggggagcaaagacaaagggaaacaaaagtgcctggctagtggaggctgggatgaagttaaaagagggacgggagtcggggggatgaagggagcgtgctgccagtgagaaggaggcagccaagagattcatctgtgggcggctcaatatgggattgtccaagatttacctgggctggaggcgacctgagcttctgagtgaaagaggctgtgcagaggcccgaggggccggggttgcggggcgccagaggctccaactgactggggtccagggaaagtccgtcgtgcgaggaagggggctgctgggccggagagaatggtgtcggcgcggtggcggcgccgctccacgtccaacaccggctggcactccagtcccgcggcgtccgggaactcgggctgggcctgaggaaggggaaggcgcaggagccggggctcgggccgccccagaaccgcggccccatgccctgagcccgcccgcggcctttggtgctgatggacagctccggcctctgctcctgacgtcactcagggcgcaccatccaggcaggggcgggctgcttctgacgtcacatgggacgcaccaaccacgccgcgggaggcaggggactccgcccccggcgtctccctctcccgcactgaggagggggcacttccgggggtccttcccctttaacctcccccttctcctccctctccggtagcgagagcccgagaccccaccccgggggcggggcccttgcagtgacacgtcggacagctgcggccgcggctgaggctccagtgccgagcgcaagaaccctgcgcagcccagagcagctgctggaggggaatcgaggcgcggctccggggattcggctcgggccgctggctctgctctgcggggagggagcgggcccgcccgcggggcccgagccctccggatccgccccctccccggtcccgccccctcggagactcctctggctgctctgggggttcgccg

SEQ ID NO: 25552 - DNA, 2300 bp, Homo sapien
ctacaaggcaggctccggtaatcagagctgctgtgaatacttgtacaggacgggtactaaataagggagctcagctgagtgggcaagtgggggctaaagtccagctcatgctctgacaaactctgggccttggcacaaagctgctttgcctagagaaaggcacacctttttctaatatgcataaaggtgccagatgggctagtggcccagtataatgggagtaagtgaccagtggctttgcagcaagagttacagaacttcagagaggagagtgagctctatgggctgggggcccaaagaaagcctccaggagaattgtaggtgagtgggaccagtgggggcaaatgagtcttgggggctggggttccaggttgagcagaggtagtgcaagacttgtgttctgcagcctccccctgcaatgggtgggtagacagggttgggagccagatggtccctcccattcctcccccaaactctgggctgaacaactgaagagtaggcaggaggaagtgccccccgcaagggttcaggacacgttctgggcctccaaggattctgtatcacctcaccccctccatatctgtacccactccctctgcatgttgctcaatgcagcctcatattccctctcctgggcttcctgacatcctacccctcttggatgtcactacgcccaggctcatggactctgagcccttgtccacgccctactcctctctctgatcacgagcctcctggactctcatacttccccccactcctggaagtgactctcctctgttatctttctttttggctctctctgactccttgacccccatctctgatttccatctttccaactattcagaatctccacttccctcaccctttcaagtatctctaatgggcctaatggccctataacctccttatttctgaaactccacaaacactgtttccttctctttgattctgtgtgacctcatgtaagccttagtgacctccacctcctctcacctccagttatgtcattaccttccatccctctgaccccctctattactcctagtcttgatccctggttactcctctctaattcccataacctcattatctgatcacccctccccatactgtgatcccagtaattccttgttttggtctcagtgttcctctctcttggaaatcgttttatactctcgatgattctatttctgtcaatctccctaacctacaaatacctcattttctgggacaactccccagtaatgctgctactctgtcctctttgtaacctttcagtggtgccattatctctgaagccctgtgacccccaaagactcatctttctgaacctgtgtgaccctcacctctcaagtttctttttttttttttttttgagacaagagtctcgctctgtcacccaggctggaatgcaatggtgcgatcttggtgcactgcaacctctgcctcctgggttcaagcgattctcctgcctcagcctcctgagtagctgggattacaggtgcgtgccaccatgcccggctaatttttcgtatttttagtagagacggggtttcaccgcgttggtcaggctggtctcaaactcctgacctcatgattcacccgccttggcctcccatagtgctgccaccacgcccggccctcgagtttattatgatttccaaatacctcatctctgtgagcaatcccttctcaaagaccccaatgactctttttctgatccccttgggaccccagtgacttctctctctgactcctatgatcccaaagacaccaatgcacgaattcactcttgactcaaaagatttatcctaactcctgtgatcctcaaatacatcaaccctcatgatctcaatggttatgtttgccttcccattgaccaccaacagccatatctctctaacctcccctgacctcaatggccccatcactgatgccgtcatgactccagtgaccctcaattctctgatcttagtgtctttgtctctggttcccctgggatcccatgtccttgaccccttggacctgctccctccagcctggtgccctcatcttggcccctcactagcccctgttcccctccaggttaccgctgcttcaaggcagtgctctttctcactgggttgctgtttggctcggtggtcatcttcctcctctgctaccgagagcgggtgctagagacacagctgagtgctggggcgagcgcgggcatcgctctgggcatcgggctgctctgcgggctggtggccatgctagtgcgcagcgtgggcctcttcctggtggggctgctgctc

SEQ ID NO: 25553 - DNA, 2300 bp, Homo sapien
agcatgggttgttgagggccagtctagggaccctggggctgggagccaccaccctggccaggcaacaggaagtgctttcaaagctgatactggagctaagtggggtggggtgtgggggaatattcaaagcgggagaagcacaggacaactgtggaagtgacggaggttcagtgccggagacctcggggtgacggctcacagcgcccagcccagtgtgtgtctggggctgggggtccatagggctaggcagctctggggggcacagaaccccagtggctgcactggagcccccatcctactgcggccacagtcctgtcctctcccagccctgccctgaaagtcacgccccatgcagagctgtttagggcccccctgctccttgcaccccagctaatgcactctacacacacaagcccacaatgcctaagaggccttctgcacatattctgccctgtcgtaatcatcttcaccctctcccacccagccatggccagacagaatggccacagccacacaaactccagcccatgctcaggctccccacaaacaccagtctcttcacagggaagttcacacaaacaccacctctgctctaggccagagcgaatcaagtctgacaccaagctgaggtcccggggctgggcagccacccggtcccatcactgcaccctgtcctcaccccactgccctcatcaccttccccactcctcaggcagctgcattctggtctctcctggccttgctcggccccagaggaccagcctgcatcccccagacccttagagcaagcaagcccatgggggaggtgggttgtgtggctcaaggcaggagtctccgtggaggctggggggctgagtgggagcttgtggttacctcggcccatgcatgcccctataaaccacccccagcccccacccccccaaccctggcccctgattgggaagctagcagttcctcagcccagccaccagggggccagaggctaatggagcagtagtcgccccaaaacttgaagattctggggggacctgggggcagcaggggtgtgggcaggcctgggctccatgcgctggtcacctctaatattgacatggttccctttctgcagaggagtgaccagaacttggagatgagctcccagaatcagcatttagcacccctggggaactctcagacagacgttgaatgcaaaaagcattactgagttcctgcaagccttggcttggaattcctgccactacctgtggggtctgagcctccctttaacagagggtatttcctcctcctgccccagagtgggtgtagccagctgtgaccttaaggaagttgtataatcactctgtgcccagtcccttatatggaaaatggggacaaaacactaccttcctcttaggattgccgtgagagttaaatgtttcaagtgcttgggactgttcctggaccttaggaagtgtcatatcaatgtttgctattgtagatccaccatcccttatccatggttccaaaattccaaaactctcaaaatcaaaaggctttttgtaagttttgtattccaagtcatttcaggaaaacctgagcttgattgctctgaagctatttctatgctttaattatcctgctgagggtgaatatagctatagctgtatatctataagatatgagtgtcttatagatatatgcttgtatctgtaagattctgtatctttcaatctatcctgcttagggtgaatgtagtatgtgttataccacagacatgttaacgtgaccgatgaagggggaggctcccgtgggggctgaggaaggtatgtgatagatgagaaacgcatcatttctggaatccaaagcattctggattctgtaacaccctctggccccagggatttcagagaacaaactgtggacctattattgcttattattattttacttattattctcattattatgtgggtgatagggacttcatgctgccgaatggctccagagaggctgacggtgagcttgtgacaggctgtggttgtccccaccctgcagaacccccagtgcggatcatataccctcgcgatgaggtgaccttgatcgccgtgaccttggagtgtgtggtgctgatgtgtgaactgtctcgggaggatgcccctgtgcgctggtacaaggatgggctggaagtggaggagagcgaggccctggtgctggagagggatgggccacgctgccgcctggtgctacctgctgctcagcccgaggacgggggcgagtttgtatgtgatgctggagatgactcggccttcttcactgtcact

SEQ ID NO: 25554 - DNA, 2300 bp, Homo sapien
tcagtgcttcagcatcgagaaagccggagccgtggaggtgccgggcgactgtgtgccctccgagggtgactaccgcttccgcatctgcacagtcagcggacatggccgtagtccccacgtggtgttccacggttctgctcaccttggtgagttggtcctgccagacccacccatcacttctcctcccttccccagccctcagtgctggtcctctcacaggcttgccatccgccagcctctgccctctgccacaccttctagttctgacagctgcactctgtccctgcctcagtgcccacagctcgcctggtggcaggtctggaggatgtgcaggtatacgacggggaagatgccgtcttctccctcgatctctccaccatcatccagggtacctggttccttaatggggaagagctcaagagtaacgagccggagggccaggtggaacctggggccctgcggtaccgtatagagcagaagggtctgcagcacagactcatcctgcatgccgtcaagcaccaggacagcggtgccctggtcggcttcagctgccccggcgtgcaggactcagctgccctcacaatccaaggttggtgccagtggggacctgagtgggcagaaagggtcaagacacagaagtcctgttggcaaaacgaggcagatgctgtttttatttcttgtatctgggccaggagagcaaggagcatccatgatgggctgaggttgagggctcagaggtccggaaggccaatttcaacccacatgcaacatccagggcaccccttgttatcttgatatatgtcagcatcatatcccaattctctggagtgctttgtggtttacagaatcctgtcagatttgtcatctcatttgaaagacacagaccctggctgctagtccctgcctgcctcctgccatgttgtctaattgttgacattgtcatcgcaactttctacgtgccaggcgcagtcctaatcaccttacatacattaacacaatcttctcaatggccctataagataggttctttttttttttttgagatagagtctcactctgtcgcccaggctggagtgcaatggcgcgatctcggctcactgcaacctccaccttgtgggttcaagagattctcctgcctcagcctcccgagtagctgggactacagacatgcatcaccatgcccggcttgtttttgtattttagtagagatggggcttcgccatgttggccaggcttatctcaaacttaagataggttcttttgacattcccattttatagctggggaaacaggcagatacgttaagtgacttgctcaaagtacggagctaatgagcacaggtgctgaattatgaacccaggcagtcgggctcctgatcacactgtgccacctgttgaaagggggaaggaggggaatgaggcatccctgaggagaacagctggaggtggggcgctcaaagttcaaggatcacgctagcatttgccatgtcaccattgctggagtttgtaagaccaatcaaggaatctgtcggcacccatgcacggggtcttggggtgattcactgtcagcatcgcaggcagaggggccaggtgagacctgaccagcaaccagagcagcatttccaaaatgggatcccagttcactgacatcagaaccacctggagggctggtttataatgcagatttcctggcccctgcgtgcttgggaatccaagaattctgcatttttagcaggctccctaggaattcttatgcacagccaaagcactgctcttaagggttggtgtggaagcctaagcctatttttaaaaaccccaacaacagcagttgttccctctgatgcatccgacactgagcccatgcaccggagggaggggtgcttatctgtacttctccccacacagagagcccggtgcacatcctgagcccccaggacagggtgtcgttgaccttcacaacctcagagcgggtggtgctgacttgtgagctctcaagggtggacttcccggcaacctggtacaaggatgggcagaaggtggaggagagcgagttgctggtggtgaagatggatgggcgcaaacaccgtctgatcctgcctgaggccaaagtccaggacagtggcgagtttgagtgcaggacagaaggggtctcggccttcttcggcgtcactgtccaaggtcaggaagcatgccagcctgggctcctccagccaaggctgattgtggggccgcataagccatgccctctggtctgctgcctacttgggggagtcctttacagggagagtccagtggcccagg

SEQ ID NO: 25555 - DNA, 2300 bp, Homo sapien
acctagggaggggcctcgagtgtcctccgaggccctccgaactccagccctcctcggtgcccagcgctgcccccaagactggaggagaggtggtccgcgggaatattaaaataccaaacccgcccgcctctcactccccagggattcggatttagtaggtctccagggtactcaggaacttcttagcaaactccttaaatgattccgaggcagatggtggaacaccactaaggagtgattgatgtacaaatccggagggccctagaactcttcttccctagtggttttcaacgtctttgttattttactcctccttcccccactgaattcacaaccagagccccaatatatgagacagataaaggagtagtttatgggcgtaaattgctgagtctacgtatataacaggtacttctaaaccatcagtgagaataaggaggctattttattgaatacaggaatttgaattaaaggctgcattcatgagaccaggctctgaaccctgtggggacggcctggctgcatctgtcaccttgagaaacaagtgattcagtggaaagctagacttgagggaggacaaatgtcctgcgtgtttttactattctttgattaaactgctccccacgtttgcaagaagaggaaggtgaaggagagaaggtttatatttcaaagttgaatcaccaacaatatccaataaatggttacattctcataaacagaaaattccaaaggaaaaaaaagcacaccccaaactcaccagaaggtaacgctccccataataggatttcatcacaacgcaaaagagtacaccttcactagttattgtccagttttttctcttagaggaaaaaaagttggtaaattctcctgagtccttcctagcatgcagtcaagcatgttgcccccaggctgcggtggtggcctcactgttacagttcaatgctcacagattcatcaggttggtgctgatctggacctccatcaggaaagaaaagcccggagggaaggctagaggagcttccccgagttgcatacacacacgcacacaaaaacttgcttctccagcagccctagttaatcctctgatttccaacatcctgttttcttttcttttctttttttttttttgaaatacacttttgaaaagggttaaaatagctaggcacagtggctcaccctgtaatcccagcactttgggagactaaggtgggcggatcatttgaggtcaggagttcgagaacagcctggccaacatggcaaaaccccatctctactaaaaatacaaaatcattagccaggcgtggtggcgcctgcctgtaatcccagctctacttgagaggctgaggcaccagaattgcttgaacccaggaggtggaggttgcagtgagccgagattgcgcgactgcactccagcctgggcaacagagcgagactccatctcaaaaaaaaaaagagttaaaatattttaaattctactcagacccttgcagaatatgtgaaatgactggggcggggggagccagggaacagtttggaaatcaccaatctagggcctggaggaccccagggaacagtttggaaatcatcaatctggtccaaccccttctctccctttccccattttacaagtaaggagactgaggcccagaagcattgaaatggacttgcttaaggtgatgtggctagtgtcagggctggatgagaactcaggtcatcttaggaaccaccacttcccttctggtagttttctgtgattccacagtgcccgctggctctgcatgaagagcacacagcatgagctaatgcgcttctaggtatcctactcctagtctgggccttctccagagccctctcttgtctctctctcccctctccacagagccccgcctccggttcacacggcccctgcaggacgtggagggccgtgagcacgggattgccgtgctggaatgtaaagtacccaactcccgcatccccacggcctggttccgtgaggaccagcggctgctgccctgccgcaagtacgagcagatcgaagagggcactgtccggcgcctcatcatccacaggctgaaggcagacgatgatggtatctacctgtgcgagatgcggggccgggtgcgcaccgtggccaacgtcacagtcaaaggtcagctggcccgtggggaagaggctgaggcggaggcaggcaggtgctcagattccaggttgatggattcctgtccgcatctcagggcccatcctgaagcgcctgccccggaagctcgacgtcctggaaggagagaatgctgtgctgctag

SEQ ID NO: 25556 - DNA, 2300 bp, Homo sapien
gggcagcgctgggcaccgaggagggctggagttcggagggcctcggaggacactcgaggcccctccctaggtcccgggctccgccgtacctttcacgtgcagctgcacggcactgagcgtctggcccgccgagttgcgcgcggcgcagacgtagagcccacgatccttggcctggcagtaaagcaccttgagcacgaagccgccgtcgcggtcgcggtacatgaggcggcggcggtccgggagcagcgggcggccctcccagtgccattcgatctcgggctcgggcttgcccatcacgtagcagcggaacttggcgtgcttgccctcgttcacccagaaggtcttaggcgcgcacttgagcggctccaccaccggcgcgggggcctcgtcggggtccgcgggcgggctctcggggggctggtgcacctggagcagcgcccccgcctgcgcgtggccgtgcgcgttgcgggcgtggcacacgtagacgccggaatccggcagccgagccgccaggatgcgcagtgccaggctcgcgccggggccgtcctcggcgcggcccggctggagcgcgaagtggctgctgtcccacacttcgtccagggccatcccgtccttctcccagtacagtgtgggctcggggaggccccccgcccggcacgtcagcaccacctccgccccccgcagcacccactgggatcgaggccccgtgaggaagaccggggcgccctccccggaccccggcgatggcagcgggcgctcggcgggctgcagctcggggtcggaggccggcggctccagcacggtgacggcggccgccgcgtaggcctcgccggccgcgttgcgggcgcggcacacgtagacccccgcgtcggtgggcagtgcggcggtcagcagcaggccgtgctccgcgccgtccgccgggaagctcaggcgttccgaggccgccagctgctgcccgcccttctcccacaccactacaggcggcggctcccccaggaccacgcacttgagctcggcctcggcgccacttaccacccgcacaggccgcgggaagcgcaggaagcacggggggctcccctgatcccccgagctcgccttcatcgcggcggccgaccgcctgcagcggcgaacggtgggggggcaggggggggtgcggagggcgagccgaggcccggggcggcggggtcggggcgcggctggggactgggcgcggggacccgcggagctctcccgggcctcccgctcccggctcgcctccttaccctcggccccgagctgcagctctgcggcggcggcggcggcgattcccgggcccgaagcctggcgctcagggggcagtccttcctgtttgcctctccagcgagtggccccgcagcctcccctgcccgctgcctggcttcctgctcttaggagcctctcttcccagccccctcccacagcttgggcctcttccccctcctccctcccacctccagccgccaggtccccagccgcccgccaggcttgggcctgagtggcagaggcgcctgcagctgccaatcccaaaaatattctctgatgacacagctggaggacaagagcccagactggctccactggtctaagtatagagcaggcaggaccacctgcccccggccctagccccggttctagccccggttccagccctgcccccaagggctggccggccagcagctgcttattgaaaggggccccagaaggtctgaggggtgatgcactttgtctccctgacaaataacactttctggggctggccggctacagctcccaggctcctgtcccacctgatgtcacctctggatgtgtctgtgtgtgtgtgtgtgagagagtgtgtgtgtgtgagaatttgtgtgtgtgtgagtgtgtgtgtgagtgtgtgtgtgagtgtgtgtgtgtgtagggagaaggtgttgtatgtttgcatgtgtgagtcaggtcgcttgaggcgaaatccttcccagcccctcccccacatccctggcgggagtgggagataaggctcatggccacagacatctgcgtcagagataggaggtctcaatgccacgggcaggggcaactcggactgtggggcgtggaaaggactggggaagactggatgagaagggtagaagagggtgggtgtgggatggggaggggagagtggaaaggccctgggcagaccctggcagaaggggcacggggcagggtgtgagttccccactagcagggccaggtgagctatggtgctgcacctactgctcttcttgctgctgaccccacagggtgggcacagctgc

SEQ ID NO: 25557 - DNA, 2300 bp, Homo sapien
gggggctggtgcacctggagcagcgcccccgcctgcgcgtggccgtgcgcgttgcgggcgtggcacacgtagacgccggaatccggcagccgagccgccaggatgcgcagtgccaggctcgcgccggggccgtcctcggcgcggcccggctggagcgcgaagtggctgctgtcccacacttcgtccagggccatcccgtccttctcccagtacagtgtgggctcggggaggccccccgcccggcacgtcagcaccacctccgccccccgcagcacccactgggatcgaggccccgtgaggaagaccggggcgccctccccggaccccggcgatggcagcgggcgctcggcgggctgcagctcggggtcggaggccggcggctccagcacggtgacggcggccgccgcgtaggcctcgccggccgcgttgcgggcgcggcacacgtagacccccgcgtcggtgggcagtgcggcggtcagcagcaggccgtgctccgcgccgtccgccgggaagctcaggcgttccgaggccgccagctgctgcccgcccttctcccacaccactacaggcggcggctcccccaggaccacgcacttgagctcggcctcggcgccacttaccacccgcacaggccgcgggaagcgcaggaagcacggggggctcccctgatcccccgagctcgccttcatcgcggcggccgaccgcctgcagcggcgaacggtgggggggcaggggggggtgcggagggcgagccgaggcccggggcggcggggtcggggcgcggctggggactgggcgcggggacccgcggagctctcccgggcctcccgctcccggctcgcctccttaccctcggccccgagctgcagctctgcggcggcggcggcggcgattcccgggcccgaagcctggcgctcagggggcagtccttcctgtttgcctctccagcgagtggccccgcagcctcccctgcccgctgcctggcttcctgctcttaggagcctctcttcccagccccctcccacagcttgggcctcttccccctcctccctcccacctccagccgccaggtccccagccgcccgccaggcttgggcctgagtggcagaggcgcctgcagctgccaatcccaaaaatattctctgatgacacagctggaggacaagagcccagactggctccactggtctaagtatagagcaggcaggaccacctgcccccggccctagccccggttctagccccggttccagccctgcccccaagggctggccggccagcagctgcttattgaaaggggccccagaaggtctgaggggtgatgcactttgtctccctgacaaataacactttctggggctggccggctacagctcccaggctcctgtcccacctgatgtcacctctggatgtgtctgtgtgtgtgtgtgtgagagagtgtgtgtgtgtgagaatttgtgtgtgtgtgagtgtgtgtgtgagtgtgtgtgtgagtgtgtgtgtgtgtagggagaaggtgttgtatgtttgcatgtgtgagtcaggtcgcttgaggcgaaatccttcccagcccctcccccacatccctggcgggagtgggagataaggctcatggccacagacatctgcgtcagagataggaggtctcaatgccacgggcaggggcaactcggactgtggggcgtggaaaggactggggaagactggatgagaagggtagaagagggtgggtgtgggatggggaggggagagtggaaaggccctgggcagaccctggcagaaggggcacggggcagggtgtgagttccccactagcagggccaggtgagctatggtgctgcacctactgctcttcttgctgctgaccccacagggtgggcacagctgccaggggctggagctggcccgggaacttgttctggccaaggtgagggccctgttcttggatgccttggggccccccgcggtgaccagggaaggtggggaccctggagtcaggcggctgccccgaagacatgccctggggggcttcacacacaggggctctgagcccgaggaagaggaggatgtctcccaagccatccttttcccagccacaggtaacgagggtgggggaaccggcaggatgactttgagaaaaagcaaggcacagcatgggtttgcaggccaggcggacctgggtttgaatcctagtcctgctactcagttgctttgcagcaataggccagttactaaacttccttatgcttctgtctccccatctgtaaaatgggctaatgcccacctctcaggattaagtg

SEQ ID NO: 25558 - DNA, 2300 bp, Homo sapien
tatactgttacatggcttctctcattatctagtcacaattggtccattttgcagataaggaaactgaggcttagagaggtgaaatgacgttcaacgactaagtggccaggcttggattttgcctgatcccaaagccatccttctccccactgtgctgcgaacggactgaagtgagggaggcaggggtcctctctaagagaaaggtggaccagatgacaagaaagcccacccacaggagggcttatccattcagtcagtggaacaagggggcacatatatgttgagacaggaactcaagagaagatagactagttttccagaaaagtttcccaactaatcttttgcctgtatctctgatagcttctcagtgtcagctacctgggagtaaagaaacagggtttggagcagcgagcagaggcagagataggaggaaaggtggcaggaaggggctcaagcccaaatatctccatctttagagacccccggtctcccagcgcatacttcccaaatgcctcccacctgccatgcactctaggtacagcctctcacttaatcctgagaggtgggcattagcccattttacagatggggagacagaagcataaggaagtttagtaactggcctattgctgcaaagcaactgagtagcaggactaggattcaaacccaggtccgcctggcctgcaaacccatgctgtgccttgctttttctcaaagtcatcctgccggttcccccaccctcgttacctgtggctgggaaaaggatggcttgggagacatcctcctcttcctcgggctcagagcccctgtgtgtgaagccccccagggcatgtcttcggggcagccgcctgactccagggtccccaccttccctggtcaccgcggggggccccaaggcatccaagaacagggccctcaccttggccagaacaagttcccgggccagctccagcccctggcagctgtgcccaccctgtggggtcagcagcaagaagagcagtaggtgcagcaccatagctcacctggccctgctagtggggaactcacaccctgccccgtgccccttctgccagggtctgcccagggcctttccactctcccctccccatcccacacccaccctcttctacccttctcatccagtcttccccagtcctttccacgccccacagtccgagttgcccctgcccgtggcattgagacctcctatctctgacgcagatgtctgtggccatgagccttatctcccactcccgccagggatgtgggggaggggctgggaaggatttcgcctcaagcgacctgactcacacatgcaaacatacaacaccttctccctacacacacacacactcacacacacactcacacacacactcacacacacacaaattctcacacacacacactctctcacacacacacacacagacacatccagaggtgacatcaggtgggacaggagcctgggagctgtagccggccagccccagaaagtgttatttgtcagggagacaaagtgcatcacccctcagaccttctggggcccctttcaataagcagctgctggccggccagcccttgggggcagggctggaaccggggctagaaccggggctagggccgggggcaggtggtcctgcctgctctatacttagaccagtggagccagtctgggctcttgtcctccagctgtgtcatcagagaatatttttgggattggcagctgcaggcgcctctgccactcaggcccaagcctggcgggcggctggggacctggcggctggaggtgggagggaggagggggaagaggcccaagctgtgggagggggctgggaagagaggctcctaagagcaggaagccaggcagcgggcaggggaggctgcggggccactcgctggagaggcaaacaggaaggactgccccctgagcgccaggcttcgggcccgggaatcgccgccgccgccgccgcagagctgcagctcggggccgagggtaaggaggcgagccgggagcgggaggcccgggagagctccgcgggtccccgcgcccagtccccagccgcgccccgaccccgccgccccgggcctcggctcgccctccgcacccccccctgcccccccaccgttcgccgctgcaggcggtcggccgccgcgatgaaggcgagctcgggggatcaggggagccccccgtgcttcctgcgcttcccgcggcctgtgcgggtggtaagtggcgccgaggccgagctcaagtgcgtggtcctgggggagccgccgcctgtagtggtgtgggagaaggg

SEQ ID NO: 25559 - DNA, 2300 bp, Homo sapien
ggaaagggaagaaaatggagaacaaggaagagggggaagagaaggaggagggctgtaactcagaacagagggcagtcctttcaagaatgtgtagttagcatcctcacactgacacactcatagactatactaatcatcctggagcagcactcgttcatggactggcaattggaactatactgttacatggcttctctcattatctagtcacaattggtccattttgcagataaggaaactgaggcttagagaggtgaaatgacgttcaacgactaagtggccaggcttggattttgcctgatcccaaagccatccttctccccactgtgctgcgaacggactgaagtgagggaggcaggggtcctctctaagagaaaggtggaccagatgacaagaaagcccacccacaggagggcttatccattcagtcagtggaacaagggggcacatatatgttgagacaggaactcaagagaagatagactagttttccagaaaagtttcccaactaatcttttgcctgtatctctgatagcttctcagtgtcagctacctgggagtaaagaaacagggtttggagcagcgagcagaggcagagataggaggaaaggtggcaggaaggggctcaagcccaaatatctccatctttagagacccccggtctcccagcgcatacttcccaaatgcctcccacctgccatgcactctaggtacagcctctcacttaatcctgagaggtgggcattagcccattttacagatggggagacagaagcataaggaagtttagtaactggcctattgctgcaaagcaactgagtagcaggactaggattcaaacccaggtccgcctggcctgcaaacccatgctgtgccttgctttttctcaaagtcatcctgccggttcccccaccctcgttacctgtggctgggaaaaggatggcttgggagacatcctcctcttcctcgggctcagagcccctgtgtgtgaagccccccagggcatgtcttcggggcagccgcctgactccagggtccccaccttccctggtcaccgcggggggccccaaggcatccaagaacagggccctcaccttggccagaacaagttcccgggccagctccagcccctggcagctgtgcccaccctgtggggtcagcagcaagaagagcagtaggtgcagcaccatagctcacctggccctgctagtggggaactcacaccctgccccgtgccccttctgccagggtctgcccagggcctttccactctcccctccccatcccacacccaccctcttctacccttctcatccagtcttccccagtcctttccacgccccacagtccgagttgcccctgcccgtggcattgagacctcctatctctgacgcagatgtctgtggccatgagccttatctcccactcccgccagggatgtgggggaggggctgggaaggatttcgcctcaagcgacctgactcacacatgcaaacatacaacaccttctccctacacacacacacactcacacacacactcacacacacactcacacacacacaaattctcacacacacacactctctcacacacacacacacagacacatccagaggtgacatcaggtgggacaggagcctgggagctgtagccggccagccccagaaagtgttatttgtcagggagacaaagtgcatcacccctcagaccttctggggcccctttcaataagcagctgctggccggccagcccttgggggcagggctggaaccggggctagaaccggggctagggccgggggcaggtggtcctgcctgctctatacttagaccagtggagccagtctgggctcttgtcctccagctgtgtcatcagagaatatttttgggattggcagctgcaggcgcctctgccactcaggcccaagcctggcgggcggctggggacctggcggctggaggtgggagggaggagggggaagaggcccaagctgtgggagggggctgggaagagaggctcctaagagcaggaagccaggcagcgggcaggggaggctgcggggccactcgctggagaggcaaacaggaaggactgccccctgagcgccaggcttcgggcccgggaatcgccgccgccgccgccgcagagctgcagctcggggccgagggtaaggaggcgagccgggagcgggaggcccgggagagctccgcgggtccccgcgcccagtccccagccgcgccccgaccccgccgccccgggcctcggctcgccctccgcacccccccctgccccccca

SEQ ID NO: 25560 - DNA, 2300 bp, Homo sapien
taaacagggactgacaatcgtcaggttatgggattaataattcaacaaaatatactgagctcttactctgactttatatttgcatactagttagctgttgtaggggctgaaaagttgtgatgcctttcttcctcatcataagggtcagagctcgtataacaagataggttaagagaaaaatctaaaataaactaagaagtttatttaatcaaagttttacatgacatgggagccttcagaaatggctacccaaagagccagggaaaacttgtttttaatgcttagattctatgaaaaatggacagcctgcagtaatgtggttgggcaaaaagtgtgccacttaatagtaacagacagcaggtggaaacccaacgaggtctttctgtgtagcattccttcctcccaggtatgaggcaggatctcttccagaatgagggtcttacggcctatcagacaaggtaggccagagaagttctttacggccagcttgttttttggactgagtttccctcctgttgcccaggctggagtgcaatggcgtgatctcggctcacagcaacctctgtctcccgggttcaagcgattctcctgcctcagcctcccgaatagctgggattacaggcatgcactaccatgcccggctaattttgtatttttagaagacacagggtttctccatgttggttgggctggtctcgaactcccgacctctggtgatctgctggcctcggcctcccaaagtgctgggattacaggcgtgagccaccgcgccaggccacggccagctcttacatagaaaggtggggggaagtttaggttttatggctggctttgggggagagggcttctagtttctgtgactcatcttggggaagaggaattctggtttctatggcttgccttggggaagaaagaaggctgggagacaggagggcaggaaaaggtcggagagactgtgcctgaggccttccagtctcttttagttcaaaatagtcagcataccaaagcgccgtattttggggtattgtttttctgagctcaacactgctgcttcggatgtatctccacttactttatttaacctaaaaggctttcagctcagagcacaagtagtatgccatgaatgcgaaattgtgtggttcaaatattcaaaatatttgaaatatttgccatttcaaatattttgtcttgagaaaataaaatctttcaaatctggcaacttgggataaagatgactatgatcctatccctcctttcaactggcttaggattcattttgattttcctctgtagaaatggggcgcttcatgaaagaaactctctctgaaaaccaggaattctgttaaaagacctttttgctaatctagttcagtagttgacgttagcatttgacggggagcctggtgaaagctaccatgagaattcggaagcaagaaactggcagtcctggcgctactggttactaattgaacgaccttcgcaagtaacctagcctctgtgaacctgttctcattttcaaacgcggttgaataactacttttcaactaggatgttatgaaaggtaatagggtaaagacaaaggactaggttcgcgtggagcccagtactgctgaaggaaagatacacgagtttggagggagtctaaggaaaaggaggcaaaggaccccggaggttatatcctcggtggcctcagcttttacacgatctaagtccatcctacggcggatacgctctcctttcactggaaaatgactgtttgcgttgaaaaaatttttatctaacaaagctccatttctctaaactttgcttccccgcccagtttgcaaacgagtcagggtttcctcaccggcgcggtaggctcgccgaaagccaagcgggagccccaggctgcgcagggcgggggaataatgggtgcccagctccgggccaggaagcccagggaaccactgcagccaccaccgcggtcaggagacagcccccgcaccgccccttttcgattcgtttgcatgatctacggcgcggtttccggcggcagagacatgttttccggtcgtcccttggctcgattttcttccggggcgggacttcctttccatcattgataggcgccgggcagctgagctggtaggaggaccagacggggaggttcggtatgtctgaccaggacttatgttcctcgaaagggcggccaggaggatgctcttcctctcttttctttctcgcctttttctccgcatgacgcctcggtttgcgcggacgccctgggcttttggcactaccgcccacctgaggctcttccg

SEQ ID NO: 25561 - DNA, 2300 bp, Homo sapien
gctagaacaaatgggaaattcttttggcagccttgacttttcccaggcaggagcttaagggggctagagtcaccattctagggatgcatccttgagatattagaactttgctgtttttgttcaggttttttactgtgggggttggaggagtcaacaaaaataatttgtgttgaattttgttgaacttgtgctgaacaagtctgcagttcttaacaggccaaagttgaggcctagtcaaaaagaaggcccagaggagcctgagtagggtttgatcaaggtgagaacctcctctaattcagggaaagaagagacactcctctttcccctgaacaatataaatccttttcttccttgatcaccttttgttcactaaaaaccaactgagccatttattgggacttggtagtggatgaattttgctggatggtgagagtgaccaggcatttaatgggggacatttctatggaaacaaaaagggaaacaaagatgaatggttggagcagactataaatccattttctgagtccagagggcagccagttgagatttctaggtgttgagctctatgtttctttagatggtggaatgaggatagcagtggcaaccgatggatttcttcgtttgtagtttgaatgtttgtggtgatagcatagacagtgttgcagtcacggttatttccctgaacagagcctggaagatacagaagtgtcagtggacttttttcctttttttttttttaatgagacagagtttcgctcttgttgcccaggctggagtgcaatggcacgatcttggctcaccgtaacctctgcctcccgggttcaagcgattctcctgcctcagcctcccaagtagctgggattacaagtgtgtgccaccacgcccagctaatttttgtatttttagtagagacggggtttcacaatgttggccaggtgagtctcgaactcctggcctcaagtgatcccccctctttggcctcccagagtgctgggattacaggcatgagccactgcacctggccggctgggcattttaaaagagggcggcggggagtgggcaggggaatggtagggccttgagcagagctgggggagtggaaatcaggttggtccacatgaaacccatctgagtttgctaactaactggcacttaccaaaataaggcccttaccctttcacagagactgggagacggggccctatcttcaggagttggctgaaacaaatgggaaattcttttggcagctttgacttttcccaggcaggaatttaaggggcttggagttgccatgctcagggtgtggccttgaactgttaggaacagtgctggtgttgttcaagtcttttaacgtgggagtaggggtggatgaaatcatttgtgctgagtgtgtgcagttttatataggccaaggttgaggcctagtccagaagaggtctcagaggaccctggctagagtttggtcaacgagataatctttttctcccctgtacccctgccaggatttgtgtgagctccaccatctggacatctcctataatcgcctgcatttggtgccaagaatgggaccctcaggggctgctctgggggtcctgatactgcgaggcaatgagcttcggagcctgcatggtgagtgggggtgtgtgatggggcaagcatggaggggaagggggagagtgaggctggggctggcctggggaccatgtgcctctagagccttgagagggcttatggggagtgcaggggtgctctggccggtctttctgctgcaacctcccccagtgcatgcaccacactcacttgcgtgtactcatccacatgctcttccttccttcttgcgtccaccccaggcctagagcagctgaggaatctgcggcacctggatttggcatacaacctgctggaaggacaccgggagctgtcaccactgtggctgctggctgagctccgcaaggtgagatgggaatgcatcaggggcctgggaaccacccttgcacgtacccccccatgctggtttggtcagtgccttcttcacacagggagggccagggccccaggccctcctcattctccccttcctgcccctcagctctacctggaggggaaccctctttggttccaccctgagcaccgagcagccactgcccagtacttgtcaccccgggccagggatgctgctactggcgtgagtgatcgtcctgtgtccactcttcttcccctttcctgcccagtcctcccccaccttgcaccctcttgccatccctgggtgaggggccaaggacctggaccctgcttactgt

SEQ ID NO: 25562 - DNA, 2300 bp, Homo sapien
ggtccctggttggcaagacccttctcaggctgtctcagtattaaagtaactgctgtctgactttacagactagaggagcggggctgggaacacaatgtcgaggtggattgaagaccagagcccctgtgcaatgccgaccaggaaaggttccaaggctcttgagtgtctctaaggacgtgaaggccctaccaaaacaaaattcaaggtagggacttggaaccacattgcctggctcagaggaataaagaattgggatagctctggtttgctagggctactgtaacacagtatcataaacccagtggcttaaacaatggaaatctactgtcttacagatctggaggctagaagccagacatcgaggtgtctgcagggctaggctctctctgaagggactagggaaggatctgttccaggcctctctcctagctttggtagttccttggcttgtggcagcataactccagtcttcacaaagcgttctctgaatgcacgtctctttgtccaaatttcccccatatatatatatacatatattttttttttttgagatggagtcttgctctgtcacccaggctggagtgcactggcacgatccctgctcactgcaacctctgcctcctgggttcaagcaattctcctgcctcagcctcctgagtagctgggattacaggcgtgtgccaccacgcccagctaattcttagtagagacagggttttaccatgttggccaggctggtctcgaactcctgatctcacgtgatccacccgccttggcctcccaaagtgctgggattacaggtgtgagccaccgcacctggccaatttccccttttcactggaacaccagtcataatggatgagtccacccttatcttaacatctgcaagaacgttattgccaaataagggcacactctgatgtaccaggggttaggacttcaacgtataaattttgggggacactactcaactcccaacagctgggtctcccattctgagttttggggcacagctgtgctctgcctaggcatagctgattcccaccctaggaattcccaccttgggactcaccatgtgagacttaggaggacagttcatctctttcagttaaaaattttgtttgtggcttggagagtcacttcaatacatggataatgatgcccaaacctgtcggcagcctgctttccagctgtgaccatggcaggtaacgagcctccctgagtctccactgtcctctgccgaccaaatgggaatcataacagctcctcttattattatgcctgagacgaggcagccagtctggagagggccaacctagcacaggactgtgagcacacacaagacaatgtgggcgtccaacagatcctagctcccttccccttggaaggctatgcacacagaaaatctttccttgggttgagctgagatctagatgaggccaggggtcagacgcggtgaagtaccaaggtcacagggctgttatggcatcgcactgtgtagaagtccagtttcattgatctcgggataggggccgattggggtccagtggctccttcgaaagaccttttgcccttggaaaatgagatgtgacctcagggatagggggagaagggagaggaaatgtggaaacggagccacacagtcttagagttgcatagaactttggaacacccctattgcaggcccctctcgctacagctggggaagctgaggcgggaggaggggaggtactgtgtcaaggtcaaacgttgggtggtgccaggcgacagaagccaggcctttgagaggcaaggctgtggtagaaatgaaaggggaggtggtgggtgcttccaggggtctgtgagctccgttcccaagactggaggggcctgtgtctgcggagggggtggcttcctgggctctggaggggaggggaggctaaaagcagggttggggagcgaatctgggggattgtgggaatatcgggccgcgccccagcccccagcgatgcgtggggcgcctggagaaggggcgcacgggcaggtggggtgctgcggggcccgcgcgtgggggccgcgccggccggggcggggtgagtcacggcccgcccgctcccattgtgcggcccggcggcggcggcggcggcggcggcggcggcggaggtgcggagcggagcgcgaggaggtggagccgcgggctgcgggctccggcgcctgcgtccgcccggccagcccggctctgcgctgcgagaggccggacggcagtcgcggctgcgctcgggagagagcgcgggggacatggggcgcggcggcccgcctgg

SEQ ID NO: 25563 - DNA, 2300 bp, Homo sapien
agtaactgctgtctgactttacagactagaggagcggggctgggaacacaatgtcgaggtggattgaagaccagagcccctgtgcaatgccgaccaggaaaggttccaaggctcttgagtgtctctaaggacgtgaaggccctaccaaaacaaaattcaaggtagggacttggaaccacattgcctggctcagaggaataaagaattgggatagctctggtttgctagggctactgtaacacagtatcataaacccagtggcttaaacaatggaaatctactgtcttacagatctggaggctagaagccagacatcgaggtgtctgcagggctaggctctctctgaagggactagggaaggatctgttccaggcctctctcctagctttggtagttccttggcttgtggcagcataactccagtcttcacaaagcgttctctgaatgcacgtctctttgtccaaatttcccccatatatatatatacatatattttttttttttgagatggagtcttgctctgtcacccaggctggagtgcactggcacgatccctgctcactgcaacctctgcctcctgggttcaagcaattctcctgcctcagcctcctgagtagctgggattacaggcgtgtgccaccacgcccagctaattcttagtagagacagggttttaccatgttggccaggctggtctcgaactcctgatctcacgtgatccacccgccttggcctcccaaagtgctgggattacaggtgtgagccaccgcacctggccaatttccccttttcactggaacaccagtcataatggatgagtccacccttatcttaacatctgcaagaacgttattgccaaataagggcacactctgatgtaccaggggttaggacttcaacgtataaattttgggggacactactcaactcccaacagctgggtctcccattctgagttttggggcacagctgtgctctgcctaggcatagctgattcccaccctaggaattcccaccttgggactcaccatgtgagacttaggaggacagttcatctctttcagttaaaaattttgtttgtggcttggagagtcacttcaatacatggataatgatgcccaaacctgtcggcagcctgctttccagctgtgaccatggcaggtaacgagcctccctgagtctccactgtcctctgccgaccaaatgggaatcataacagctcctcttattattatgcctgagacgaggcagccagtctggagagggccaacctagcacaggactgtgagcacacacaagacaatgtgggcgtccaacagatcctagctcccttccccttggaaggctatgcacacagaaaatctttccttgggttgagctgagatctagatgaggccaggggtcagacgcggtgaagtaccaaggtcacagggctgttatggcatcgcactgtgtagaagtccagtttcattgatctcgggataggggccgattggggtccagtggctccttcgaaagaccttttgcccttggaaaatgagatgtgacctcagggatagggggagaagggagaggaaatgtggaaacggagccacacagtcttagagttgcatagaactttggaacacccctattgcaggcccctctcgctacagctggggaagctgaggcgggaggaggggaggtactgtgtcaaggtcaaacgttgggtggtgccaggcgacagaagccaggcctttgagaggcaaggctgtggtagaaatgaaaggggaggtggtgggtgcttccaggggtctgtgagctccgttcccaagactggaggggcctgtgtctgcggagggggtggcttcctgggctctggaggggaggggaggctaaaagcagggttggggagcgaatctgggggattgtgggaatatcgggccgcgccccagcccccagcgatgcgtggggcgcctggagaaggggcgcacgggcaggtggggtgctgcggggcccgcgcgtgggggccgcgccggccggggcggggtgagtcacggcccgcccgctcccattgtgcggcccggcggcggcggcggcggcggcggcggcggcggaggtgcggagcggagcgcgaggaggtggagccgcgggctgcgggctccggcgcctgcgtccgcccggccagcccggctctgcgctgcgagaggccggacggcagtcgcggctgcgctcgggagagagcgcgggggacatggggcgcggcggcccgcctgggcctcgcaggctccggagccccgaggtaccgcggggcggggcac

SEQ ID NO: 25564 - DNA, 2300 bp, Homo sapien
cttctgagtccgtaaccagggggtccctgaataaataaatggcatggacgtacttggtagtttgaagaacaccaatgttggttccttatcatgttggctctgattgaccaaataacataaaaagctatcagctttgagtgggacacagagcagccaggacagggctctgcagcaggtccaggctgtgatcaaagcatattatccagcaaaagctatagtactagaggtacatgtggtgggaaaaggcacttgtgatgcttagctggttggtcaagggctggaagggaaacaattggggataaaggatctggggaagatgcatcattctttgaggaaaccaagtggctacttggtaggaatttcataagattggaccccttccccctggaagtggaaaatatctattctgataggagtagactgatattttgggtatgggtttgcttttcctgctcacaggactttagccagcagcattgaaagcttagacagtttgatccataatattgcatcagaccaagagacctacatcacagtaaaagggaatgtggcagcaggcacttggtcatggaatccactggtcctgttttaaaccataaactctgatgacctgacagagtgatagaatgatcctttgaaggccaagatgaggtaccagattagggatgataccccaaggggagggtagccctcctctaggctgcagtatatactcacaatgagtatcaattatatggtgctatgccccaaagatgaggaatatttggtccaggaccaagggatggtggtagtagtggctttgcctatcatcacatctagcgattccttggggaatttgttgcttccacaactctaggctctgtagggtcttgaaattcctgagccattgagaaggagcacttccaccctctcagtagctgttccactgaggacacagtgaaaatctcattatgctttacaccttggctgcctgcaaattactttgagatacttgtgccaaaagactagcaggcaagaaacggagttacagttctggaaggaataattgactctgatcatccaaaaaagataagaccacttttacataatgaaggcaggaagaatttgtttggcaccggatgattcactggggcaagtcttggcacacccttactcattttgatagagcagtcatcgctcggtattttgagggcactggttccaggacccccgtgcatagcaaagtctgaggatgttcaaaccccttatacaaaatgccatagtatttgcatataacctatacacatcttcccatatattttagtctctaaattacttataatacataatacaatataaatgctatgtaaatagttgttatactgtaattttatttgtactattttcattgtatttttttttttttttttgagatggagtctcactctgtcacccaggccggagtgcagtggcatgatattggctcactgcaacctccacctcccaggttcacaccattctcctgcctcggcctcccgagtagccggaactacaggcgcctgccactacgcccagctaatttttttgtattttttagtagagatggggtttcactgtgttagccaggatctcaatctcctgacctcgtgattcacctgctttggcctcccaaagtgcttagattacaggcatgagccactgcacctggcctttcattgtatttttaatttttcttctacagatagtttgatctgcagtagtttgaatctgaggatgctgaacctgtggataaggagagcctacttttcttggacaaatgccctgtgtcagaagagtgtggtaaacagaagctcagctccttcaaggatgacagccttggttacaccaccaggtgagttaccaagaccagaaaatgtactaatgaaggatgataggagtctagaatgggcactacaggagagagaagaggcataccaattgcagtttaaaaatcagcttcagtggtggcaattgaaatttgtcccattaattttcctcctataagtttctctaggaaaagagaccaaagtcagggagcagtcgttttcacatgggatgaactcagtgtaagaggcaagcagattgtggaagattagaagataatggatactattattccatccagattcctcttcaggaccaaggactcattttccagctggcaggaatgttagctactgacggccatggctgagttcctcttcaggaattatcctccacttgaggggaattgctttgttcagtgttacactccctctatagtggcagcccacactggttga

SEQ ID NO: 25565 - DNA, 2300 bp, Homo sapien
caagtgtgtgaagtggccaggagaacgcgggatccacgattcctctcaggggaatgaataaccctagggaccgaggggcggcgacggccgagatggcaccagaaccaccagaagccacgtcggaaggagatgggagatccagagggcgagagagggcccctttcctcccaagcgatgtctgtgggcaggtgtataaatctctcagagcctccgtctggagggctccgggtaccggctgcccagccaaggctaagttggtttttggctccctccttcggaacagagaaaacgatagattacacagggatggatggacggatgtctggagagatggaaagatgaatggatggatggatgggtggatggatggatagatgaatgggtggatggatggagggatggatggacggacggacggacagatatatggatggatgcattatggatggatgcatggacggacggacggatgcacggagagatggatggatgcatggatggatagatagacggatggacggacggatagatagatggatgccggaaaggagaagaatgagagacggatgtgagactagatgcacgcaggccagagcaccagcatacgctggaacagagcacgagcatacactcgaacacacgcgcacacactcaggacatctgcgcacagacatacaatcctccgcgtccgcttccacgcaggcattcgcgcacctacatacacgcagttgcacgcgcgcgcacacacacaggcacacacacgcagacatgcacacacacgcagacatgcacacacaccacacatgcagacatgcacacacacgcagacatgcacacacacaccacacatacacacacacacacacacagttcgcctctccctgggtttctcagaaactaaatgatcaccgcccccccgccccgccccacctcccgacacagacacacaggcacatacaatcctcccagcacgtccgaacggatgcacagaaaactgagcacccagacgggtcccgtcgaccccgcacgttagctctaaactgtgtgcaattctggggcgaaaagctaaaactcgactgcgttcaacttgccggcgggttccccaagtctgcggggcgaagagctcgggcccctcaggcccgcaatcgcaccctcggggcgctgggcttggcgaggagaaaggtgtctgactccgggtgctagaaatcaggtcactggcgcctgacgagcggcgccacgaccgctgcgctgcggagcaggccccgcagcccggtcccgagaagcgcagggctcgggaaactttgcagaaaccagagctcgaaaggctttcgctagaatccgggagcaccaagccttcactgtgctccaggctgcgttttcccctcgccccgggctggctcaggagaggacgtggttcttgtaattttttttttaaatcccggcgttgtctcccgtgcatcccctcagggcgcctcgagcgggcctctctggcggatgctgataaactttggcctttggttacaaacttggacagacccgccgcgtgcacgggtcaccgcctcggggcaggctgtccggcggttccccgctgccccttcgccgatcccctcgcctcagcccccttctcccgaatcgggacgcaccattcacactgggctccccccgcaccacctggccctgcgctcctgaggacccctcacccgcgatggcccctcgctgtccccgaccacagaaaggccgtcccgctcttaccttcattcgcggggtataccctggaacctgtgacagcgtcgcaaatcccgaagagacacgaaaatagggcgaaatagaaaatcccagccatggttcgccggtgccaacgctgctcctgccgcttctatcccagtggaataaatgcttaagttaggagagcagcgggctgaagacattgccaagggggcgggcccggccggtgacgtgagcccgccagtccggggcccgcggccaatggcggcgcagacagggcggccgagccccgccttcaccgagcagggcccgccccagggttccgccccctccgggctccacggggcgcgcggtctcccggggctctagggggcgagcacggccggtccccgcccccgcctgccggagggagccagcgggatcccccacgttacctcgaaggtcgagcccctggacggcggagggactttggaaaagctcggaattgaccgaggggagccagagaagaggttggaaaccttttctcccaccacgggcggtttaagatggaggaaaacgctcttttattgaaataa

SEQ ID NO: 25566 - DNA, 2300 bp, Homo sapien
atatcccccgagtacatattttttccctttttacttgtgtgcaatcagtagctacaatgactgaaatccacttctttggactgtgacatttaagcaaatcttgtatctagaaaccgaaatgcccagagtctcgcacaagctgttcgtctgggccaccaactcacacagccgccgcccagcgcctcggcacgcgtgctcatcttgtgtaaaagtaaaagttgctcatgtcattagctcggctctgagtttgcatgagaaaccagcgcagctctcgagccacgggagaaaacacgatctgctgcggagcccagtgacctgaaactgtagcagtgactcgagacctgtcctctcctcgacgtcgccctataaccctcccgctttatttaggatccgcttttccgagagcagccactcaggcaacccccggaaggtttgttaggagtttctccttgaaacgctttccgattccatcttttgaaatccagcaggcgagagtcacgacagactccaggacctcttgagcgctgtccgcagccccacggtaggagtagccctagtgcacgagacttggcggtggctgaaaagctcgcccaaacgcacgcaccacctctctgcggggttgcggattgcgggttgcggtctttgtccgctcgcccttcctccggggccgcacactcccgcatctggccggcaggtggcgcggttggctcacgatgagctgcggccggggctggagaggctcctccacctcccagcggccgcccggccgccgggacccaggctccccaggaaaactcggccctgctctggagggagtcagaggaggggcggcctgggaaggggaagggaggcctcattgctaggaatcagtgcccctgccagcgcctggggaaatgcaccgagtggcgttggggaccggtccctgggacaccggctgcgctgccttcgccggaccgctcttaggtggccgcgtccacggctcgggcatcgggaaaagaccacagcccgatggtgccagtgcccccggggccggagcagccgggcggggctctgcgggtcctcctgctcgccgtcttctcccggggcagggagggctgccccggctaggtcggagcggagagtcgcagcagccgctccgggcagcttcccagtcccggtctgccttgtctgtgcggctgcaagtccccgcacccacacttaagcctttcacttctaccccaccgctcccagacgggctaggcccggttccagggactgcccccaaccctgcccccgggaaatccacaactggttccctgcccaaggccatctcggggcgtcctgggccctgggcgaggtccacggcgtgtgcagggggacggggccagcggggacttccttactgctagaaagtcattcgttcagtctctggagacagtgacggagccctgctgcggactggacgttggggaccaagtaggtccccgctctccaggcatctggggagccagggaagaagcgagtgatagagccacaaaactccccgcaaagagtatttcagagggggaagcgccataaagacaaaacagggcaaggtggcagagggtggcggtggcaggcgcgagtctgcagctcagcccgggcgcgctggacgcagacacgtcgactctcctaaagaagcaaccgcaggtcagcttagacttcttttatttcaataaaagagcgttttcctccatcttaaaccgcccgtggtgggagaaaaggtttccaacctcttctctggctcccctcggtcaattccgagcttttccaaagtccctccgccgtccaggggctcgaccttcgaggtaacgtgggggatcccgctggctccctccggcaggcgggggcggggaccggccgtgctcgccccctagagccccgggagaccgcgcgccccgtggagcccggagggggcggaaccctggggcgggccctgctcggtgaaggcggggctcggccgccctgtctgcgccgccattggccgcgggccccggactggcgggctcacgtcaccggccgggcccgcccccttggcaatgtcttcagcccgctgctctcctaacttaagcatttattccactgggatagaagcggcaggagcagcgttggcaccggcgaaccatggctgggattttctatttcgccctattttcgtgtctcttcgggatttgcgacgctgtcacaggttccagggtataccccgcgaatgaaggtaagagcgggacggcctttctgtggtcggggacagcgaggggccatcgcgggtgaggggtcctcag

SEQ ID NO: 25567 - DNA, 2300 bp, Homo sapien
acagtctgttgaacttgggcatcctagtcatgccacccacaagaatcacttctcctatatcactcttgctgacttctgcatcttgcatagctttttggcatggagcgatagtcctcctgattagatcagtgacaatcccttcaaattgagcatgggtcaactttgtattcaaatgcttgggtccagaagaatccattgtaagatagggcaaattgatgtcagtctgcacagatgaggagagttcacatttagccttttcagcagcttcccacaccctctgaaatgccacgttgtctttggtcaaatcaacccccgtctctctcttgaactccttcacaatgtgctgtagcaaggcctggtcaaagtcttccccacctaagaaagtgtccccatttgtggatttcacctcgaatactcctttctgaaattccaggatagaaatatcaaaagttccaccacctaaatcatatacagcaatgactttgtcttttgatttgtctagaccataggcaagagcagcagctgtgggttcattaatcacccgaagcacattcagtccagatatctggccagcatctttagtggcctgcctctgcaagtcattgaaataagctgggactgcgatcacagcattttttgctgtgtgccccaagtaattttctgcagtctctttcatcttcatcgacacaaatgctccgatctgacttggagaatacagtttcccatgagcctcaacccaggcatcaccattggaggcacagacaattttaaagggaatatttttaatgtctttctgtacttcaggatagctggacaatgagacatttggtagcatagaatgcattgtttgggttggtgacagcctgttgcttgactggcatgccaacaagtcgctcaccatctgctgtaaaggccacaactgaaggggtagttctggcaccttcggcattctccagcacctttgcttgtttaccttccataactgccacacaggagttggtagtacccaaataaacaccaccagctgctccattgattgcttctgacgcataatcctgccttgaaacaattctaaaagcctcatgactaaggccattccagccatcctgctggcgggcggccgtagggcccggggaggctgcggtgcccctgagacgggctgctgcagctcggctggcacttattatggcggctggatggaggagtatgaggcagcaaacaggcgctcaggcggccgggagctgcgcggtgcagtcatgattttatgatatttaaaaagttgcttgcaatcaagtgcataatattaagcatacagttcaagttttgataaacagtaacctttatgactagcactataatcaactgggctacttctgtccttatctactgccattgtcttgaatagtttggcatcagccttcattggtcctctcacttccatttatgttccactttgactcattctcctccagcagccaaactaattcaattattacataagctagattatttgataataacctctactgcttaaatttgcttagattacttgatacttgattctactgcttagattatttggtaataatctcttaaaagcctcaactagctcccagttgtaatagaatgaactcaaattctttaacatggcctaaaaggccctgtgtgttctggcccctaccctgctcccagccttgtcttgcaccattcttccccttgcattctgtactaccgtaacatggatcttccttcagttccttgaatttgccaagttctttcttactctagagtctagatagaaacactctttttccactcctttgtatcctgcaggtctatggcaggcaaatggtggcctcccaaagacgttcatgtcctaatctccaggaaccagtgaataaattaccttacatggcaaaaggaactttgtagatgtgattaagtcaaggatattgagatgaaaagatatgcctggattatccggctggggacagtttaatcataatagtcattatgagcaaaagagggaggcaggagagtcagtcagcaaaggagatgtgaaaatagaagctgggttgaggagcttttaggctttgaggacaaaggtggtgatgagctgaggactgcaggcagcctctagacactgaaaaggaaaggaatggattctcttctagagcctccaaagaaacacagccctgccagcatcttgacttcagccccataagacccatttcagacttcgagcttctagaactgtaaggtaatcagtttatgtggctttaagccgtgaggtttctagt

SEQ ID NO: 25568 - DNA, 2300 bp, Homo sapien
aagttaaatctgcaacttgtgcttttccaaagggatatttatgctaaagtgaagactgaaatgtaaaggtatgtatttgggtttttaaaacttcgagtcgataacaaatattaattaagagagactgactcttctctctacccccaatatatattttttaaaaagaagaagaaggttccaaagattcttagaaaggctgtgaaagtgtttcagtaggtgggaaggaagaggagggtgtttggaggtcttcggtttaccataaccctcttgattttgcccggtggcaactagaagaaaagacagaccttgtgtaattccctcccactcagccctagctggtgtgactctttctttttaaaaacagaaccaaaaataatttaaggatagcaccaaactgcttatttttttttaatggagtcattggcttattacaaagaaaactgatcaccctagtatttgactcattgaaaacaatttgcactgggggagactgagggcggggtttgggagacaaaccattataaaacctaaagaagttccttacattcgttttggaaaggacggtgccatgggtgggagccgggaagacacttagggaagaaatcggcaacaggtgggcacatagagcttgcctgctttaggtgtttatccattaaaataatttgatgaggattgcaaggcttatgggctttaaaaaacagatgttatttttcctttgcaaaaaggcaagagctttccctaagtgttcatcaagaagtgtccagggcgcgtgcacacgtacacacacacacgcgcgcctttacgcaccttcacaaacctcagaaataactcattggagagccccagatgtcagccgttaccccccgcccggtcttccccaacacaggggaccacagtctgggagccaggagggcaaggcccgcccgctcaccttgggcttgctgccgccgatggcaccaggacgtatggagccagtctcctggtacctgcacaggatcttggagacgcagccgtgggacacgcgcagctggcgcgagatgacgcagggccggatgccgtggtgggccatctccacgatcttgtggcggatgtggttgggcagcggcctgccgttgataaaaacaccgccgagctggttgacgcggccctggccgaggggagtggacactgtgggaaggtgaaaaagagaagcaagggaaaagtcactggaggaaaataaaaagcaaagaacagcagcacgtaatttcgcagtcttctgtcctatcctcatgttacagcaccgacgctgaaactgctcgacatcggactcccagacccagacctcctttcaatcacatttgttcaaattattcagcaatatagcgcatgtaatcttgtgtaaagacagcaaatggggcaaaataattctccccagagaaagcgtcttccccttcgggcccggggagtggcaacttaggagaccctgcagctggtagagagtctagcttgctctagaaacagcctcctggcgaagagaagttcacccaggagctggccttgatgaactctgctcccaccgatccctgtccaattgggatctctccctttctaagggacttgggccagctgatagcccttggggtttctagccaaaagtgcagcagccaagggtcaaagagggtccagaaaggaggcccaagcagcagtgcctgtgtcacctgttacatcttgggacagagaccacagcagcggcagggctgttcctgggcccccagcccccattcttgctctgggtgttacattctactctaggctgggtgtgaagggagtgggtggcgggggcgatgagcatctctgctggggcgccctaacctggaaaaccattgaaaacggctcaggcttgcaagacttcctgcctccccgggattcccagaatcttcaagtggacggaaaggcgattcctaaacaagttatagaaacttctagatgctatttgagatacatagaattctaatttatttaattattctaaaaattccaatcacaatggcgcggcgttagccaccacaactttgcagggcaaaaaaaaaaaaatacttcctgaactaacatatgtttcacaagtgtgggcgcagccgggacaatttcgagacaacttcgagacaatttcgaatggacaaattgcggagaagttgcttctgccgctcagaagccggttcacctccttctccaccgcggcatttccaaaacaacagggacaagtctccccggctcgccgcaggcctgaccgcccagctccgccaggatttgcagagagcagc

SEQ ID NO: 25569 - DNA, 2300 bp, Homo sapien
ccggctcttaggagagaaaactcccggcaggagagagacgggtggacgctgggagggcttggagaccaagcctccggctcaaaaacaaatgagactcagctctagatgttctttaactgctcgcggggtccaagagtttattttagctgagagttgagcctacttttgccttcttgaaattacacttctggtacctccttcacacagcaattaccgctgaccccagaaagtgctctgtcgactctgcttaacctttgggaagaagaaaacttggaaaaagtctagctctcaaaatgctatcgctgagaagtggcttaaaacgtacggacacaggctttggtggccccaacgccttaaaaagaaaatgagaaaattttccccttgaaaaattgaatcatttaatgtaaaaccaggttaaacaaggcacatgcctccttcatgggtccagacatttctgggagtctcctgagacctgtctccgtggctctgagggtcaaccaagccttctggcatcaggcaggctgaaagcttgcctggtttccccaatggtgagtgggtttttaaagggccaacttgtggactgctgagcggctataccccacacccccctacatcttgccttctgagtttgccttaattagggaatggggaagtagggttgggggcccgagttcacgtcaaaactgtcaaaggaggtgggggagggggacagagagagaggagtggagaactccctccaggggcaggaaaaattcaaaaatcataaaaggaaaagggggaacttgaagcccagaagtcattgtttcctttatttcaaagggaaaaacctgcccgattctcatccttttgattgattaaggccctgaatacctcgcggccccggagtgacagtccctgaataggctcgagcgaataaagcgcagtgcagagcgcggggctggcactcgggggtgtaaaggaggcgagttcgctggcacttaccaagttataaataaaaggctatgcacaatggtaccttctctaaggacagacagtctttacaacactcctggcgtcatatcctgctggggacacttcagctcctagccaagacttcgttccttttatttttccagcagtttagtctgaatgccataataaattcctgagaacaaacgctgaacccgggcaaaactttaacatacagacacatctctgtcgacgcatcggggatctatatgtagagatttagaaccgcagcttgccagagcggtttttacaccaagaagaggagccaggtttttttctgcaccctcccccatacccccagccttcaactaacgagtgcttgggcctagcgacggctgcctgtgcttcacattagccccgcttgcggacggagaagacaaaagaacatcagcgcaccctggactcctcccaggaggagccccatcgggaggaccccttaacaagcctaggccaaggggcactgaccacaggaaggaaagctaaatatgtctggggccccagatgccttcttattggaattgtgccccctccagtggcagtaagccaagagaaatgagagcgagacctacaggtagaaaaaatgagacatagagagagacacaggaaatcacaagaggaatagaggctgagcgagacacacacacagaggcacagaaagagacagagagggaaatagaaagtcaaggaaagagtgatcagagaaagacacacacacacacacacacacacacacacacacacacacacacacacacagagtgacacagacagagagacagagacagagagacaggaacttctccgccctcagcaactgccatctccctggggctgtctctctcagtttccaccgggccaaccttctctcctgggcaaggggcgcagcgcgggtccccctcggggccagcagaggcctcggcaccaccagagatgggaagagaaagtggtcgctgttgcccaatcagcgcgtgtctccgccacccgggacggtctacccgtcggccaatcgcagctcagggctcctgaccaagctttgggtaaaagaactaataaatgctcccgagcccggatccccgcactcggtgtcaccacaggaggagactcaggcaggccgcgctccagcctcaccaggctccccggctcgccgtggctctctgagcccccttttcagggaccccagtcgctggaacatttgcccagactcgtaccaaacttttccgccctgggctcgggatcctggactccggggcctccccgtcctcccctttcccgggttccagctccggcctctg

SEQ ID NO: 25570 - DNA, 2300 bp, Homo sapien
tgtgtctctttgacttcaaagtattctaactcaaatttcaattacatgaaatttacacgtgcaatctataatagaagcaaaatgtggcttctgttgccatcgaggtgattcaagaatgtatttctcagttatgaggaatcttttaggttacattattggcatacttctctggagcacaaataaactctaaaaagaaacctggtgcccaaagtaaccttagacagacttctaggttgccagtttagcacacataaaaaactcatgtgtgtgtacacatgtacaatggttacagccacaaagccaagttgttaccagtatgcatatattttatacataatatatctttaaacataaacctaatacatacatatatacatgtgtagctgcacttgtgcaactcaacagtttttagtgcaaacagaatcttagtaatggaggtaaataaagaatgaataagaggtaaaaatggatatagaagtaaaacacaagacatgggggtataaataaattaaaactaagttctgaaaagtgacttttagtaatagaaacctaaaaacatttcatagaaggcaagaacaaagtctgacaacagagtttagttttagtggacattgtggtagtaaatatgtaagttacttctctcttcagaatacaacagatctcactgggccttccagggtcattattcctagaaataatcccactaaatgcccatcttagcaacgcacatttccatgtgtgagttatttctctctcagccccatttaaaaatgtgaaatttggatttagaaggggacatgtatttaaggaagagaagtgccacacaaataatggagcaattttaccatgaaattaatgtcatgaaaatagatatttctataaatacctcttgtttttattattaagacaatgcagacataaaacacttcatactgtagtttctacattgcagccaaaccacttatcaatggccaataaattacttcactcctatgatagatacaaatgctcgattcaagttcaattaatagaatagtgtcaggatatcatgcagacagcttgcataaatactcgaggaataatagcataccttcagtagattctgtgatttttaagcatgaaaactttgtcttattccaaatttcaaaagatggaataaagaatgttttcatataaaatacatttggaacagttttccttcttaaaaaaaaaggcatctaacccacttgcaacatatactggcaattcatctttgtagttacaaaatcagatagatatatattctttttcatctcatgtgactgtatgtgaacatttcagtaattccaacaatatcaaacagctaaattcaaaatcatataatactttctaataagtgtatacgatatatatcttttgtagccaaaggcagaaagaccttcagttagttgatttcatgtttgggcactagtttatattttatcagataattaaaagtcattagttatttcacagtataaaatattgaatcaattaccaacaggcttttattttctgctcctaatttcgaaatgtatttggactcgaggtatgggaataatgtcactgcttatcaaacaattttctggaaatcttaatgcacaaaaatttccagatttatatattcaaaaataaattatatgttaaatgaaattaagaaaaaaaggcgaggggaaggagaaaatctagtttatattctgtgtgaatagctttcaatatcttccaggtgggggcaaccgtaagccacttttgagagaagggagaacaggctctttaagctccctgagtctagttacagaagacttcctggcagtaacaccgtgaataaaacaaccacaagcttccaggagatgagacttctaggctctgctccagacaacacccggccatgggcaacagggcccaccgccctgggcgcgccgcagcctcggccactccgagtcggctccgatcgcgcacgcgcgccgtgcacctgccccatcgcgcccagctgctgcctgagctccgggcacgcccgcgctgtgccggcggggagtgtccgtcactctcagcgctcaggatctctccctttccaggaccgctaggaagcaggaaatccttttcctctcacgtttacatcccattcattcttcctccgggcaattcaagtccattcacagccgccacagatgcacgtgtgcacgcgcgcagctgcacctttaaagaaactctcaagtcctggcggccagaaaaccagctttcaggcggggcggtggggctccccctccccttgcttcgtctct

SEQ ID NO: 25571 - DNA, 2300 bp, Homo sapien
aactctcaagtcctggcggccagaaaaccagctttcaggcggggcggtggggctccccctccccttgcttcgtctctgcagatctttgtgctctagggagggatggccgcacattctgacgaggacgagggtggtgcataacgcggaggtcaattttgcacagtccaggcaaaagagaccccccccccccaccaacatcccttcctgttcagtttccctctctggcccagcgcgaagggcgaggggcgacagaagcccgagggacagaaaaccgaggctcctcagtggccgagttgggagagagtgtgagtccaggagagcccgggggcagcagggagagggtgcagaagctcgagcgcaccgagccagaggccccctcttctcccgccacgcggggctggaggtgcaggcgccggttccgcggcgtggcccggctatgtgtcgctcctccgcgcgccgcccgccgcagcccgtgccctcgggccgccgccgccgccgctgccccccgtcgagcccgcggccgcaccctcgggccgatacttgagccagcagatgacccaggtgacaacgaccgagaagagtgccaggatgctggccaccgacaggcagatgggccccacgggcgagggcgagggcgacccggtggccggtgcctcgccagggggcgccccgcctccgggggttcccccgccgccgtagtggttgacgaagatgaggccggtgaagagcagcaccaccatggagaggaaggagaagaccacgcacacgcagccagcggtgagcgccgcgcgcttgcagttctggcagctgtcgtaggcgcccggggcgcgcaggccggggcgggctcgaggcccgggggccgcgtcctcggcaggcggcggcggcggcggctgcggtggggcgggggagggcggcggtggcggggccggggtgggcggcggggcagcagcgggcgcgggcaggcgcgcgggcagcggcgggaggcggtcctggggcagcgggtcgtgcgctgcgcgcaaagccagcgggaaggcctcggctagcttggtgttgttgggcaggccgtgcacgcggctgtcgggcagcggcgtgcggtggcggcacaccgggcacgcgatggcgccgggcgggcagagccagggcggcgggcgcggcgggcgctcaggcgcggcggcagcggcggcggcggcggcggcgcggagctgcagctggctcaggcactcctggcagaaggtgtgcaagcacgccagcagcttgggcgcgcgccggtccgcgtcgaagtagttgtagcagattttgcactcgtagtcctcaagcggagggaggccggagaccgtctccgctgcgtcccgggctcctgcgtctccgcagtccggggctcccttcgcggcgaccccagctccctcccggctcccggggctgctgcttgggctctgctggctgccgccgctgtcgctcgccggcgctgccatggcatgatccgcccctcatcgggggcaaggtgaggtgccttcctccccctgcaccgccgcctgggctccgggcggggaggaggcgcttctgcctcccccctctgactgctgtcgcctggcgggggaggcaccgctggctgggccaggcgggggcgcagcagcgaccgcctccccctcccgcctccccgtcccccgcccccggcgcgtgcaccacggtccctccccgtccctgggctcctctgcagtccccctcggccttctcaacgcagctttcccagcagcttaggatatcggtttttgttggacttgaaattgggagttgagggcggcctggaggcgctcgggaaggagatttggggtgcggctgcttataaagatgttgccttttaccccagcagtcccccgccccctacgcggggtggtggcaggaaaccggttcctgagttttccttctttctcttcctcgacacgacctccccaccagtgtgtttctgtttatcctcctcgcccgggggctgggtccctggcgaagcctcgttttcacccacccacccccaagccagagctcaccagtgatgtaatgcgggacccgcgcggggaggggaaacggcagcctcaaccgcctggcagcggcggtttcttctcttcgtgaaaatcgtgatctcatctctccgtccatgggcgaaaaaacagccatcaccaggccattcacgctttgtgcttttgttagcagagcccaggcagccctgcagcccacatctagggtacaaacggaacggcggcgttttccttgtatcatttagaggaaatttttgagctgaacagtat

SEQ ID NO: 25572 - DNA, 2300 bp, Homo sapien
agagagagagagagggagaaaaaaaatactgttcagctcaaaaatttcctctaaatgatacaaggaaaacgccgccgttccgtttgtaccctagatgtgggctgcagggctgcctgggctctgctaacaaaagcacaaagcgtgaatggcctggtgatggctgttttttcgcccatggacggagagatgagatcacgattttcacgaagagaagaaaccgccgctgccaggcggttgaggctgccgtttcccctccccgcgcgggtcccgcattacatcactggtgagctctggcttgggggtgggtgggtgaaaacgaggcttcgccagggacccagcccccgggcgaggaggataaacagaaacacactggtggggaggtcgtgtcgaggaagagaaagaaggaaaactcaggaaccggtttcctgccaccaccccgcgtagggggcgggggactgctggggtaaaaggcaacatctttataagcagccgcaccccaaatctccttcccgagcgcctccaggccgccctcaactcccaatttcaagtccaacaaaaaccgatatcctaagctgctgggaaagctgcgttgagaaggccgagggggactgcagaggagcccagggacggggagggaccgtggtgcacgcgccgggggcgggggacggggaggcgggagggggaggcggtcgctgctgcgcccccgcctggcccagccagcggtgcctcccccgccaggcgacagcagtcagaggggggaggcagaagcgcctcctccccgcccggagcccaggcggcggtgcagggggaggaaggcacctcaccttgcccccgatgaggggcggatcatgccatggcagcgccggcgagcgacagcggcggcagccagcagagcccaagcagcagccccgggagccgggagggagctggggtcgccgcgaagggagccccggactgcggagacgcaggagcccgggacgcagcggagacggtctccggcctccctccgcttgaggactacgagtgcaaaatctgctacaactacttcgacgcggaccggcgcgcgcccaagctgctggcgtgcttgcacaccttctgccaggagtgcctgagccagctgcagctccgcgccgccgccgccgccgccgctgccgccgcgcctgagcgcccgccgcgcccgccgccctggctctgcccgcccggcgccatcgcgtgcccggtgtgccgccaccgcacgccgctgcccgacagccgcgtgcacggcctgcccaacaacaccaagctagccgaggccttcccgctggctttgcgcgcagcgcacgacccgctgccccaggaccgcctcccgccgctgcccgcgcgcctgcccgcgcccgctgctgccccgccgcccaccccggccccgccaccgccgccctcccccgccccaccgcagccgccgccgccgccgcctgccgaggacgcggcccccgggcctcgagcccgccccggcctgcgcgccccgggcgcctacgacagctgccagaactgcaagcgcgcggcgctcaccgctggctgcgtgtgcgtggtcttctccttcctctccatggtggtgctgctcttcaccggcctcatcttcgtcaaccactacggcggcgggggaacccccggaggcggggcgccccctggcgaggcaccggccaccgggtcgccctcgccctcgcccgtggggcccatctgcctgtcggtggccagcatcctggcactcttctcggtcgttgtcacctgggtcatctgctggctcaagtatcggcccgagggtgcggccgcgggctcgacggggggcagcggcggcggcggcggcccgagggcacgggctgcggcgggcggcgcgcggaggagcgacacatagccgggccacgccgcggaaccggcgcctgcacctccagccccgcgtggcgggagaagagggggcctctggctcggtgcgctcgagcttctgcaccctctccctgctgcccccgggctctcctggactcacactctctcccaactcggccactgaggagcctcggttttctgtccctcgggcttctgtcgcccctcgcccttcgcgctgggccagagagggaaactgaacaggaagggatgttggtggggggggggggtctcttttgcctggactgtgcaaaattgacctccgcgttatgcaccaccctcgtcctcgtcagaatgtgcggccatccctccctagagcacaaagatctgcagagacgaagcaaggggagggggagccccaccgccccgcctgaaagctggtt

SEQ ID NO: 25573 - DNA, 2300 bp, Homo sapien
gattcaaccatgcaaaagaggacgatgacctaaggctcagtttcagggcatggtggagcaataagatgaaaagaaccagagtcatggagtagggccatggagcagagcttcctactaacctcaactgcttgccttagaaccattctatgaaagagaaatacatgtctgtgttccttaagccactctattttggggtctctttgttatagtagcttaacctttatccgaactagtattaatatatccatcattgattccttttaaatatgtcattttgtaattgttacatatatacaagtgagcaaagtacaaataactggatttctgccctggcaaaaaaaaaaaaaaaaaaaaaaaaaaaaggtcggggggcgggatgtgaaatgtatttcccacaggtatgactagtgttcagtgatcaaagaactacagggtgtttctctggtatcaagaaaaaaaaattttttgcatgactgcaagctactatttgatatctctgcaccattacagcagtctttcagtcctaccacttctcaaagatgttgatttttgttaggttggttgggaaattcatgttcagaataatcagactgggccttagaaaaaaaaggttctggggaaatggactttaccactgcccaggaggctcaagatgtcctactcaagatgttcagagccaaattctcttgaggattccttcctagattgaatgactccagcacaatacaccttcttatcatgatctcactaggccttatagagcttgtctcaaggttatttttacaagagccttataagaaagacaagaagtgaggattatcatttcattacagggataaactgcgacatatggtgacttacatcaggtgacttggtgagccactagaagctggaatcagtaactgatcctccatggagataaaatgctctgtctacaaatacaattctttggcaattaacttaatgctgcgtgtgccatgttttgctttgcctatttttcctaactggtagaaagaaaaatcgaagcactaaattcgggagacacatgatgcaagtgccttcacaggaaaacatatttctttaacacataagcagaacaggtccccaacgatcacagctccagcttctaaaaccaaaccacagggttttgcctcacacctgtaaatgacagccagaagcattgtggagagatgcttccacctcctgggccggacatttctgtgtgtgatcccgccagacatgacaataactctgcgtgtcttctgtaagaggaaaatggtttcccttaagagcttcagcattctctcagtccccttgactttgctctccagacaggactgagaagcaagaaaagtagaaactagggcatgaaggggactacatcatcctggaaagtcacatcccaaagacattcaggcctaaaaggacaactgaataaataaggcattgacaggtgttcattaatcatttgtgcaaccaaattcttagtaggctttgcatggacaatcaggaaacatgcaggtttctgctgcaaacgaaagacggggttgaattgcacttttgttgcagactgatcacctgggcctaatttgattgttgcctcccaagggatctctgagcccaggagggaaatgtaggagggaggagggaaaaccaaggccggcctgcaggatgtttcctttgctatcttctgctgagtgctctaaagcaggtgcaggtgcaatgagatacctaatcctgtccccagtcctccagcactttgttctcttctcgtttaaactccctaaatggtctggtggggttttcccagtgtcattgcttaaagagaggcagagcggaaagaaagaagtaggagaaagcggtaagcatctttgttctcaatgcggaaaacccagaagggactttccttcccacccacctgaaaatgttccccagttgccaaatcagaagggcaggggcagcgacgcggaagatgactcagggcccactttgaacctcctgggtacttgagcaagctcaagggtgttcggacctctagggagacgttgcatcacgcagtttggaaagaacttgggaattctccctggggggctcgctgtatttactgggaactagtcttgcaggaaggtgagagtacgtggctggctgtggggagctggcgtgggaggaaatccgacttcaccttgggctcagagttgcaaggaaggtcactgtgggatcagcctgagcccaaaaggatgggctaatgggagcggccgcaggtgcacgcgcgctcggccgctcccattagtgttacgtct

SEQ ID NO: 25574 - DNA, 2300 bp, Homo sapien
gttaggttggttgggaaattcatgttcagaataatcagactgggccttagaaaaaaaaggttctggggaaatggactttaccactgcccaggaggctcaagatgtcctactcaagatgttcagagccaaattctcttgaggattccttcctagattgaatgactccagcacaatacaccttcttatcatgatctcactaggccttatagagcttgtctcaaggttatttttacaagagccttataagaaagacaagaagtgaggattatcatttcattacagggataaactgcgacatatggtgacttacatcaggtgacttggtgagccactagaagctggaatcagtaactgatcctccatggagataaaatgctctgtctacaaatacaattctttggcaattaacttaatgctgcgtgtgccatgttttgctttgcctatttttcctaactggtagaaagaaaaatcgaagcactaaattcgggagacacatgatgcaagtgccttcacaggaaaacatatttctttaacacataagcagaacaggtccccaacgatcacagctccagcttctaaaaccaaaccacagggttttgcctcacacctgtaaatgacagccagaagcattgtggagagatgcttccacctcctgggccggacatttctgtgtgtgatcccgccagacatgacaataactctgcgtgtcttctgtaagaggaaaatggtttcccttaagagcttcagcattctctcagtccccttgactttgctctccagacaggactgagaagcaagaaaagtagaaactagggcatgaaggggactacatcatcctggaaagtcacatcccaaagacattcaggcctaaaaggacaactgaataaataaggcattgacaggtgttcattaatcatttgtgcaaccaaattcttagtaggctttgcatggacaatcaggaaacatgcaggtttctgctgcaaacgaaagacggggttgaattgcacttttgttgcagactgatcacctgggcctaatttgattgttgcctcccaagggatctctgagcccaggagggaaatgtaggagggaggagggaaaaccaaggccggcctgcaggatgtttcctttgctatcttctgctgagtgctctaaagcaggtgcaggtgcaatgagatacctaatcctgtccccagtcctccagcactttgttctcttctcgtttaaactccctaaatggtctggtggggttttcccagtgtcattgcttaaagagaggcagagcggaaagaaagaagtaggagaaagcggtaagcatctttgttctcaatgcggaaaacccagaagggactttccttcccacccacctgaaaatgttccccagttgccaaatcagaagggcaggggcagcgacgcggaagatgactcagggcccactttgaacctcctgggtacttgagcaagctcaagggtgttcggacctctagggagacgttgcatcacgcagtttggaaagaacttgggaattctccctggggggctcgctgtatttactgggaactagtcttgcaggaaggtgagagtacgtggctggctgtggggagctggcgtgggaggaaatccgacttcaccttgggctcagagttgcaaggaaggtcactgtgggatcagcctgagcccaaaaggatgggctaatgggagcggccgcaggtgcacgcgcgctcggccgctcccattagtgttacgtctgccgggggaagaaggtggggtggggggttgggggcgccgggagaagagaggcgcagttcggagatcggcactcctccgtccagttacaggcggtcctgcccccgtggccgcccggggccgcccaagccctccgggacggagagaaagggggacgcgttgcgcaaggtggaggcagacacctgggcgggcgctaggacccgggcggcgcacctgttggctgggcccggggccccgcccgcccggcctccgcccggagtgcgggatcggcgggggcgaggcgggagtggcggtgccagcggagggcaccggcccggcgtggcagcggcggcggagcgcggccccgggcacaccatggccgagctgctgcggagcctgcaggattcccagctcgtcgcccgcttccagcgccgctgcgggctcttccccgctccggatgaaggcccccgggagaacggcgcggaccccacggagcgcgcggcgcgggtccccggggtcgagcatctccccgcagccaacggcaagggcggcgaggctccggccaacgggctgcg

SEQ ID NO: 25575 - DNA, 2300 bp, Homo sapien
atctgattaacttaaaacttttttttaaacggggagacagaagaaagagaaggggaagatacccaggtacacagttctgggaggaagtttcacaacatataagcatgcacgtgagacgtagtaggacttggctttaagactcatgaccacaactacagtgctggcagttttagtgaaatgaataactttgatttctacctattcttaaattagaacgataagaaacaaacaatttgaccaagaagcaaggtagatagatagccagggctataatctgaaaatcccaacaagcaacttctcctcctccgtagaaggaggggcaatgggcctaaagtcagaatcggcatatttgcgtccagatatcaaaagcacttgtgcagattctactgactctcaacatttgctgctgagtaatactagtggctagaggaatctggctaatgctgaatcatataaggaacacacagatactctgcttataagctagacataggcataaatccacctgcttcaagcactagtgtctgtggtatactgtagtaagaagatcaaagacaatagggcactgtctgtattaggcaaagcactttatactatctcctttagtcttcacatagccctatgaagtaggctctgttattagccccattttacaaatgaggaagctcttaaccatgataataaatgacgttattaataaactttatcataaaggcactttcccctcaatgctcccatttgaccctcacaacaggagcttggggttcagagaggtgaaatgatctgcctgaggtcacacagctggtaagtgagagtcagaactgaaggccatgccttctgagtccaagcccagtgtgttcttccccttgtaacacatgagtaccataacagctggttgtcatgtctgttcttaaggtttatcattaactaagtctcagattttaatttaaaagtgttcagaattaatgagttaatatatttggaaattagagtgtgggcagcagcctcaacacacatttttaaaattttatttcaatagtttttggggtactcaacacacataaaccaatatataatatataaaaataaatatgtatataaataaaccaataaatataatatataaataaaccaatatttagagctgtttatgagcaaacagctagctaaatacattcactattaaaaatcaaataggaaagaaattcacaacatgactccaaccttatgaaaactgctacatcatgtaagttgaggagaattttttaaggaggactgggtggctctgcaatggatgtgtccgtggtgatggtggtggttttcctgctgcgagcctccacttgctgcttttctcttaaggtacattagcatattcacagacttctctgggcaccaagatcaacccaatgggagctggtgcttggcccactacgtccttctagggcagctgacattgggtacaacatggctcagcagcctgcactaagttaattcagacagtgccaggagctcagacattgtttgaccccggcatgaagtttaagtaacttatgacaaaagatgatatctagtcaaatatattccttgtaactgtccctttcttatgtaacagaggtctaaacccagatgaccaggtagaaggctacagtggtagaggtgggaccccacactagtcctggtctttccagctacatgaggcttgacttcctgcttctgcataacctggaatatggaacatccctgggcttctggggtaaagggacagggctaaacaatactgctatttatctacaagactgctagatttaatggaatctaaaacttccagtggggctgggtgcagtggctcatgcctgtaatcccagtgctttgggaggcccaggcaggcagattgcttgaggccaggagttcaagaccagcctgggcaacacagcaagaccccttcactagaaaaaaaattttttttaattatctgggcgtagtggtgcatagctgtggtctcagctacttgtgaagatgagatggaaggatcgcttgagcccagaaggtcaagactacagtgggtggtgatggcgccactgcactccagccccagcaacagagaccctgtcttaaaatcaaacaaacaaataaacaaacaaataaaacatccaatgggtaaaagataacacttataaaattaaacataagattagatccataggtctcaaataggagaaaaataacttccattgctgtaataatataactgtttaagtcttactataattggcatttaagcagatattaagtaaaattct

SEQ ID NO: 25576 - DNA, 2300 bp, Homo sapien
caaaattatcaagcgatttcaagtagatgtaattctagatcctgaagcagcacatcgtaaacttatagtctcagaagatagaaaaactgtgcgatatggaaatacaacacaaaacttacctcataacccaagaagattttatctgctcccagctgttctgggttctaagggataaaattgtggcaggcagtaccgggaagtagaagttaaagacatgcctgaatggattcttggtgtctgtagtgactctcctcccacaaggaggaagagtcaaccaattttagtacaggatggattatggagaatttggtaatctagtcggaataattatattgtattgggccataaggaaattattctgctgccaaaagtaacacctagtaagattggcatttttttagactgtgaaatgaatgaggtttccttttataatttgaatgatagatctcttctctgtacttttaatgatgattttacaggagaactttggccttatttttatactggaactgactcaaaacctcttaaaatttctacagtaacagattctgtattttctttcacctagtagacataactgagccagttaatctagttttggccattctgtattttgtccagtttttctcataaaaaaacaatattttttatctcaatttcagcaacttccaaaaaatgtgattatgggacctactttataataaattatggggtcaatgacaaagtactttagaaattctatggtaaaatacttgaaaaatatattactgaaggaacgtattatgtaagaaaatctattacttttgtaattgccaataaaagcccaatttttttctcaaaaaaaaaaaaagacatactttaatttaaaagataattttctgatagttagtattatttttttcctaagccttctatcttcacctattcagtgcttttataacactaccttaggtgtaaagttaaaaaatgttcaggctaaaaaattgtacattatcttaccttatttttcctgctgccttactaatgttacagaaagatcatctttgtactaatctatttgtatacttgagaaattggctgagatttctgtagtttataagttgctattcgtaattttactacacctcagaattatgtttgaaattatgtgatatctaagagtgttggactggatgttagattatttgagttctagttctaacatttactagctgtgtaactatggacaattactttgcctgtctgaactctatagtccagacgagtctctctgggcctccttttcatttgtgaaataaggggtttggattatatgatctttatggttttcttttttgactctgaaatttatgtgattttaaatttctgtaagattattgtcaggtagcactgacaaattcagtctttacatatggtcattgtatgagctgagatgctgaaactgaaagaagatgtaagcttctgtgtctttttttttttttgcaaaggaattagatctttttttacagtagttcctccttatccacagttttttgcctccacagttttggttacctgcagcaaactgtggtttgaaaataggtgagtatagtacaataagaaattctgagacagaaagagactacattcacattactcttattatagtatattattttaattgttctattttattattagttgttaatctcttactgtgcctaatttataaattaaactttttcataggtatgtatgtataggaagaaacatggtatatgtaacatttagtcctatccaatgtttcaggcatccactggggagcttgaaacatatcccctgtggataagggggtgctgctgaaaaatgaatgcagatgccttcatttctccggttattatattatcttctctgtatataggtccctcctgagatctgccatctcctgggaggtgactcagctttcttcactattgaaacagtaattttattaacccctttgattgaacattgtttaaactcgaattcttcctcttctctttttgcctctccccattccccttcttttcttttccccctttttactccttcctcctcctcttcattctcttgtttttcatttttcattttccctaattataaaaatttgcctcctaagtttgagatgcccaaggtagaggttttttggagcccagcaccaccttgtacagccccagcattgcatagactcctgtggttcctcaggtgggactttggcacataatactcgtggccagaagtgaatttctctgcatattgtgcaaatgtggatataattctta

SEQ ID NO: 25577 - DNA, 2300 bp, Homo sapien
aattacagatatgggacacaataattctttaaggtgtatattattatccctattttatggatgaggaaactgaggttcagaggccacagaacactttggagtgcccaaagcagagcaggtcagcaggaagtcctttggttatttattattactattttgttgttgttgttgttattgcttttaagacagagtcttgctctgtcacccaggctggagtgcagtggcgtgatcttggctcactgcaacctctgcctcctgggttaaagtgattctcagtcctcagcctccccagtagctgggattacaagtgcccaccaccacacccagctaatttttgtaattttagtagagatggggttttatcatgttggccaggctggtttccaactcttgacctcaagtgatctgcccacttcagcctcccaaagtgttggtattacaagtgtgagccatcatgcctggcactagtcctttgcttattaattgagcagaaagcaccaattttaggtggaaagctgtattttgcattggggatgtttgccatttatggggtgttgccaatctgttatgttggtcactgggaagggactgccttcccatggaggggagctaatactgtatagtgaaaaactgcttgattaatagttagggtggcttacatctggctcagcttttctcccctcatgtgaaggactttggaagaagccctcactcactgtacagtagaaaggattagggcaaggctccccctggaactgccagtttgtgccttagtttcattacctgtaaaacagggataatggtacctatcttgatgtattagtttcccttggctgctgaaacaaattaccacgaacttgctgacttaaaccataaatttatgctctcacagttctggaggccagaaacccaaaatcagtttcactgggcccaaatcagcatgcattatagggctgccccatgggctgggcgtgaatctgtccttgtctctgtttatttcagggatacatgtgcaggatgtgaaggtttgttacataggtaaatgtatgccatggtggtttgctgcccagatcatcccatcacctaagtattaagcccagcatctattagctattcttgatgctccccgctcctccaccccctcacccccagtgtgtgcttgtctctttgtttctggtggctgctggcatccttgggttgtggctgccatactccaatctctgccaccgtggctaaatcgtctctctcaacctcccttttatgatttgatgaggatactgtgattccatttagtgttcgtctttcgaatccaggataatcttcatctcaaaatccttaacttaacctgcaaagacgctgtttccatataaagttacatttagaggttgcagggattagggtctgatattattgggggccgttattcagcctattacactcagggttgttttaaggaggaaatttaatgctggcagagggctgagcacagcccactgacagcagagagcactgagcaaatagacaaaaaaagaggtctcttacaatgcctcccttatagggctgccgtaaagttcaaacaaagcacaggtatatcacttatacgagtagaggagagattaaagaatgaagtaaaaactgaggtctgttaacagcccctctcccgccgccaggatttgcacacctttctctgcaggaagccttgaaccctctccactcgcatttccaccacctccaggcaagatctcccacgtggaggccccaccccctccctgacgcgccccactctcgccccgcccacctggtgggcgtccccggccgttagcgccctggaagcatccgggacttcagggtcagtacattacaatgcctgacaaatcctagccagttctatcaaattatatctttcttacaggcttttaagctattagtctcataaagatacatttaatcagcgaggtaatggcatgatgagtgtttttaggttaaaaagagaacaggaactgttgccagcagaatggcgatattcaagacaacacgcacaagaagaggcgggtcctacgcgcttcgctagggaagcccgggtcagctcgctgcgcaggcgcagtgagttcgacacaccatgccgactgtcagcgtgaagcgtgatctgctcttccaagccctgggccgcacctacagtgagtggcggccctatacgttgggccctacgcctcttctcggaggcagggcctccctccaaaagggcaatgtggcgacattcatgccttcctgaaggttttggctccgggaggccggggttt

SEQ ID NO: 25578 - DNA, 2300 bp, Homo sapien
ctattctgccatttaccagctgtgtgactttaagccctaatttcctcagctgcaaagttgaagtgaatgcgtactttgtagggtttttgagattacgcctgtgaggtctctgcagagtgcctgacatagggtgtgttcgtagtgtccccacctagcactgggggaagattcaaggaagaaatctaaaaggaaagaagaaagtgactccttaagtaggaggaaaaagaaacccaaacaagttttgcatacaaaaaatcacaaacaactcctccaagtggccctggtatttgttttaatccaactccctttgtattaaaatgttgaaggagaaaagggcataggatgggggagaaaggagggccaactatattgttttgccctgttccaagtcctcttcagcaatgacttgacagctgctcatcattttgagtttttcaactatgtggtaattaatatttataaataaagtgcagtggttgctcccaaggactaggcactatttagaatctagccatccatttagcacatcgtaattgaaacccttcagtgtcttgtactgctcttggggttcaaacttgaaccctaactcagtctgcaagggtctggaccttgcccaccatttttgcctgatgtcaccccaatctcacccttgtcccccaagctctcactctttgagctcttcttggagttcagccacaggacctttgcatatgtgcttccctttgcccggatgactcctgggttaactagatttggctacagctcaagtaagggcacttcttcagacacttccctgaccgtgcagcagtcttggttttggaatcttctagtcattcacagtagggtcttacttgtaattatacaccaaattgtgtagttgttttgcttatgtctgtttccccctgtactctgagaacaagacaatgaatagcttgtgtcaggcctctgagccaaagctcagccattataacctctgtgacctgcatgtacacatccaggtggcctgcaggagccaagaagcctggagcagccaaaaaaaacgcaaagaagtaaaacagccagttcctgccttaactgattaaccaacattacaacattttaccattgtgacttgtccctgccctaccttagccgatcaatcgactttgtgacattcttcttctggacaatgagtcttatgatctccccaccctgtaccttgtgaccccttcctctgctaacaatagataaccaccttctactgtaattttccattacctagacaactcctataaagcaaccccttccccatctcccttcgctgactctttttcggactcagctgacttgcacctaagtgaataaacagccttgttgctcacacaatgcctgttggtggtctcttcacacggatgcgcttgacagcttggttatccaagcgcccggatggtgctcagcaagtggcaagtgctcaataaatgtgggttgaatgaatgaatgggtgaaagattcccggagctcctgtagggaactgaggacccaagagtgaggaagccaggtccccttccccatccgcggggaaattggaggttgcggggggacacagatcaataaactaagaaacaagtctcgctcatctctccagctggtgtgcgattcctcaaactaacccttccccaatcaccgagggttcgaatgaaggggtgggatgctgaaggcaagcgctgggtgatcgatcagctgaacaatggtcagatcctggtggagatcccaggtcctcagccaggcggcaggagcccgcgctgcccggctcgggctggctgccagttgacccctctccccgtccctcgtgtcccacgcggcgcactctcgccaacgcccggcgcgccagccaatgcgcccgggccgctgtagctgctccggggccagggcgctgggccagctctggcgcccggcgcttgtgattggctgcccccagcctcagcccagcgcgccctcccacccagggcgcagttgggtccccgctcgctgcctagcctctgccttttcctctccgcccagccagtgcccagcgcggggcccggatccggccgggcacttcccacaggcgccgcagagcagcgtgggtgcaggctgcagtggctggcgccgtcctcgcccggccaggccatgaaggtagagtttgcaccgctcaacatccagctggcgcggcggctgcagacggtggccgtgctgcagtgggtcctgaaatacctgctgctcggtaaggaccccgccccccgggccgcggggcttgggctccatatcctccctcgggacgg

SEQ ID NO: 25579 - DNA, 2300 bp, Homo sapien
caaccatcaccttgatcagttagcagccatcaaccctgaggtgagaccctcctccagcaaaaaagattacaacttgctgaagactcaggtgattgccagcattttttttgcaataaagtatttttaaattaagatatgtacattgttttgttaaatataatgctattgcacgctttatagtatgaacataactttttttttttttttgagatgcagttcactcttgttgcccaggctggagtgcaatggcacgatctcggctcactgcaaccttcgcctcccaggttcaagcgatctcctgtctcagcctcccgagtagttgggattacaggcgcatgccaccacgcctggctaatttttgtatttttagtagagacagggtttcatcatattggtcaggctggtctcgaactcctgacctcaggtgatccgcctgccttggcttcctaaagtgctgggattacaggcgtgagccaccgctcccggcgaacataacttttatatttactgggaaaccaaacaattcatgtgactcacttaattttgatattccctttaagtgtcagtggtctggaaccaaacccacaatgtctctgaagtatctctatgtatttctacttagcttgttaaacagcaaacaagatgagaatttagaattttaattcccaggaccattttcttttaaatataggtccatatccataatatatattccataatataaagataatgaagaaagatattgttggaattcttctagtctgttttaggcttatggatagataaaaaggtgcaatattagttttcttctctcggaaaaaaaccagtattttccagaggatttcatggttctagaagtactacttctaaagcctgcttctctctgcagagctgcgaatgtcttttcagataagaaattctgcattccatttatcttcaggatgtatcctttgataagatttcaacagattaatgagcaactgaactgccatattttgaagtgggagaacagtttgcctgagtcaggtatccatccctttaggttctcgattggcccttggcccacggtgagtgagctctctttgcttggtgcatcatcgctccacctagttcaagttctggcggcttcctgattttgattctcttgggaaatgaggcctgctttagcctgaggctggctcaggaaggcaacctttcacctacttaaggaaaagttcacaggcaaactaaacaatatgttgggttaaaaaaagagaccaatcctactagtactgggtgagtgaaaatcttctctcttacagtacatgtagttctactacctgcactggatgctttctttcttatccttgtttagtgtctaaaacgagaaacaatggcaaactccttaaaatacagaaccactgtggattcctaagaacgttcaaaaacaataatttggagtaaactttattttttgaaaagaaatagcaaatttgcatggtgagtgcatttagaggaaaacgggttatatgctaggtcaagtgaggccaaaacaagagaaatgataatggataagctttgagtttttgaggctcttcttgccccaggcagttccaaaagccattttatttggcaggatttgacagcaatttctgcaagaacgggataactaatccagttaaaaacgaaaaagaatatgcatactatttcataatttatattgaaatttatacattacagcaataattgtgcgactgtaatttttttttttttttttttggtggaggggtgttttttcctggagggacggagctcctgcagaccctattgggctagccgctcctcccacgtcgctgccgcagatccccgctcccctcccccacccgcggtccgtccctcctggtcgaccccgttcccgcccccgccccgcgcagactgcagccaggtccggtccgcggcggctccgcggaatgacccgtagtaacctcgccccgccccgggccgccagcgccgcgctccccggcccgaattcgataggcccagccccgcacgcgccaccgctcgcgggccaatgggtggcagcctctctgcataggcaacgagtgccggccgggggtgagcgtcccaggcggttccgctcaacagacgctgctgtggctgcgccgggctgcgacactgcagttgtctacgcggccggggccgggacgaggaggcgttggacggggtcgcatacgttcgtcccctcgcattgcggccccgacagctgcgccaggatccccgggcggcggcgcggggcgtgaacgctctggggctcagccagg

SEQ ID NO: 25580 - DNA, 2300 bp, Homo sapien
gtatgactgtcacctaacttttgtggaaaggagactctcaaaagtagtgtattaaaggatacttttttctccccaacaataaggtattaactatagaatttattaagagagtatagggtcattaaaaagtttggacatgccttggagagacatgtaggttaatatcctaccttacctgctagctgtaagtgcctttggggacaatctatttgaaattgggttttgtgagaattaaatgagataacataaaaagttcccttcactgtgcttgtttgcctgcactcagaattgtttcccatttattgcaagcttggtgaaaaattccagccacatttcatactagcaaatacggattccttgatatccagcattgtgcaagccactcatttatacttcattagagataaaatgctaagccatattattattattgttatttgcagatatgaacagttgtatagtattggtgcctgagtgtggtaggctgaaagaaaaatacagaggaggaaatcagattgagtggtgggcaggattaactgagaagtaaattgtggcatatcaagatgcaccgtctgcagtattttctccttttctgtcctctcttccccctgtcctcatcctctgctgcctttgactttgtgggagcatttctaagtgttggggctctctgcctgctctgcaagttgagttttcagattccttttcatgatggtggtggatgtgaggggcataaaatgtctgcttgctctgtcagtagggtgtgaatataataccattgttgacttcttccctccttagacagtgtacatgtcttagattctgagagtgactcctgttttctttgttcagtccatgagttttgtggaggttaatttcacaggtctgccaattttgggttgagttaccatgttgtatctctcttgcgcctaagagattcttgaaaccccagatctaagcaggtagaaccatttgatacgttagtctgaaagtgatccctgtggcaacctacttttttcctgtttttctcttaggaaaacacgtcatctctgatagaagattttcttccttctcttttcttttctctttttcttccttctctcttctcttcttttctctcctctcccttcccccgctttccgcctcctttccctctccttcccttcccacctctccccatccctcctctgcctcttctcacctcacagggttgttttttctcacagggtttctttctttctgactttgtcttttcacaaagtcttgctctgttgctcaggctggagtgctttggtgtgatcacagcacaccacaacctcaacctctgggctggagagatcctcccacctcagcctccattgtagctgggactacagtcatgagccaccgctcccggcaagaagctttcatatgagcatttgtagcaatttttgttttgaaaaattgggagttgttacagggcatttgactatgatattaataatattatttaatagcaatttttaacataaaattttattttaacatccacttcataccttttggaagtatatcatttgaaagtgatttcctggctgatggttaagctccgttactttacttacatttgtttcataacacaagatctgaataacacaaaatcctgtctggtctccttttccttcagtctttccaagtcacctgtgttcttcctctcaaataatagaggtcatacagagaagagatcttccttgtgcttgatcattctgatttaaaacaattgctaattaaaatataagatgtaaataactctttgatctaatgcaactgaccattggcatagaacattttaaaaaacacatttcaagtgtttgaacctagctatttatcacacaattttatatttcaagattttgtttgctcatctttattgtataagtagtaataggtcattttcttttaatgctgttaaacttaattcatcttgttattttaattagcagttgtgagagtttagtgaagttgggagttgttaaattcttcatggtgaaagattaatggacttagacctgcatttaaatattcagggataatttcttaaaaaccttgacttgcctatatctttttctgtagtcaggcatgaagccaggcatgcccgtgtatacattcttctcagttggcaaggtatcatagaagttcttctaggtcaatgcatgtacatgtagcttacttttaatggctgcataatagtctgttcaatgggtatatatgtttttcaggcattctttgattaatgaatctttagatcattttctatttttggt

SEQ ID NO: 25581 - DNA, 2300 bp, Homo sapien
ctatctctgctcactgcaatctccgcctcccaggttcaagcgattctcctgcctcagcctcccgagtagctgggactacaggcgtgtaccatcacgcccagctaatttttgtatttttagtagagacggggtttcactgtgttggccaggatggtctcgatctcctgattttgtgttctgtcctccctggcctcccaaagtactgggcagcctcatcataattgcttaccaccaatgtctgtgttgtttttgacagtgccattaggcatgaacttttccattctttgttctaaatatagtcggtcttagaaattgctaaggggctctgtgttcttacagcctgcttctccagcctgtgcagaacctttgtgccattgttctggagctggggctggggacagcagcttgattttcttatagttatatctgttctgtgagtggtctactaggccatcaatgtacccatcagtcttctctgtttggagcttcttggcctgcatggaacctctgctttacaagaggtgaggcaaagatgatctgtgcttggtgtccttggcctgatgcatctggggtagagcttctgccctaagaatggggactggatgaaagagaaaggattcttcagttctctcatctatctacacttgcctggaatagaatttctgcaacacagagctaggggtaggaggtgaaaaatgctggctgcttgcgtcacttgggaagaaatcgtagtcctggatttggagctgggtagggttaactagttactagttagcttcagttttgtttcttcaagaatgatggccggatgtggtggctaacacctgtaatcccagcactttgggaggctcaggtgggagaattgcttgaagccaggagtttgagaccagctggggcagcatcatgagagcctgtctctacaaaaaaaattttgaaaaattagctgagtgtggtcacacatgcctgtagtcccaactgtttgggaggctgaggagagagaatcgcttgagtccaagagtttgaggctgcagtgagctataatcttgtactgtactctatcctgggtgagatcctgtctttaaaaaaaaaaaaaaaaaggtattattacccacctgccacacaatggctgttcccctctgcccggagtgctctttcttacccaaataggcacatggtacgctctctcttccttatgagtctctgttcagatatcacttagctgtagcacctctccaacgttgccccagtcactttctattttccttacctgggtttattttcctcataacatttatcaccatctggcacgtacacatgcatgcatgcatacctacatatttgcttgtctacctctcccagtgaacgtgtaggttgcacgagagtgggaacttaggccgttttgtttactgttactttcgcagtgcttagaacgatatctaacatagtggattttcaataaatctgatgaatgcaaagtacagaatgaccaaagtatactgctttcttgcgtcatagtttaacctaacttgaaaactatctgtagagccattgtggaaaatgaattttttgtgtttgcaaactccagttgcttgttgctgactagagtgagaatggggctcacagggaaggaatgtggtgattatttggcagtggctgctggggctgtgagagaggatggatgtgttgtatttgtaaagtacttgccatccctaatgcagtgagatgctaaagcacaggaaatgggtaaatttttggtcttcccccaaccctctttctgacttgctccctttttactactgggaaatgtttgtggatacttaaggttttggttggaacagccgcctgtttacagtatgatgtggaaacttttcttgtaattccgttgttaatagatattgtacaaatgagtctcttagaaatatcaagacattgtaggggaccagtgtggtagctgctgcctgatagaaaaaaaaaaatcttcatttgccgatgtaacttttctttaaattattttaaaatgattttgaactaacgcctttctttttcttcctcctagattctcgctgaagtctgttaattctactttttgagtacttatgaataaccacgtgtcttcaaaaccatctaccatgaagctaaaacataccatcaaccctattcttttatattttatacattttctaatatcactttatactattttaacatacattccgttttattttttctccgagtcaagacaagaaaaatcaaaccgaattaaagcaaagcctgtaaattcaaaacctgattctgcatac

SEQ ID NO: 25582 - DNA, 2300 bp, Homo sapien
tttggccaggcagttgacctttacgagcctatcaaactctcaatatttttgaaaaccaaaaataaagccaaaaaaccccccagttacaatataagatttgagttgttatagaagatgtcacaaaatagctaatttttaaaatagatttttcactcaaactcagtttctggctttttattaaaaagataattctatgcaaacgtaactttctggttcatcataacatttggacgatattctggtttcttctgtaaattattattttgattacattaaaaaaatttttttttgttttatcaggttattcttggacagtataattggctttcctatgaagatgtctttgttcgagcctttaattttggaaatggattacagatgttgggtcagaaaccaaagaccaacatcgccatcttctgtgagaccagggccgagtggatgatagctgcacaggcgtgttttatgtataattttcagcgtatgtagactttcttatcttctggaagaatgaacttaactgatatttattgaaatactttactctgaagaggttaaaattctgatgttaattttcacccagtgtccagttagtggagaactctgttgtgacttggaatttttggtttattttggaaaataaatcaattatatgacaaattgtaccaatcagtgttgcagtgaggcttgaacctcttcatgggagactttcaggtcttgagaactagacctacacttaggggccgttgttccaataccatttctcaggaatcctctttagaagttactgtcaattttgttctgtcacctctatcagtaacaacagttgacctccgaaacacttccatactgaaacctggtgaacttcaaggtgcaggttaaacaatagagttttcatattgtaattatctgaatggtaattgtggtggctcagtctgtgagatagttctggaagcataagttcagaggtctcggtgccaaaatgtgacagtaatttgtggatgtttagtctcatccttcagatgaaacagaaaatacactttcaccagatttcttgctgtaaattcctccaccttttctttttcttttttttgagatggagtctcactctgtcgccaggctggagtgcagtggcacagtctcaggttactgcagcctctgcctcccgggttcaagcaattctcctgccttagcctctcgagtagctgggactgcaggcgcatgccgccatgcccggctaattttttgtatttttagtagagatggggtttcaccctgttggccaggatggtcttgatctcctgaccttgtgatccgcccacctcggcctcccagagtgctgggaatataaacgtgagccaccgtgctaggcctcctacaccttttcttttaaacaaacattccatttttgttgtcacaggtttggatttacattgtttcttttgaggagctttaaaagaattattttcaaagtcattttgtgtatcttttttgagttaggcagaaagtaaataaaaatctacactattcatgttatgtaatttcagcatttcagagaatgtttgtctttagatatttttgcttgagaataaacggtactgccacttgtttgtgctcttttcttgacatacaccgtaaatctgacattcagtgtgtcatcctatttgtatatgttctttttcacattgtaaagccaagtggccaacaattaagaatttgaagtcttagaaatcagttataattccttcacaatgtggtagtcccagagtaacatctgtaagtgaaacaaaataaaaatttaaatatcttcatctttaaaaattggaaatcttggggcatttaggggaggatgagtaggtgtaatgttgattagtatgataagataactttaaaaaacataacacttatagactgtggatttaacagtttagggctcctaatgcgttattatgattcatctccacattcagagactttacatttgtagttaaatgtttgaatatttgactggctgctgcttttccttttagttgttacattatatgccactctaggaggtccagccattgttcatgcattaaatgaaacagaggtgaccaacatcattactagtaaagaactcttacaaacaaagttgaaggtgaggactctagttactttctaactgtctgatactttagaattttcagtgtcatgagccctattattgatacttagttcttttatgacttttaagtccttaatctttgtggacttttatgaatatcatactttattttttcctttagaaaataaaaagtaga

SEQ ID NO: 25583 - DNA, 2300 bp, Homo sapien
atttaaaaaaaaaaaaaaaacctcaatgtaggccaaaaaatacgactctacaggcctcacggcctgtgcttcaccaatatgtgacttctgcttttaaggaatagctggggatacctcagccttaggataaataatcatttttggtaatttagaaaaatgaagcagtgtattagctactgttctcaaatatcctttttttcatttaattcctagtgtgggactacaatactggcagagtgggagcaccattagtttgctgtgaaatcaaattaaaaaactgggaggaaggtaataaactattttaaccacagagcattaatttttaaagtattaaacttgaaaattagtgcttcactttcttgctttagaatgtaaacacccataagtgctcatttttgtcctttgtgatagacgtgttttatctcgaactatatgaatgcatttatttttcttgtttcaaagatgtttctgaagaactattattgttttcattttacttattacgtagatgcaagtaagaattatggcaaaaacttgagaaatgtactaataagtgaataatgtcaataaattaggagtgatcataactttattttgcagaagtaaaattataaaatttattttatgaaattgtggatttttaaatgatttttttctttttttttctgagggcttcaaccttgtattattagaaggaaattttcactgcaattccatagaagtctgtttattctcatgccatttaaaataatggtcacttaaaaatttatttgatcctgttaaaatatacaaattatctgtgttttattgggatgcacctttcctctacattaagtaaagataaagattctggccgggcgcagtggctcactcctgtaatcccagcactttgggaggccaagacgggcggatcatggggtcaggagttcgagaccagcctgaccaacatggtgaaaccgtctctactaaaaatacaaaaattagccaggcgtggtggtgcgtgcctgtaattccagctactcgggaggctgaggcaggagaatcacttgaacccgggaggtggaggttgcagtgagccaagattgcgccactgcactctagcctgggtgacagagcgaaactctcatctccaaaataaataaataaagaaagattctaaggcttggatgtcttttagctatctttagcagaattagtgggaatatttaataaatttaggcttggagtcattttgaaattatctataagaataaatcttaatatgtagtaactcactttttttttttttttttttttgacacggagttttgctcttgttgcccaggctggagtgcagtgtcaatggtttcggctcactgcaacctccacctcctgggttcaagtgattctcctgcctcagcctccctaatagctgggatttcaggtgtgcgccaccatgcccgactaattttttgtatttttagtagaggtggggtttcaccatgttggccaggctgacctcaaactcctgacctcaggcgatccaccctccttggcctcccaaagtgttgtgattacagacatgagccactggcccagcagtaactcattcttatatagggatttgttctattaattgcatgacttaatacttctgtcagtttatcaatatgatatttaagatgttgcagaatctttcaaataatttgtctcttgtatttataattttatacaacaaatggaagatgttgggttttagagtttaatttttttctcagaatagaagtttgaaaacataaatacttatggtttagcaactgagattttgtgcctactgttaaattgataaactttgttcattcatagtgtctgccttttttcctttgggaagttctaattggattaaaataagatgactgtttagaaactagtagtttcaaattttcatgtgttgtatttaactcaactattaactcaattattattttattaggtggatactttaatactgataagccacaccccaggggtgaaattcttattgggggccaaagtgtgacaatggggtactacaaaaatgaagcaaaaacaaaagctgatttctttgaagatgaaaatggacaaaggtggctctgtactggggatattggagagtttgaacccgatggatgcttaaagattattggtaagtcatctaatatttttttgaaaatgaatgtttctgaaatagtttacacaagaagcacaatatatttagaggaggcgctgaataatataaatctttatgtaatcttagtttgggttgttgcatcactcctgga

SEQ ID NO: 25584 - DNA, 2300 bp, Homo sapien
actaagacactgcagttggcctcgtttaactctagtagaaatatccatgcaggaagtatgtgggaatcggggcagcagggactccaagcaggcaccccagaatttcttctgggctgttccttccctgactcctgcaattagtcctgcttttcctttggctctgacttgcttcgtcctttggaattcattctcgatgtttccccacactcatctcttttcttggttgtattcccttgggactgttggctcaggtttggggatttattatgtttaaaacttcagcctctgtttggcttcctggcaccaggctttgtacttcctgctccttgaatctggtaactcctatccccacctcctttctgcctactcaaagcttccagtctttggtgttggacaatccctggatgatgaccaatctcgtatgtcctaaggtatacaataaaaaataccagggtcaacaatcaacaggcatctctttcttgggcccatcttgttctagtgtcccagacattccagtgtaggcttagatatagatggaagtgttctagtgtttatgatggacacctgttgaaaagaccaagtctaccatggctgaggtagctatggagggttttacgtattaacacaatggtgagggtatctttactggtgtgagcacagttccactgtatggatgatcgtgatgctggagtggtcgatggttggtacctccagtgccagctggggatttatggatgaacacaggtgagtagtcaagtgggaaaaatggcagcattcagttcatcttcctattcttcctccaggtgtcttcttagaatcaggatcaggtgcaaacccaggggggttcctgtagcagcagtgaaaattccagtgcctaagctatatatgttcaagcaggtcaggtggatgtcgcatgcgtcagtttgactacagcagaaccatgagagatgtttcctttagagttggcccacaagacagtctggctgcaatccacaggccacagacaactggagggagtggatctctcccagtttccttccacttagcatgaaagcctcagaataagcagcccagggagcagagagactgacattaaagcctgcaattcctcttccaattttgatcacagcagccatttaaacacagggtctaccgaggtttaaaaaacttgaactgtgcttagttgcactctgaaatagtcctgctcctcccctgacctacgagagacagcaaagagacgtgtcaatagcctccgcatgaggcttcagaggagcagctgtgtatggcaggacggaacaaaacctgcccatagtatcttttacgacaacatgtttccacttaatgcagaccactgaaaagaatgtgggagcttttaaaaaaaaattattataaacataggtttgtgaccttgatgtggaaggcagctagaatctctgcttttagagggctaagcaacaccaggcagccttcaatcttagaagggttaagctgaaagggtctcaaaaggtcacgtggtttatataatcctacctgcagaagacccccccccccgccaggcacaacgattttacagacgaggaatgtgaggtgcggagaggttaaggaaggatttatcttatttgcataaggagtggaagaactgaaaccgaagccccagttccttgactgtaaatcccgcacttgcttccaactgtctttcatccagattatgggattcagctgcctctgaaaacctgtagcccaataatggttattccccaggagccgcgcgaagcatgagctaattttcagtgagcgcggactttggggtaacggttccagcacagcacatccctttctcctcttttcactcatcgtcaccgctacctgaaaaccctggccgggtgctggggcttgaggagcagttcccacttcccagtctttttcacttttcacagctgcaaagttcagggagttgaactgcagtgctttcagttcactgctcactctgccacgatcaatctctgttgtaaattttcctcccagagcacgtgacgatgcacttcttgactatatatcccaactgcagcagcggagttgtcagagcgcagagccggacagagcagaagaaccctcttggactggacgatttgggaattcaaaacttgggacaaactgtcagccttggtaagtcagcaaggctacactttgctttcagaaacatttgaaagagggacatttttgccaattaatagatgaatttttttcctttattttcttcctgcttttctttgttctaaggaaacattgttttgaattta

SEQ ID NO: 25585 - DNA, 2300 bp, Homo sapien
ccagcaacagcctcctggcatctcacatctacttggagattttgaatgaggttttgcatgtcttttggatgattgaagatatttccaggcaagatgttgactctggggctttagaagaaccgtagcttctggttcttgccaaaaagtttagttccacataaatgaattagcctagtcaggatgactttctggagggcttttgagacctatgctgaacaaactcaacattttaagaataattgcagagttttctaaagctgcgttgatactggttagttgaactggtcacacagaactgctggacagaaaattaggtcaaacttggagcagctagccagggctttgttaagatttaaggcaatcttagctaaggatgtcagtgaatgagctggtgtcattgagatgatgcttgagaaatgggtcatatttaggtctcttcaacccagcatttgatcatgccctaaaaaaccactatgaggcaaaatttgttggatgaattggacatataaccccagtctgagtgtatatgaattcatatcaatccacaaatgatgatctcctagtcgtttaggaaaaccaaatagggagaatcgaggcacatttttccaagattttttctgtaagactttaagccatttcctattttttcgaggaattcaaaagtactaacatagttagaaatccttgtaagaaaacctgatagtgagaaatctcagcttaggccttttattccaggacattgtttccccctgaatttctaggttgaacccattggctatccaaatggtccaaacactgctagctaacctctctattgatgctttccaatttatatgaaaattatgtgtttatttgcatgtcatccccattagctgaaaggctcatcaaaggcaaaaaaatcacttatttttgtattagttaacaattgtgcatttagcaatgtatctggcacctagtaggtattacaatttattgagtcagtggctgattgttcatttagcagaaacacatgggatctcttatatggcaagattctgttgcattcttaaagtatatgtcaacatatacagtttttagaaactcatatctttaataaaataaagtttaaaatttatatccatataaattattgaaatatataatcaggttatctggtaaggcagaggaatgattatgaattataaatctgagaggttgaaagttaattgctgtattattccctggattgttcacattcatggaaggtattcaactcatctgattcaacaggagaagggaaatatttatagtacaacttcctttcgattgcaaatgaattctagttacgtatgtgtcacatttttcccaaacagtgaaaagactttttttttaagtagatgaaagtattttcatcagcactcaacttctgagcttccctttctgagatcagatattgtgaaagacagtaacagagatataaagaattattagctactaagcttgaagtctgataaatacccatttaaaaaactatataagctattaaagttggctctcatataaaagagagagaactctctgttttattcaaataaatatgattttaaaagaatgatggctgtggtcatgataagaaatatggcctttcatatttataatgtgtcctccattcatcttggttataacaggaaatggtaatgtaatttctttgtgggcaaagatgaaaaaataatccttgtctgtaaaactttcttacaacgacgacaacaattacaacagtgacaccaagaaactattataacaagttgctagaacatagatgagattgtcttgcaattagccatgtctgtctgacacacatttctttctttgtaagagaaatcgtgcagagcagtttattccgtctcaaagattttgataaaagaaaaaggaaaactgcaatttttgccacaaaaagacaggtggcgtaagcatgcaacttttttttcttttcttttctttctttctttttttttttttttaaatataaagtgattattttctcttggttctttgaaaaacctcgcttgtgctggggtttgtggctgaacccggtgacgtcagtgtggcagtgcggagtcaggcgcagcggctccctataagcagaggagctgtccgtgtgctgaaacggcccgagaagctcgcccggagaacggggaggaatatgctgtggagctcctctgccatataaacaaaaagaggtaaggctgcttttctctttgatttattggaaagttccaaattgcatgctcttcttttaattcctagctgagaagaaaaag

SEQ ID NO: 25586 - DNA, 2300 bp, Homo sapien
gagttaaaaagtagctgtcctagattcacttttctttcaggaagcaaaatcatcccatcgcctggggtttaactgttgtcaaatagtcctcttccaatgcccccggcagaatgccacaagtccaggtttgagagctttgaggctggaggctgtggctctcctgggggcttgcagtgatgccctaatgtagagaacactcattgcctctggcccctgcccacctctaggcctcctggcacttaactcacatagaggccttttttgaagtgtttccagaaggacttttttttcttcttcttcagagcgctggcttctcacatccaagtcttctgtcacctccccagggggcacttacctgaccactcagctaaatcaatgtagcttccctgtgcccatccgaggaactcaaatatctccttcttagcactcatcttaatttcttatattttatttacttgtttattatgtgttgtcccacaagagacgtaagctccaggagacagaccacctgtttgttcccagctgggtcccccaggctcctgttgtagggcctggcctagagtgatgaatatttgcagtgtgaatgcaggggtggatggagtttcccatattttcagtcacctgggtgggcctacatccctaggaaggtacacaacacatcctgggaaggactttcactgatttggggttccagggaccacccaggaaatgacattttttttttcagactgagtctcactctgttacctaggctggatgatctcagctcactgcaacctttgtctcccgggttcaagcgattctctcctgcctcagcctccctagtagctgggactacaggcgtgtgccaccacgcccagctaaattttgtatttttagtagagacggcgtttcaccatgttggccaggcttgtctcgaacttctggtctcaagcgatccgcccacctgggcctcccaaagtgttgggattacaggcatgaaccatcacgcctggcccaggaaatgattcttaacttttgcagggtctaggatctctttagctatttgataaaaccagtggactccctttctcaaaaacatgaatatgcattaaaaactctgcttacatctagtctatctggtaaatataattaaaagaaaaaagaaaaaactctgtttacagcttgggggtttagagactctcaacgccctagatttaagaaaagtcaaggggaggagagattggagaacgaactttctacaccacaacttcttaggagagacttcttaaaagggggtcgtgctgccgggcgcagtggctcatgcctgtaatcccagcactttgggaggccgaggcgggtggatcaccctgaacgcaggaggcggaggttgcagggagccgagatcgccccactgcactccagacggggcgacagagcgacactccgtctctaaataaataaataaataaataaataaataaataaataaataaataaatgggggcctgcttaaaatgatctttgcccttagactgcagagcttactttttaaaaagtgaaatgggggcagaaggggataagaaaacgcttctagttctttctcttccaactgctccctccctaggaggcttaggataaggcagcccccggcactttctgcgagtgtatcggaagtatctttgccaggtttgataaacgtttgcggaaggaatacaggacacactcgcgcggcagaatcgcgaaaagtccccggtgttctccgcgcagggagttccccgcgcagggagttcctagcgggccacgcgctctcgcctgaccacccgcgccgagctgcgggctgtcggggtacagacgcccgcgcgcgcaggtgcattcgctccaggtgcggccggctcggggcgggaacagctgcagccgaggcgggggcggggagggggtacagaggagaggcagaaaggagggaagaggaggaggaggaggagaagggaggagaaaggggaaaggaagaaagaaggagagcaggagggcgaggagcggggggagcggggaggagggcgcggggaggaggcagcggggaggagcgtgcagggaggaggcagccgcgctgggaggagtctgcacactttcagtgccagggcattgtgggaagcagccatggtctaagccgggcgcctcacctgtcagccgcaccggctccagcgctcgcctctcgccctcgcttctccagcgctccttgctcgcaaggcgggggaggcggcggcccagccacgatggtgagtgcgggggaaccgccggcccgggtaggcggtgggggcgct

SEQ ID NO: 25587 - DNA, 2300 bp, Homo sapien
ttattttctccatagcatttaatagcattgaacatcttctaatatattatataatttagtttactatctgtttccttcactgggatgtaagttctaacagcagagggatttttgtctctcttgagcactgctgcatttagaatggcacctggctcacagcaggcacttgggagatgttggttgattaaacaaagttgttcagtagcgtgtctagtcattacactgtacagcctcacaaaaaccatgtcttattaatctcatcagcaacagcatatagtaagtgtgcgatatatgtctgttgaatataggaataaataaattcatgaatgtttgttaataacttcatcatgagaaagtattagtacaatggtggctcctgcccgtaatcccagcattttgggaggctgaggtgggcagatgatttgagggcagaagtttgagaccagcctggtcaacatggtgaaaccctgtctctagtaaaaatacaaaattagccaggcatggtggtaggtgcttgtaatcccagctactcgggaagctgagacaggtgaatccctttaacctgggaggcggaggttgccgtaaaccgagatcgcaccactgcactccagcctgggtgacggagtgagttcgtctcaaaaaactaaaacaaaacaaaacaaaaacaaaaagaaagttctagtaaatcactgtacatagaagtaccatctgattcacatccataatttaaagtttttattagctaccttaaaaaaataagcaggtcatattaattttaatagtatctaactcaatatatccaaaatagtatcatttcaacatgtaatcattgtaacaattattgatgaactatattacatcttttttgttttgtgctaagtctataaaatcttgtagtattttgcacttgtactacatctcagtttggacaagccacatttcaagtgctctatagtcatgtggatagtacggttctaatgcaattctgcaattcaggtgtcagaataatatagtggggcagaagtttggagtcattgacttcctgagtccaaattttggctcttgaacttactggttgtcaatgacctctagccaaaaaccaccaggaacaaatggggttgattgcttgttggagggagaagacacaccattgggaatggtgaggtgtctgggtaaagggatgttcggacagttttattataggatttgtgtttgtgttaggtgacctgggagagcttaaggaagagaggctctcctgtggactggatgttgtcaggaaatgcgtataattctaaggttgcatatcttaataaatcttatctaaatggaggaagactagatagcggttaacattataattaataaagaaataagagtcactcatattagccaggatagggggatgtttggtaatttctgtggcttgtacatcgctcatattttggccgtgtttagatgtgattatggagtggcctcgtctgatgtttatgttccacaggaagcaaacacttcctagcaacaccaaagctcagctgatagtaccaggcagctcctggagatcaagggctgcttttctccctctcatagctgtgcaaccttaaggtagtgatcaaacttctctggttgttttctcatctctaaaatgggaatacaagagcatctatttcatctcttaaaattatcagtattaaatgagatgcaaagacactgagttaatgcctggtatatggtcaccactcagtgctatctattgtagttcaaagattctaagatgcactatattttttcacattttaacatttctgaaagtgtgtgcctttcaaacaatggcttcttcaaatggatgaaatgtagtattgtaatttctgaaatctctggtttgggggacaattccttgtcccctccaggtgctcaatttattcctgggtgaatggctttacttttaaaccttccttactttccccatttctccgcaggcgccccgtggcatcctctcccagccacagactttcagcttgcgcggcatccccaggcaatacgggcggtgcggcggcagcactcgggggcttacggcggcgcggcgcccaagaggccccagcagccgaagggaaaccggcgcgtcccccgcccgcccaggcgtcagctgatgggctgcctgccgaggaggccgcagcagtcgccgcgcgaacatggcggccgaaatccactccaggccgcagagcagccgcccggtgctgctgagcaagatcgaggggcaccaggacgccgtcacggccgcgctgctcatccccaaggaggac

SEQ ID NO: 25588 - DNA, 2300 bp, Homo sapien
tatagtaattttcattctatggtaattatttctgtctgtaattttccttgtgagttggattaaaggccactatttggtagttattccttagctaatctatgaagtagtggtgagtaatcccaggtggttcagaattgcttgattgttcaggaaggtcctatagcagagcttactaactttgttatccatctttctgtgccccgtattccagctgccttcaccatcattgaaggaatatataagcaatatccctggcatcaaaacacaaaaggttgtgttccccaagggttaaagtgaaccctcaatcgcctcacctcctcttcctaagtgtgacttttccccacccttccacctgaccttaacccaatgaaaactcgaaagttgttgacatctgtgagctttgatcaaattagggctaacagcaggttaaaggaaaaatcaggtttttgagggctgaaaaacacattggcctttttcttccttaaagttttctgagcctggatcctggaaccaagtcctcctcctattatgtgtttattgaataaatagacaaatgtatgagcagattttaaaaaactggttaattcctaagttccatgaagggcattagtagaagaaatcttttgaggacctacatttttttaatctgcaaatgatgctctcgttgttgtatgactgagaaactctcaacacagagacacctcattttaacttaacatgattgtgctacaactggcttagattatttttcctaataaatgaaattctacagaaatgacagttccctgcattttctcctaatccatttattggattgatgttccatgaattttcaatactttacatacattgaaacaagaaggtcaatcgtaacctcctttcaccccttcttggagaatttccttcaaccagaaatccatcagtttgttttttggtgtgtgctcagcccctcttttgctctctccctccccaaagggaacccttttataagctgagatgaaccatttagattctcccttttgaaatggtcaagctgagaaacccaaattgagttctatgatcctggcactgaagattctcgggctaagtcataacatgctttgtggtctgtgtttcagagagatgaatgtaggtgagctgtgtctggggaagggaggaaggtaccaggccaattacactaaccacggaaagaggtgaggagagccaccaggtacctgcagtggaaataaatggaaaaagcacttggtggaaactgcaccgaagagggggtttgtcgaaacaaaaacaatcaaagacataggagttcaatctgggtgactgctggggacacagatgcctttaacaaagagatcacagaaagcattgcccctttgagggtctagatgttcagcaggcaactcaaaactgggaattcaaacaagcctccctttgtgacttaatatgttcttttaaaaattgtactgtattaacagtttggtaggaaagcaatagaattacattgttaaagagtgttaacataaagaaggaagaaactgtaattcccctattaccgttttatgtttttttccagtcattttccggatgtttaaaaatatgtactattagattgcttttaaagaaaaattttaattttggataagccaacatttctgagtctagggtttccaaaactaaggcttttggaggcgtgctgggtcaaaaatagaagctcggtaaatacttgctcagtagtggcctagaacactaaatataaattaaaaatgttttctttttttgaggatttaaatgtttccttaacctgaaagcgaaacagatttttgtttgttttgctgtaacgagagaggaaggaacaagagagtgacagggtgaagcaacttctcccagaaacttttgggcgcaaacgccctcaagtccggatcattggaaagtaactcgaagagaggagagaactagcgcaagcgtagcctcaaggcggccgcaatcaccccgccccggggctgtctccgcccctgccctctctcagtcgccccgccccgggggctgtctccgccccagccttctcttcgcgttccgcgttccgggttccgggggaagtgtgttacggggacactggcccgactactttcgttccgtcttccatcgttttctctcgtgcaatggcgtccgggctggtaagattgctgcagcagggacatcgctgcctcctggctccagtcgcccccaagctggtccctccggttcggggagtgaagaagggattccgcgccgccttccgcttccagaaggagttagagcggcag

SEQ ID NO: 25589 - DNA, 2300 bp, Homo sapien
agagcgtgtaggttaccatctagaactcagtttccttgtctgtataatgggtatattgaaataaatgatctaaaaggtgtcttatttttaaaacctataaattcttggctcagtttccttttgatgtggctttctcataagtgttaagtctagataaaattttttcgtaaatgcattatcctgtgctcatacaccttaaagttcttgtctctcacttttttaagcctataaaatcattcagcattatattcagaaacagcatcatgggccaacatgaagatttagtttgtattcccacttagagcatttataaaaattttaaataaattaggtcccatatacttgaatcttgtcaacctgttctccacacataaatgtgcccatcttctctttgcaaaccatctttcctcatgagtagattgcacgcctaatctgaaaaccaatgttgggtttttaaaaaatacccttagatacagaatggagtcaaatgcaataaactacatctttaggttatctcttgtctgcaagttcccaatttaagaatactgagagattagtatgattttatttctcttttgagaaataccacctcccatccaacaggccaagtctatttctacagtcagtgagtcttgcctttattctgctgttagatttctaggtctggatgtaagcccagtccagggaagtcggcatcccttctgggattctttctgtgcatgaggatggccactgagcccaagcaatcctctatttgtaattccactcgtatgttttggcaaacatgtcctaggattcctccaaaggttggggtggacaccctagttcaagattagatcaggaacacccaggcttttgccacagtttgacgtaagacattatcctttgcttcagaagatcatttgagaattggaatttacatccattgtgcctttccatttttcttatttaattctttgaagaataatatgaggagactttaatataaaagaaaaaatcccatcaagagtcagaaaggatttcctgttacggctgcaaatcttggtaaatgcactttgtttttgtaaaccgtgccccacccccaacccctagtgtgaactcgtaacctggggaatttctcttgagagcataccaaaaatagcatcagtgccttctcttacccctaccccaactttcgccctccatgtagttccagcaaatatagctatagaaaaaataaccacttgtttttatcctaagtttttatgggccaaatcttgaaggtggatgtgggtatgtgaaagagtttaatgccaaatacaaagcccactcggaaatgaataaggtgactacaaatgaaaatggatgtttctttcttcctttggggaaagtgctatgtaaataaaggcaatgtttgcttcctctactaaaatttatttctgcagtttttaaataagaaatccactcaagaagttattcttactgaggatttggtcactgttaagattataggaactattaactactgcattatcttttgcttacaagagaacaaacccaaatcaaaataactcggaaacaaggcggagagctgttggctgacactgcccactcaagcatgggagaggtgactctggccctgaagatgactggaaccaaagactgaggacttggaggctttcttctctttctccttgcctctcatctctgcttctgtctgctgattgtggttgtcctctccgggaccatgactgtaggtagctccaggcttacctccctacagcctcctcagtgaggaggaaagaggggcttttcagccagttccagccggcggggggggtggggggtggaaatcctagggaggaattctgattggcttagtttcagtcacatgctgttcgctgtaccaatggctgtgggcagaggagtgaggtcctatgattggctgatgctaagtcacatggtcacatgctcgtcccgataccaatggctgtgggcagaggagtgaggtcctgtgattggctgatgctaggtcacgtggtcacatgcccttccgtgtaccaatggctgtgggcggaggagggaggttctatgattggctgaatcccaaatcacatggtcaatccttggttaggaggaaagggagtggagaggaccgtgctgcctggcgttccccagctgcctttctttctgttttccccccaacggaatctctatgtggtctcctagagcctcgtgcctgcctctcagctagatgctgatatcattcccactcatgtagttgggaaggaagggtgtggcagagataaagggtccacggt

SEQ ID NO: 25590 - DNA, 2300 bp, Homo sapien
tctctcactggtttgagtaactttagtaaaaatttaaagttacacataattaaccaaagtgtgtgagataggaatcaacgtatcaatgttaatatcctgattgtgatattatacaatggttttgcaaaatgttaccatgaggaagacttggcaaagtgtaaaagagacctctctgaatcatttcttaacaactgcatgccagcctacaattacctctattacaaattttaatttagaaatgtgattgagacagaaatggatgcagggattctggcacattttcataataatctggcttcacccacatttcccagttatttctccagtagtttcttgaatgactcccttccatctggaagaggatactcccagcttttcaaacacactgaacgagctcattcacacctgtgggctttcccccctcctttgaattgttcccagctccagcccacaccgccctgactggaccaagcacaatactgtcactgaaacagttcttagcatgtctaaaagtcacttggctagtagttcatccactcgtcaacaaaatttattgagtaactgctatatgtgtggtatggctctaggcactagggatagagtgagttggaaacaatattgaaattagtttctcttccctggtctctgggagtatattccaatgagagagagtagaagaaaactagcaagaaacaaggtaaaaaaaaaatcaattcatgatgagggttatgaaggaagtcataggttagaggggataaagtgactttatctcaagtggtcaggggaggcttcctaggggagaggacatttgagttgtgacctcaagtgtaaggatgcagacaacatagaagatcctgggacaaaaagcatttcaggcacagagaataagaaagttaccctgtaactgaatataaatatttggtatgactgtaaaataattaaacagatgctcatttttgtagactgtttgctccttattttaggaccaagcctcccatagcctgtttccctctatgagagactgagaacacccttaggctggtccagattttacacttttcagagcaaccccttccccaacacacacgtgcacactctggcacggccacctgcatgccaaggggtgactgcaggctgatcttccaagtggctctcatcagtagctgtacccttaatccagggctgtgtatagggagatttacatttcttcctcgctgttggggccgtctgcctgctagcgacgattctacactaacggctacataaattactgtcattaaagttgggtccttgggtccccagaaacctaactagaggcaaaggaggaaccaactaagagaggtccaggtaacagagcccggagcgggacggtcatttgttgcaggcccctggggtatgtgcctgtctatcgcgcaccgggtcccagcagcagtggttaccggctgagaagggctgggttcccaggacgctgcgggtacctcatgctatcaccatagccgggaatccagttttctggttcccctcgtctgtatttgcctaaggcgacttgccgccgttcctctgtcccctaggcagggagaagtcagctctaggacaccctgcaaaacgcctcgaggggttatctgccccttcccggccgcgtcctggcaccgtttccccatcacccggaggactgagcgctgtctcagggcgccctctgtctcttccagggggcagccaagacgacatgccctgcgtctcagggacgcggtacgagccctggtattccccccgccacctcacacacccccatccgggagacccacgtgcagctgggcccgggctggcgccgcacctcggggtctgcgcgtctccccggcgcgttccgggcgcagccccacgacacggacccctggcggggcggcatccgagaagtcgcaggcggagagggggcgtcctggaggccgggcgcggggacgctgcggcccgcggccacacaaaggaggcggcgggaaggcggggcaaggcgggccgggggcgggggcggcaggaaggggcgggggcccgcgcggcgccgccgataaagcccccgccgccgcggcagccagcttgcgctgtggggctgcccgggctgcgcggcgtctgcaggcgccaccgctgcctctttccggctgtgaccctcctcgccgccgccgcttggctgcgtcctccgactccccgcgccgccgagaccaggctcccgctccggttgcggccgcaccgccctccgcggccgccccctggggatccagcgagcgcggtgagtacaggctgcgcggtga

SEQ ID NO: 25591 - DNA, 2300 bp, Homo sapien
gagtcttgctctatcacccaggctggagtgcagtagtgcgatctgcaacctccacttgctggattcaagtgattcttgtgcctcagcctcctgagtagctgggattacaggcatgctccactttgcccggctaatttttgtgtttttagtacagacggggttttgccatgttgcctaggctggtctcgaactcctgacctcaggtgatccacccgcctcggcctcccaaagtactaggatcaaggcgtgacgactatgcgtggccacaaataatttttaaatcaatatttagaacacatttagggtgagtgtttagagcttgacaactttctcattgaagattattccgtttaagattcaacagctcaagagtctgcaaatctagatccttaaccagaacttgcttttatatcttttccttacaagaagaatacccaggctgggacttcaaggccccagagaggcagtgcagcaagttcctgggttcaaatcatccttcagctacttcttagctgtgagaccttgggcaagttacctagcctttctatgccccagtttcttcatctgtaatttggggctagtaatctcttcttcataggtttgttgcaagattaaattaatttacattaagggccaggtgtggtgactcatgcctgtaatcccagcactttgggaggccaatgcgggcagatcacctgaggtcaggagttcgagaccagtctggccaacatggcaaaacccagtctctactaaaaatacaaaaaaattagctgggcgtgttggcgcacttataatcccaggtactggggaggctgaggcaggggaatctcttgaacctgggaggtggaagttgcagtgagccaagatcacgccactgcactccagcctgggcgacagagcaagactccatctccaaaacaaaacaaaactaattactttaagaattagaacagtttatgactggtacatagtagatcctcattagacactaaaaattataattacaattgttaattataattatttattattataattatatgagcaattataggaaagctctcactctttctaaagaatttgcgtgaataaaggaagactaattttctcaatgtctttttagtacactcagaattttcggtacagcaaataattttcagtgaagtcaaaattatttagataaagtcttctcttcgtgccctagcagaaaatgttcagaaacaaaatgaaataaagagacaaaggaaaaaaaaaactggcaaagggtcaggttttgagaattgttttcaagaagtcattgtattcagattggtggagcaggctactgtaaaccgtaagtaggaaatgagaacccgttgtaagttgataaaatggatgtcttttcaactaaacagattgctatcagcctaacagagccaactcatgttccttttcggccggtcatttcctgtactaagtgtctataagagccgcccatttgggtgtttctcaggattataggtttttaggtcacgcagaaaccctggggaacgcctgaaaaggctaaacacaagcagttacattatgcacaagctggatgacgtgaccccgctgctgctgtgtggagagggaggctgctgaacccgagctggtgtgagcttctcttgccgtaagtccacgggtggccaggagcacgtgttagtctggttaagagctctgctcagaagtagccgctgcagctgaaggttttcaggcgggctgaaggctgggccgcttcttcattcatttcagaaacttgaacagtgggccttctacacacgctgtctttgtcagcctcaggcagttcctccatggatgagacacaggggcctctggccatgactgtccatcttcttgccaactctgggcacggctcccttctgcagaggactctggaccagctcctggattgcatttgcccagaggtccggctctttcaggtgtctgaacgggccagtcctgtgaaatactgtgaaaagtcccattccaagcggtcccggtttccagggatgtccgtgttgctcttcctgcacgaaagcccgggagaggataggctatttcgcgtcctggactctctccagcattcgccatggcagtgctaccccacccaggacactcggggaaggctgtgtccctacttttttgccaatcaggagttctacagcctggacagtcagctgcccatctggggggtgaggcaggtgcactgtggctccgagatcctgagggtgacgctgtactgcagttttgataactatgaagacgccatcagactctacgag

SEQ ID NO: 25592 - DNA, 2300 bp, Homo sapien
tttttcccatgcaaaaagtacaggaattatgaaacacaaatgattagaattgtacgttagatttacatagtgaatctgaatagaaataactccttttcttggataataatattttactttaaattaggttgttatactattaaaggaatccagatatataaagttgttatatttttcatcacaaaagtattttttaatgtaaaaaattgtcacactgtgtttcattataaggattcataaatttgcctcttttattttaattttttacagctctttttgaagtacattttttttctttgagacagggtcttgctctgttgtccaggctggagtgcagtggcatgaatttaggtcagcacagcctggaactcctgggctcaagcgattgtcctgctttggcctcccaaagtgttgaaattacagttgtgagccacttcgcctggtccaattgcctcttttaaaaagaattgtgtttagaaaaagtgcttgttcatacctgttgaggagcacagctatcaggagagcaaatgattttttaaaaatatttatttatttatttatttttattattttttattttctgagacggagtcttgctctatcacccaggctggagtgcagtagtgcgatctgcaacctccacttgctggattcaagtgattcttgtgcctcagcctcctgagtagctgggattacaggcatgctccactttgcccggctaatttttgtgtttttagtacagacggggttttgccatgttgcctaggctggtctcgaactcctgacctcaggtgatccacccgcctcggcctcccaaagtactaggatcaaggcgtgacgactatgcgtggccacaaataatttttaaatcaatatttagaacacatttagggtgagtgtttagagcttgacaactttctcattgaagattattccgtttaagattcaacagctcaagagtctgcaaatctagatccttaaccagaacttgcttttatatcttttccttacaagaagaatacccaggctgggacttcaaggccccagagaggcagtgcagcaagttcctgggttcaaatcatccttcagctacttcttagctgtgagaccttgggcaagttacctagcctttctatgccccagtttcttcatctgtaatttggggctagtaatctcttcttcataggtttgttgcaagattaaattaatttacattaagggccaggtgtggtgactcatgcctgtaatcccagcactttgggaggccaatgcgggcagatcacctgaggtcaggagttcgagaccagtctggccaacatggcaaaacccagtctctactaaaaatacaaaaaaattagctgggcgtgttggcgcacttataatcccaggtactggggaggctgaggcaggggaatctcttgaacctgggaggtggaagttgcagtgagccaagatcacgccactgcactccagcctgggcgacagagcaagactccatctccaaaacaaaacaaaactaattactttaagaattagaacagtttatgactggtacatagtagatcctcattagacactaaaaattataattacaattgttaattataattatttattattataattatatgagcaattataggaaagctctcactctttctaaagaatttgcgtgaataaaggaagactaattttctcaatgtctttttagtacactcagaattttcggtacagcaaataattttcagtgaagtcaaaattatttagataaagtcttctcttcgtgccctagcagaaaatgttcagaaacaaaatgaaataaagagacaaaggaaaaaaaaaactggcaaagggtcaggttttgagaattgttttcaagaagtcattgtattcagattggtggagcaggctactgtaaaccgtaagtaggaaatgagaacccgttgtaagttgataaaatggatgtcttttcaactaaacagattgctatcagcctaacagagccaactcatgttccttttcggccggtcatttcctgtactaagtgtctataagagccgcccatttgggtgtttctcaggattataggtttttaggtcacgcagaaaccctggggaacgcctgaaaaggctaaacacaagcagttacattatgcacaagctggatgacgtgaccccgctgctgctgtgtggagagggaggctgctgaacccgagctggtgtgagcttctcttgccgtaagtccacgggtggccaggagcacgtgttagtctggttaagagctctgctcagaagtagccg

SEQ ID NO: 25593 - DNA, 2300 bp, Homo sapien
tcatagtactcaagagaattcttttttgtgcattatttatttaatggaattacctctttttaactactgcttggtcagtttacttgctaattaactaactttaatctttcaaaaagtctaattatgttaatctgatgaaatttcaggaaattcagcaagagacagatatccctgaaagagagcttgttagagccctacagtccctcgcctgtggtaaaccaacacagcgggttcttacaaaagaacccaaatcaaaggaaatagaaaatggtcatatatttacagttaatgatcaattcacatccaaactacacagagtcaagattcaaacaggtatctggaattatatttttcctctcaaaaaattatatatttttctctttagaaaaaaaatctcatctattggatttcttttaaaaatactccttttctggtgctgcatgatacttaggcttaagaaagaaagcagcttttattgataagtatttgtatcaaaatgcatttgaatccaagtacagtaagcattttaaaaagtaatttatagtgtgaacaaagtatttcttttcatgtttttcaataaatagaatacagtttatgaacatattggtacttaaaattgtttttaagttgttaactaatagtcagtggaagtctaattttaaagctgatttagaagtttttcagaattgggagacctatataaaagtttgatgtttggatgttgctatttatattttgataaatattttttgtttcaaaatcttaaaacccatatcctctttaatttaaaaacatagaaatgatactgatgtgaatgatttttaatagagccatataagtcgataatgaaaattctattcattaaacatttaacataatgtaagatgcttgttttctgtgtatttaaaggggaaaaaaggcactccacccttgctgattgatgtttaaaactaattgtttactacttggcttaaaaactagtattagataggcttcctagtactaatatattcattacagccaaatatgtgtgcaataaaacagtgtcctaagataaataagatgatcttttaaatgactgtcatttgttgattttaaaaaaatgttatttatattgtatattatgatagtctttttaaaagtaatgttaaatatacagttgattaccagagtacatggattctagagctttatatgcacacttaaatttttgtttttcattttgatctttttgtttcgtatgtatactttgtagaacagagtagtgtctctggcaaggctttgccccctttgtcttgtagttgtaaactgtatcatagtaatctgcattagccaagattggcccatgtcttgacataaatatatattaagaataaaacaaaactgtgctagccagtgtcatggaataaaatttatttttcttccaatgcaagacataactactttatacatttgggcagatgcaggttttggattttagggctcatttgtatcctagaattagaggaaaatatgtgggaatatttatctggattgccttaccctcaccctactgtaccctaaataagtaactgtctttgttatcccagattctatcatgtccagcaataataatatcagatattagtattatgtttaaaaaagtcttcatagatttttagattttcgtgttaagtgtgcacacttatgtgtgtatctggagtatgtgtatgtagtgttttaggtatgttcaaaacagaaatatatatatgatgaatttcactagagcttaaaagttcttttcagcaataaaattctacaaagcaatgtttttttcttgggaatggtttttaaatgatcttggctcttactcatagtttaagtcaaaattttctctttggtggtaaatattgtgaccacattggttttactgtcaaaggctcagtaacataatcaaatattcgaagactcagaccctacctatttatgctgcttttactgtagccagtagtaaaagttcatgcaaagaagttaaaggaattactaaaataacacagcctttgaaaagaattagattaattgtaatctgggggggcagtttccagagttgacagtcttcaccaccaccaccaccaccaccaccacctgcctttctcaaattccatcccccagcgtgcatataggtcatatataggcacttgcacaacaaccccttctgctgcactcaagtgaggagtgttgtgttaggctccagagtgagcccctcccctcccatttaaaaagaatactcattttgactcatcagcacgatctgcacatcc

SEQ ID NO: 25594 - DNA, 2300 bp, Homo sapien
attttcagggtccatgaagttttatttgaaacatagtcacactgaataatttatgtattatctgtggctactttcttgctacagcgtcagagtagttgagtcagagctctatggctcacattttaaaatatttattatctgatactttacagaaaaaacattggtcagcctctgatctagaaactcttaatgccattttaaaaagttattgattgtaaaacttttaaaattatcattgtaaagttctgacactgtgttctcccagtaagttgttattgcaaagaaacactagacatatgggaaaactgtattttaaaatctgtattttagtcttgtgaaaaatgatattaaaaaatggataggatccagagttttcattctaaatttaaaaagtatagtgagatagaccaaattttgaagtacagatattggcttaggatgctacctgggaaacattagggattgctctcaggaaaatattgaagaagtggtatttatattatacatttcataaaaactttacctgaggtgtaatgaagtaaatcctagtatagttcatttgatttgttttcatgattatcagttaaacctttggaaatacccataagacttaaactggctttaaaatttcttcctcattacagggactaccaattacctcttaattagtgaccctttttgtagacgttttgtagtgtcattaggtctgcattagagttatgtaggataaagtatttatgaactcaaaactgcagttgccatgtttttgtgacattacttgtttattatggtttttgacatctcttccatgtaaatttaaatttgctaggacatttaattgatggtttcaaagcatctcatctaaaagttgtgttttataaattacaataataaccattaactagcctacttcttcatgttttcatatcaatatatgtatatttttaatagtcatgtggtcagcaaatgggggtaatggagaaataagcttctctcagtattatagcgtgaacagagattcgtgtttttttctttaatctttaatgtagccaatttgtgttttctgatttgtagaccttggttgcatgtacaagttatttagtcgtgtgccaaatggtttgaaaacaatgtgtgagtgtatgagttcctatttgagggagcaaggtaaagctcttgtttctgaagaaggagaaggaaagaatcctgttgactatatccaggtaagtaaacccagaagattctctgtgtttatgataaaggcattttgacaagtgctaaaaaggccacttttaccatgctgtgtattgtgtactttcaacttaattgtcccagtagtaaattaatatttgtaattatcctacatattttaggattttgcaaggtgtgcgtatttatatcagggagctaaaattcagctgctacttttcatttaacttctttgatgaagaccttgtttaaatagcctcaatagtgaatgtgaggttctttggtatgccttagtgtttgtatactgtagtatattggaaaaaacaactggtttaagtattttttgtttgaaaatgttttgttttcaaggagtactatgaataaattatgtgccatgttttgtgttttaacataatcagctttttttggtacattttttaagctaatttttttcactggctaacccattccatcaagacaggagaatgagaaacagtgaggaggttctttggttcgtttgcattgtattaatacatatatggaagttataatacttctctcattgacatttttaatagaggcttagatataggcttgaaaataatatcaaaactgtaagtttaaaaatgaatatacatgtttattaccagcaaagttaagataaacatacatggtcataagtgtattatttatggaaaaattattataatgtgtcctaaattttgtttttatttctaagggcttattggatctgaagagtaggttcgatcgcttcctcctggaatcattcaacaatgaccgtctctttaaacaaactattgcgggtgactttgagtattttctcaacctcaactccaggtctcctgaatacctctcattatttattgatgataagctgaaaaagggagtcaaaggggtaagtagtaatgcatttgaaaataacatttaattttatttaaagatataaaattatatgtaaaattaggacatttcacagataaaaattaagcatgacccattgctgtgcttaaatgggtgccatggtctattaaaaaatattgtttgaaatacttgacatgcccaaacgtagttag

SEQ ID NO: 25595 - DNA, 2300 bp, Homo sapien
ctcttgtgcctgtgccacccctaagacaccaactacttctcttcctcctacacctcagcctactgaatgtgaagaccagaaggatggggacctttatgacaatccacttccacttattgaataccaaatacattttctttttcttacaatgttcttaatattttttctctttattctaagaatacggtgtgtaatacatgtaacatacaaaacaggtgttaatagactgtttatgttattggtaaagctttgggtcgacagtaagctattagtagttgggggacttaaaagttatacacagtattttgactgctcaggaggtcagtttttcctaactctcacatggttcagtggtcagctgtattcgggatgaaaaaatgggaacatatttgagaaataccttggggttaatgtcagtagtacttgatgattggataagaaggagatgagagataagaaaaaatataaggcttatgtttctagcttgtataattaggtagtttatattgccacaactgaattagagattacaggaagaaggtttgggcaggtttggatggtgagttgtcagggatttttgacatgataagtttgatctgtgtctggagcttttgattggagatgtgtagcaggtggttgaaacaagagttttagactttgtggggaagatctgggcaggcagtatagatttgggagccactaatgtaaatgccagtacagaagtccccaccccatccacagggaatctgtttattccaagacccccagtggatacttgaaaccatatagccctgagccctatatgtactgttttttcctatgacgtttaatttacaatttagaaacaataagagattagcaacaacaataataaagtaaaacaattataactatattgtaataaaagaacatgaatgtggtctctcaaaatatcttgtactgtacttaacccttgtgatggtatgagatgatacactgcctatgtgatgagatgaagtaaggtgaatgatagtggccatacttctgtagttttgagttgcgacagcaaaactagtgcagattctttttccttctccacagtttcgtggatagaagaagatgtgttcttttcttttctgagacagagtcttgctctgttgcccaggctggagtacagtgccacaatgtcagctcagtgcagcctccacctgggttcaagtgattcttgtgccctagcctcccaagtagctgagattacaggtgtgtgccactgcactcatctaatttttatatttttagtagagatggagtttcatcatgttggccaggctggtcttgaacttgtggcctcaagtgaactgtccacctgggcctcccaaagtgctgggattacaggtgtgagccaccaccctggcgagaagatttattcttaacatagatcttagcaatctcagcatacctttttttttccttattaagtagagaactttcaccttttcacttaaaggaagcactttattgcttctctttggcatttctgaattgtcagcatcactacttttgtggtttggggacagtattaagtaagataaacattgcctggacataagcattgtgattttgatctgataaaccagatggctgttaagttaccaagtttttaatgggtgtggggtgtgtaacatagtgtggaaatgctggacaaagatgtaattcaggattcacatcctgagtgggatggcatgagatttcatcatactacataaaatggcatgcaatttaaagtttatgaattgatatttctggaattttttatttaatattttcaggcagtggttggttgctagtaacttaaaccaaggaaggtgaaactgtagataggaggactgttgtagtttatcttctttaagatatggacaaacttaggaaatctgatagaaattagggacctactctccagaaaagaagtgcacacacagtatacttggaaagttttgtttattgttttaggaacctctggaatccctcttaagttttagaaccctgcatgtacggataatagatgtaaccatgacaatgaatgaaaatacatagagacccagtagagagtgacaagagccaaggacagagttctcagggtgaaaatgatttaaatggctctggaaaagtagtatacaagagatgtaggggaataatgttttctaaaagaaagctacgttatactgaggtgcatttatcatagtgttattcttaaggtgcctttgttttagctcatatctgtatatttgctaagcttgaaaaagctatatttctttctgaca

SEQ ID NO: 25596 - DNA, 2300 bp, Homo sapien
catacaagtgttttttgttgttgttgtttagaaacctacctattgaataaaggaagtagtataaccttggctttaatgcccatgttaataacagccaacaggtggtaagttgctgctccatgcccagttctcagggctctttaaaacgtattcatctatttaaatttcacggtagcccaaggaggaagtattgttattgtctcccttttacagatgagaaattctggggattgtcaactccatgccccaaaagatgcaaaacacagctagtaaagtggcagaattgagattcaaacaatggctccaagaacacatattcttttttaaaatatttttttatttctttttttggttcctcagagatccctattctgaacatatattcttacattacaaagaaactgggccatatgagagtacaaccaagagaaaaacattgtttgttattatattatgttatggaaatggaggttcaattagcatagagattataaactcctattcaaggctgacattatcttacattgaagtcagagcctctcccaatcttagtttatcaactcagttcttgataacctatttttagcttcagtatttacagatattgtcttaagcaacattcttgtttcttaagctcctgctttaattagccaataccaaaaaactcccacaaaaaaaaaaaaaaaacaagaaaatatggtatttgcagtggggcgttttaagcaagaaggggctttaagcacaacactcataagcttagtcatcaggattaagttaatttagggcaaattcaaccttacagtcaacaaataagtgtatttcactttatattgtttgctatttaaaagtattaaaattccagcttctaaatgtagatatccatcccccaaacatatgcttctttaaaataggaagaacacaaactttaataagaactcacgtattcccttgcagagtcagaaacccaaacataacagcaattgggcaagtaggtaaatgaggaagtacaattcataacaaatggacagcaaaaccgataagtcaaattagacattttgactataaagcgaccaaacgcctctcctccaaaaccaaaagccaaaaccttttcaaatatacagcaactgaatcagacggtaattttggctttaaaaatctacaatactcttggtaatggtagaaatgatttatccggtaggttaaagataggtttctatcattccacttaacattatttaccaaatgctgcatttcattaatggagctgtcagtttattctgatggtaatgaaaaacaggttttaacatgaataagccctgggtccaccagaaaatatcagtgaatcaagaggtcccgaagcttatgcagtttaagggaacttcgtagattaaatttccaccttccagtcctgagagctgtggtgtgcacacccagtccgaataccttgttgagcatacaggacactaatttccgacactgcagctaactcctgcacaaactcttcaagttgcaggcttctactcaagtacccatccctagtccacatgccctagaaaaacacaggaaccagttcgggacgtagttacacatctagcaccccacgctcctcctcaagactatcctcctgctgtcccagcccagtggggcccagcccactaccatcccgctcccgctctccgaacttcccccctcccactccccaccatgtgaccaggaccctcccaaccgccgctccgagctccaccaatcagcaaccacctccacccagaacccgggacctggcgctccactttcaaaaaggcagcttaatcctcccgccctcagccacgccccctttccgcttccccgccccgccggcccctcccacttccttcagttccctgttcccctcctcccctccggtggcgcccaccctctcccgggcttcgccccgcccaccaggggggcagcgcgctcgccctcttctcgcgagatctgagcgtcccccgcggcggccgccgggctccccctcccgtcctcccacctccctcccccggcatctctcactctccggctctcctccctccctcctcccccctccaccctctgggccggatctcgtctcgctcaggcggaggaggagaaggaggaggaggaggacgacgttcggcctgcgcagtgagatgtttgtccgtcgccgccgccgccgccatcgcggaggagcgcgataaagggagccgagccggacgtgagggggaccccgcggagccgccgcgccagcgcagccccccagccgcatcggagtcgccagagtccgagcc

SEQ ID NO: 25597 - DNA, 2300 bp, Homo sapien
agttccaattaaagtcccacaactgaatctctttgatccaagcttaaataatatgcttatccctaaaccaatcactgtagcttggaggatcaaaaaatagaattggccaggccagtgttatatgccatccatggtctctaggagtaaagtcagacctgttcaaatcacatgagctagagtcaggaaggggaatatatctcaaagacaatcaggacgtttcaccagaagaaggtgttcttgaagacaaaagaatagaggctcctgaaatgtttatcttcaaatgtgtgtatccacagtcacaaaacatagaatgcacatatatagaatgcactcatttataactatatatagaatgctccaaactgtgatgcgtagccataattaatagcataacttaaagtcagttaacctatagattctaaacagataatgacccaggctctctcttttccaaagaacagcaatttcccagcagaggtgaaggacctgactaagcgtataaggactgttttgatggccacagctcagatgaaggagcacgagaaggaccccgagatgctggtggatctccagtacagcctggcaaactcctacgcaagcactcctgaactacgcaggacctggctggaaagtatggccaagattcatgccagaaacggagatttatctgaggtgattagccaaggcttggtcatttaccatcagtattgtcctctttatcaggaaaattggattttcatttacagcatggactagaaaaggatgccatgtttttcaactaatctagaaatgactcagttatatatcatatacaatacatttccatatagcattcaaggatacctaacgctaagtaaatgatatcaaataaaggccagagtcagtgggggcaactgcaggtgtagaaattgtaatgcaacgctgaatgctaaaaacctgaggctaaggaggggtgtggtaagggtgtctgggaattgagtcgttaaattaatgttctgtgttttaaaacttcttctctgcaactagagttgaatggggaagcttgccaccatagtgagttaactcaggcagggggaatcagtcctcatttacagctagtttgaactggccatggaaaaatgaatgatccttagcaccatgtgaggagagtccactgcacgaggattataagtcaacacttaactttttatgtcagtttcaatactgggtggatcataagcagcaattcatagcacccaaggtcttcttagtaccaaatgggaagttctacgctattctggaactatgtccctttggggaagagattaatttgtctaggatagtcctaaactctgaagctcttctaaacacatgtggtaatcagggactctggaatggaaaccagaaggctggcttggcagcaatttagtgaggacaagaatgagaagcccttgggctgctctgaaaatgatgaaatttctccataaaacctcaaaaggaaaaagctgaagtcatttggaatctttagcaagtcgagttttaatatgtgttcagcaacgttcagggcttcataagagacagattaaaatataacatcagccatataatctagtttgtggggagcacgggtgttacattgtgtcacactagtcaatcaagtactcgtgaggtgaccattttaaaggcaacacaaattcagaggggctattccaggaggttaaaaaaaaacttatttagaaggcagatatttttatttccactttatatctaaatactagagttatagttttaattttaaaaggagacttatgatttatttttaatctaggcttagactttaagggaggaagagaattctatgggaaaattctttgggccagctccttcacccatctccaaactaaccaagaacaaacaaacaaaaacccaaatattcattttattcttgatggtgaatttttttggaaatacaattgatccttgctttcaatttggtgattacaaaggatccttctaacatattctgatatggaatactgactcgccttggaagattagccctaattatattaaactccatcccctgagcctctttattttctttctcattacaggctgccatgtgttacatccatattgctgctctcattgcagagtatctgaaaagaaagggtaagatgaccacatgagggaggcaaaaagcctagatatcaacacattgaagcctaatagaaataatgtattaattttacattttattaatctgttatgtttaagtaataatcgctttcacagatacttctaattatgctgtactttaa

SEQ ID NO: 25598 - DNA, 2300 bp, Homo sapien
tggtgatggtttcatgggtgtatgacagtgttaaacttattaaattatacatatcacagttcaatttattgtatgtcaattatacttcaataaaactattaaaaacatttgcagctctaccaaatgagcttaaacacctaggctagtacattacggattgagccggggcaggtgtggtggctcatgcctgtaattccagcactttgggaggccaaggagggaggatcacttgagcccaggagttcaagaccaacctgggcaatatagtgaagcttcatctttacaaaaaaatttaaaaaattagtcaactatggtggcacatgcctgtagtcccagctattcggaaggctgaggtgggaggatcactggagccctggaagtggaggctgccgtgagctatgatggtgccacgacactcctgcttaggtgacagagtgagaccttgtctcaaaaaaaaaaaaaaagattgagccaggaaaacttggattctttgaataaagtctacacagaacagcataattatgccaagaaagccctatttcagatgaaatgtcagcatggtggtagagaaagtaatgactatattgattcttattgggccatgaaaatgtcactcaaatctcacaaattttaaggattttactagtgccttcaagaacctgtgacctctctcccatttctccccggccccacccaactcgccattgcatcagctacttttctttctcaaccttgaactcataagctcctttccaaatcaaggcccttttactagctgtttctcccccacaggacagtcctcccagatctctccagggcaggcccctttgagctcacatgccaattttccattagagaggtctttgctgactaccctatggaagtaatcctacccccaaagcaactactttcaatcacatcatcctagtctatttccatttgtcatgtttttttcaatcactgctatgtaagtttcacagtaaacatgaactgtgtctccttgttcaatcctttatttctagcactcaaaatagtgccttaccacatgacaggttcacaataaatattttttgatagaatgaaaattttctttcacttatcctgaataacatctgcattgaatttccagagacaactccaacaatgtgactgtcaaaattcattgatgaaaagggtctttgatacctacatgctctttttccaagtcaatcagtcagccacagcgctgaagcatgtgtttgcctccttgagactgtttgtatgcaaggtaaggatctccaggtttcaatgaagtttaggtaggatgacagtaaacccatagaatagtaaacctataggaatccttgcgtttctcagtagggagggaagaaggattgttttcttcaatttgggttttattagacattgattcctggtctcaaaatgagtgcacagccttgacaatctgtctgctcaaataccagaagatattagcatctggtgacaattagcatctggtcaccaattctttgagttatctgtgtttgcggcaccaagttaggtaaaatgcaccccttgaacttaaaggggtgcatatcaagttaaagattccacattaaagtggatacagccaccgcctttgaggacgcttgtaaataacacctgtgatcttaacaatgtcaggtgaattgaggtcatttcaaagctctcactgttattttggattgtcatcagttactgatacaaaggatacttatacaatgtagagaataattctatctaggaaaaaagacaaatgctaacataggccttaacaaattctatcctcctcacttgcaaatgaaaaaaaaaaaatagaccaagttaaaaaaaaaaaggagagggattttgttttagggaattttaaaatatgagaatgaacagagcaaaatgaaggcatgttgctcccttcacccgttcttccatttctgcagtttccttcagcgttctttcaagggcctgctgacctctgtggatcattctgttacgaagtcctaaaatgctgtaaccacaggtcacggtcaactcagacagaagcctcagcccttctgtactttttcatgaggaagaattttgaatttaacaagcagaagtcaattgtccggtcccacttacaagtaagtgctgccaattttcattaatgctgttgttaaaaccactgatctgtttcagcagtgcttaaagcctactgtcctcagggcaagccgtcactaactcctccactagcgtcctccttaaagacgcccacagcattcagttctgtttaatagtaggggcacagc

SEQ ID NO: 25599 - DNA, 2300 bp, Homo sapien
aagatagggtcatagcttagttttatagagtatcgatgaatttaccattcaacagaatcacctggagaactttcaccctctcaatgcttcattacccgaatgtttcatttcaatccttaaagggactgagaaagagaaaaaaagttactgatccatcttacacacaggcatctccatttcaacacatattattttcctcatgtcagtgggatcattgaaaattacattaagaaccctccggtgttgtgactatttttgtgattaccaaggctagctctttgtgaatacctcaaatctcagactttctaccggtgacgctcctggagagatgcattagaaatgcatcctggcgtgacctttatttttaaccagggtatctgaaatacccaacaagaccatctcactttataatacaggagattatctacttagcttgctttaagtgattcaaatccaaaaatacacctatgtggaattttaggctgataacaattttataataaattttaacatatctaaaacaaatacctcctaataaatgtaatcaactcgcattttactcgggaaagaacactaagctggcaagtaagagactagattctagtcaattctagacttaagcagtcagcctctctgaacctcagttttctcctgtgacatgagatgaaatgaccaaaggaacattcagttctatcatcctgtgattggactcttgttacagtgcgtgcttgaatgtcctccaaagatgtgatattcaatacaatttgtatttatttagaagttatctaaacaccatttcaagttcagtggtgctaaatgctgctaactcacttcgtctacaatatgcaaaatgcacacatacaccgtgtctttttcaaagatgcgtgtctaaagccagtctaattaaatgccatggttaacagtgatttgtagcactgatgggttacagtcaaaattttaaaataagaatatttcagtgccagtttaaatgcccttcaggctaaataactgtgcatggcatgagctcattgatgatgacgttactcacatctgaggtataacccatgagagggaaaaattgtattactcttgattttatctagtttcatgcatccattaacttcatctttctcctttgagatgagcttggagaagtcaaatcccaccatgacaagttaggtgccaatgtgctacaaagtttaaagaaacagttacagatccaaaagctaatgtgcctctacattaagccattccttctctttcctgccttcactctcaattacggtgaaatccgaattgtgaaaattatgaagaaatgtccttccacgaggcaaacccaattcataagtgaaatattataattcagtaataagcattttatatttgaactttatgtatgtgcataaattgatactgatattcttaagagatgaagaaatactgaaaactagccattatgtgccctcagtggtgcatgccaaaaccaattttttgaggaaaaaaaataagtatgcagcatttgttatcttactgatggccaatgttcatgaacgccttgatagtgtgtctaagcatgggatcatagaccctgggcttgtggggagctcacgtactggcatctggaaggcactggcttccccacttggctatttgagtgggtgctctaccctttcaggatgaagaattgctaccatgccacctgttaccagtggaggaaggagaaggggaatgtgtcctaagtaggtgggtcaaagccctccatgtttccttgaacgtgctaaatggctctctggctctttctcttgatttctacaaagagtttcaaggagagcttaggtgagcaaggccctacttctgcaaagccctaaataggaacaggtgtgtactgctcttatcattgggcctgcatttatctcatggcaaaatctggcatgagcagataatttagagacataagttattcacatgacatagtttttgaagcttcatttttcaaagtatttaactttattcactttttggattttcttcagttcgtgttcaagaccagggcatgcaaggagaggactgtacatgaggaactggctaaaaatgtgactggtcttttgaaatcaaatgactcaacaacagtaaagcatgtcctaaaggtaagaatttaaagatggtcctttaactgtgagtactaggcatgggtcacgcttactcctggaaaatgataggagtcatggattttcatagactttttctcttgcagtttccagcataaggttcatattgaaacttagcatataaagatacta

SEQ ID NO: 25600 - DNA, 2300 bp, Homo sapien
tcctacgtcaagtgttcactcagagacgcttctattctcatttccagttggcctgtggattaatgccagtgaacttgtgatgatgtttgcactttcatagttcccacctaaatgtcatcctcttgaatgaaaagaaagaacccatccagaaatacagaagagtatcttaaattactttataatacatagaggacctaaatctcttattttttttcctatgcatagattaaatctttttgagacatagctttttcatcaaaaaactgtattctcttaatatgtatgcacagacagatactcatatattcaagatgtctagaaacttgttaaaaaaaaaatcggccaagcgtggtggctcacgcctgtaatccaagcactttgggaggccgaggcgggcggatcacgaggtcaggagattgagaccatcctggctaacacagtgaaaccctgtctctactaaaaatacaaaaaattagccaggcgtggtggtgggcgcctgtagtcccagctacttgggaggctgaggctgcagaatggcgtgaacccgggaggcagagcttgcagtgagccaagattgtgccactgcactccagcctgggcaacagagcaagactccatctcaaaaaaaaaaaaaaaattccacactcccataaaaggaagtaaccagaaattgcattctggagtgaacccctctgagataccatctgtaaggaaatttttttcattacagtttttatatccatatgttttctatctgccagaaatgttagttgtcttcccaaatgccaaagcatgagtatgtgccctttttaaacataggctatatgccaaaaatagttatttcacaataatttctctattgtataattttacccaataagatccacatctcaactgcaaaaagccagttccacctacacaagcctttttagtttgctccctaagatagggtcatagcttagttttatagagtatcgatgaatttaccattcaacagaatcacctggagaactttcaccctctcaatgcttcattacccgaatgtttcatttcaatccttaaagggactgagaaagagaaaaaaagttactgatccatcttacacacaggcatctccatttcaacacatattattttcctcatgtcagtgggatcattgaaaattacattaagaaccctccggtgttgtgactatttttgtgattaccaaggctagctctttgtgaatacctcaaatctcagactttctaccggtgacgctcctggagagatgcattagaaatgcatcctggcgtgacctttatttttaaccagggtatctgaaatacccaacaagaccatctcactttataatacaggagattatctacttagcttgctttaagtgattcaaatccaaaaatacacctatgtggaattttaggctgataacaattttataataaattttaacatatctaaaacaaatacctcctaataaatgtaatcaactcgcattttactcgggaaagaacactaagctggcaagtaagagactagattctagtcaattctagacttaagcagtcagcctctctgaacctcagttttctcctgtgacatgagatgaaatgaccaaaggaacattcagttctatcatcctgtgattggactcttgttacagtgcgtgcttgaatgtcctccaaagatgtgatattcaatacaatttgtatttatttagaagttatctaaacaccatttcaagttcagtggtgctaaatgctgctaactcacttcgtctacaatatgcaaaatgcacacatacaccgtgtctttttcaaagatgcgtgtctaaagccagtctaattaaatgccatggttaacagtgatttgtagcactgatgggttacagtcaaaattttaaaataagaatatttcagtgccagtttaaatgcccttcaggctaaataactgtgcatggcatgagctcattgatgatgacgttactcacatctgaggtataacccatgagagggaaaaattgtattactcttgattttatctagtttcatgcatccattaacttcatctttctcctttgagatgagcttggagaagtcaaatcccaccatgacaagttaggtgccaatgtgctacaaagtttaaagaaacagttacagatccaaaagctaatgtgcctctacattaagccattccttctctttcctgccttcactctcaattacggtgaaatccgaattgtgaaaattatgaagaaatgtccttccacgaggcaaacccaattcataagtgaaatatta

SEQ ID NO: 25601 - DNA, 2300 bp, Homo sapien
cctacatgatcataagggcggaggagagtctctgaagtatcattattgacatgccctgggtgtgagaggtatgctatcaacacttaaacctgccttcctactcggtgtgacccacggaattaacatcatacagggtatggattgggcaaacaggcatttgttcgttaaaccctctcacaccagtgctctgggtgacctcctgaagctggaaaaagtacaattaggtgtattaattgtacgattaacaaattgtaagtgactttctgttactcgatattgttggagattgggttgtgtgtgctactcagtgttttggatcagcgagttgccttgtgcagggcacattctgatgtattatcgattactatagccttccctttcagcacacctttctcttctcctctctgactttctctgtgtcaggcacacccagctctctgactgcactagcccatctgagccctttgtaaagtcatccataagctgatatttattgagtgcctacgtgtgccaggcagtgttttgaaaccagagacaaagattaggtacctcttcttgggaagctcaagttaattcaaatgtgcttaatcggttctctcaggggaatatgcattcagagacatcaagtctgggtacacctgggaaagggtacggttggagggagctgttcctacagagatcttcatgtaccaacacagaggcaaccacctactttgcttaccctgaaaggtggtgttgctcccacactgagtaccaatatgaaagcatacaatacaggtacagttatttgttatgcaggctgtcttggaactagatgatgtttcaaatggcacttcccaaatctgccagagcctcttaccctcttacgcctgttatgatttctagaatgtgctgaaatgatccccaaacagcatctctggctaattgaatcctggctaacaaagagctgactaaagtgcatttatcaattgcttaagaattctttatacccaaatgtgaccttgtgttataactatctatcattggctttagaaagtggcagggtcatggatccataaaaagctgttaagaaaaaaccagaccacttggaaaggctgtcccagatctctccagaccagtatccaggggccagaacttctctgccccccatccagtccaacactgaattgcagaaccaccctgggtatgacccaggaagagacttcttagaaggctttcatcagatacctatctagaggcaaagtgcaggctagatgggtatgggcaagagaagagcagagacagcataactgtgaaatccacccccgacctgaccaccctacatagtaaccctgccagttggttcttgcctactcatcctaatgccacccaaagtctcttacccccagaacgctgatttattggttttgagttcgtgttagtagcttaaactgtctccttgatttctctgtatttgtttatttgttcgcttggttacttgctgtctcccacccctaccccgaaaaaacctatcagctctacacagccttaaagtgtagttgctaagttcctctccgtatcctcagtttccagaacagtgtgagctggcatatagtaggcgcttaataaatactcattgaaggagtgaatgaatggggaagcttattccaaggccctgaacatggacttctggcaagggagccttccaaacgctggcttgggcgatgctgctgggatcccagccaccagatctttaataagcctctgaccccttcccgagggtggaagggcgaaccgagcttggcccccacccactagccggacccagaaaatagaagtctaaacggcaaatgcatccagggctccaactctcccagcaacctccaaatgaggctgacggccttggacaggcgacggccttggacaggccccgcccggagcccctcggcggccgccccccgccctcccccgcagcctgcagttcccccgggcggcgtggacagccccggccggccagctgagcccgtgtgggcggcgcgggcaggagccgccccacacgcgtcccgcgacgcccgctccagatgcgccgctgcagggcccggccgccagccgagttggccgcgcgcgcccgggggagcgcagagtttggaaagtcttcgagaagcttcagaggagggaagggggtgggaagagtgggggtgcaagagagaaaaacccgcctcttgcgagttgagcgaggaagaggggggggaaggctccgagttccgcttcctgaacggcgggtggatagagaaggttggcgcggggaagaccggcgggag

SEQ ID NO: 25602 - DNA, 2300 bp, Homo sapien
tcagtcatgataaagtgtttccgttttctaaaatgtctgtcaataattttttttttgtaaagaactttttccacctttggtcatgtgctgaaagacaacatctatgagaacacttcactaccaaaataatggcacattagtaaacctcttgatcacagtgtggtggctgttactagtttataagtggtgcttgaggcacttttcagcaatgtgctaagtatttagaaccttcataaggcagagagagagagagagagagggaaagggagagcattgggatagggggaagagaatatgagagaggtctggcctcttctcttccccgtttgtatttctcctccttttcatctatctaatcttgcagaatccttcttaaaattaaacagatgtcctgttctaaccaaaagctagatacacaaagaccaagaaataagtgatgagcttcaggaatgcacttcaggacatgtaaaatagaaaagctttatagtaatgtaatgtgttgattttatttttccccagatacttacaagttaaagaaatataatttaagaaaattacagcacagtctcaggtgacatttaagaattagacaggtgaacttgtttatttttgtggtctgtcaatgcattaaaaactaaattcagaaaactattttctaagactttggttatgaatatagacgttaaaaaacactcttgggaaaaccaacctgcaagtgaaggtcatttacagtgagttactgaaaaagaatgtgaggggaaaaatctataggtcactatcaagtaataagcacatcccctcccatcaaaattgctttttaagctcatatccatcagaaacatattatatattattccttttatcatagtgcaaaattaatagattaaaacatgtacattttagtttttactgaggaggagccagtatgagaaaaactttgagcttaataaatacaaatacacacaaacacacatatataagttgtggtatataatgtgatatatatgtatatattcagtagagtattaagaacagaatgaggagagtctttgggaaatatcagaaatagaatgactttaattttaacaatgagtctataggaattaatgacatacatatcataattattttgcatcttattttagttaaaaaaatgtgcagtccgagtaagacctttgttccacacacgtgtgtgctgtgcatattctttctaagtggactagttttgttctcatgccatgggagcaggtggcatgaagctgttttgatgaggttaaaaggctcctcccctctctccccaagcagcagcctgaagtacgtcagcagtaattgtgtgcatggctcggctgtgcagggagggtggaggcaaaattgatatcaaataagggtatcaaactgagatctagatgttccatttaagttgttgttcattttcattagccacgccaggggtgaaatgcttataacttaaccattctctgtagtaagaacatttgttttcaatggatttatatttttcctctccataaagactgaattagtgctatagtgaatataaatgaagggtgtttctttaccctcttttccttttattatttactaatcagacttcagctcagttagataaaagagagaggttctgttgcctagatgtgaggcctttaatgaggatgggagcccccagggagccgaaatccaaagtagaacgatgccgctttccggtttcttgcaatttcttcagttgcttctcccttttccaatgggcctagtgagcaggaactatccaaggtgctagaacgctggcagccttgccgttcaatgcagacggattgcagaaacagagaagaaagattactgcttatttcagaaggtaggttctttgtttcagaatccctgattaatcagcagcagcttcaacagactaaggcagctggagaggagaaagagaagcaggaagggagggagtcaggggcagggagggagggagggagtggagggagagagaatgagagagagagagctggttgtcacgggggagggactatgccacaagctgggctgctccaaaccttctgtatgtaagtggcaatgagaaagagcatctttttggctgaaaggagacatttagaaaggatgtttctgattttttgttttcatttatttttgtcttcgcagaatataatcaaatgaggtacattagccagcttggtgattgcttctggtcctgtaatcatctgtgtagcaaagtgggtaaaatcattcaatttcttccctgctggacctggaaggagaggggctgt

SEQ ID NO: 25603 - DNA, 2300 bp, Homo sapien
atgtaatgtgttgattttatttttccccagatacttacaagttaaagaaatataatttaagaaaattacagcacagtctcaggtgacatttaagaattagacaggtgaacttgtttatttttgtggtctgtcaatgcattaaaaactaaattcagaaaactattttctaagactttggttatgaatatagacgttaaaaaacactcttgggaaaaccaacctgcaagtgaaggtcatttacagtgagttactgaaaaagaatgtgaggggaaaaatctataggtcactatcaagtaataagcacatcccctcccatcaaaattgctttttaagctcatatccatcagaaacatattatatattattccttttatcatagtgcaaaattaatagattaaaacatgtacattttagtttttactgaggaggagccagtatgagaaaaactttgagcttaataaatacaaatacacacaaacacacatatataagttgtggtatataatgtgatatatatgtatatattcagtagagtattaagaacagaatgaggagagtctttgggaaatatcagaaatagaatgactttaattttaacaatgagtctataggaattaatgacatacatatcataattattttgcatcttattttagttaaaaaaatgtgcagtccgagtaagacctttgttccacacacgtgtgtgctgtgcatattctttctaagtggactagttttgttctcatgccatgggagcaggtggcatgaagctgttttgatgaggttaaaaggctcctcccctctctccccaagcagcagcctgaagtacgtcagcagtaattgtgtgcatggctcggctgtgcagggagggtggaggcaaaattgatatcaaataagggtatcaaactgagatctagatgttccatttaagttgttgttcattttcattagccacgccaggggtgaaatgcttataacttaaccattctctgtagtaagaacatttgttttcaatggatttatatttttcctctccataaagactgaattagtgctatagtgaatataaatgaagggtgtttctttaccctcttttccttttattatttactaatcagacttcagctcagttagataaaagagagaggttctgttgcctagatgtgaggcctttaatgaggatgggagcccccagggagccgaaatccaaagtagaacgatgccgctttccggtttcttgcaatttcttcagttgcttctcccttttccaatgggcctagtgagcaggaactatccaaggtgctagaacgctggcagccttgccgttcaatgcagacggattgcagaaacagagaagaaagattactgcttatttcagaaggtaggttctttgtttcagaatccctgattaatcagcagcagcttcaacagactaaggcagctggagaggagaaagagaagcaggaagggagggagtcaggggcagggagggagggagggagtggagggagagagaatgagagagagagagctggttgtcacgggggagggactatgccacaagctgggctgctccaaaccttctgtatgtaagtggcaatgagaaagagcatctttttggctgaaaggagacatttagaaaggatgtttctgattttttgttttcatttatttttgtcttcgcagaatataatcaaatgaggtacattagccagcttggtgattgcttctggtcctgtaatcatctgtgtagcaaagtgggtaaaatcattcaatttcttccctgctggacctggaaggagaggggctgtgtgttcatccccacccattagctatgccctcttttctccgaatgtcgatttaaggaagcaagcacctgtcttccgccactgcatcttcctagcaaactttaaaggccattttatctgataggaaggacatcgagaatgctctgatctagtgatgaagaatctgggagtcgacacttttcccatccagacacaatgcactttaattgaagaaacactgagctgaactacaagtctatttcttatggtgctggattactcctacagaactgccctgagatcaaccgtgagagagggctctgacagacacaagtcaccttctggttattgcacttagctctccctggggacttaaattttggtatgtatctcatttttcagattctctaagcatgctaatcgaatccagcactgaatagatcaagcaatctggtgataaaatggaatggattttagttagggatacttaatgctgaagtttgcatgccttat

SEQ ID NO: 25604 - DNA, 2300 bp, Homo sapien
catgggatgtgtatgtggtaaaataaaggtgagtacatttccagccttgtagaaaataaaataataaaatgcccattatagaaattgtcatgcagtaaccaaacctgtgatattctgctagctttagttatgatttattatgtaggaggtttctataagccttaactctagttaagcattgcaattaatgttatgagaaggttaaaaccaccttattgagaatagaagattaaaagacgttttgctcaaataggaaagttcatttcttaatttgggcccacaaaggccttctcttttgcttgtaatttccctcaaaattggagcttcctttcaacagaggtttttgttcaaccatagaacatgagggtctttgatggttcctgttcaactttgtttctcctaagttgcatgtcattaatttttctccttctaccccatgctttctgcatgaccatgttcattggtcttacagcctcaactctcacctctgtgttgatatgacatcctgaggctacacattcagtcttcttaagacaatgtcttcctcttggtttttccaccctggggctccttgtcaccctgtagaggtcatttcaaatctctctttggggaagtcttcttcaatcctcacagtccagctaatgacttatttctttgtgcctcctcaggcctttccatgaagctcctcgacacacaattcagggcaaatctctctctcttcccctagattgtgaggacagcaatcatctgttatttatcttctcctgcatagtaggcagcaatgaatgatcattcttaaagaattggctgaagagttccagtttggatgaaatggtggcactggcaaaggcaaaactctaattctacacaaaacacataaaaatgctggagaaactgataaaaaatagctttggagattccaaataagtacaaatgaagaagaaagcttaattttatgagttgggctgaagtggcttatcaagggattatgccatgagaagcccttattctagtacttaaaattttaacccctgtgaagggagaagagaaataagtttgagctggagaaaaggcaaggaaacagaactgagacctcttcccaaagtggggatcttggaaagattgcctttactgagcaggcaagcctgcaccatgagttgtcatggagactaactttacattaggtgcccatgtaattgcccaacaggttcttcctgcccactgcacagaccatggtattaaaataaagaaagaatttaattgaggctaggttagctaggccatgaaggagacggagattttactcacatcaatttcccgtaaggctcgcaggttaggggttttcaaggatagttttgtaggcaggggactaggaaatgggaaatgttgattggttggggatgaaatcataggggtatggtaaacagttcttaaaattctttcagaatttctgttagtaactgataggttagaaaataataaatataaagaaaatttgaacaaaaaacataataatctttacctactagagacatatacacacacatagatgagcatgtacctatagaatatatttacatatatgtaggtacatatatgatacacatatatatcatatatacaacataaatatgatacatatatatgtgtgtatacatagtgagctgcactagaaaattagaaaatacatattctcaaagagcatggcacatttataaaaatcatcttctatacttcaaatcttggaagtcttaaatatgatgacaatgatatctgaaaaaaggggtaacattagacataggtaggactataactccaaaatatatttaaattttttaaatccacttttaagctatttaaaataatttgagtgataaaaaaatcataactatatgtagttggaacagagtgacattgaaccatctttacagaatgtatgacacagccaaaagcagtacttgcaggaaaatatatcccattacatccatatgcttgaagaaaaaaaaaaaattgaaaattaagaagttagaaaagattgctgagtgcagtggcacatgcctgtagtcccagctgctcaggaaaatcacttgcgcccaggagttcaagcctgtagtgcactatgatcatgcctgtggatagccagcctggcaacatagcaagatcttatcactacaaaacaaacaaaaagaggttagaaaaggaacacaaaatgtgatggttaatactgagtgtcaacttgattggatcgaagcatacaaagtattgttcctgagtgtgtctttgggagtgttgccaaagga

SEQ ID NO: 25605 - DNA, 2300 bp, Homo sapien
agaatataaggaacttctctatgaatggttcctaatctattcaaggccacaggctgccccaggaagctgatgaaactttggacccttttcctagacaaatgtataaggtaacaaattttgcaaacaacgtgagatggctcacaaacacccaccagcccaggcacatccatggatcacagattaagaacatacttttataggggaaacataaaagaataaatcagtttcttccattcaatcacgattatatcaaactagcatttatcaggtatttgtttgccagcaaaacctggatccaatgacactgagagaaataaaagaatatgtatgcccttgtctttgagtagctgaaagtccagtggagaaaacagacctgacaattgatattcacaatgaaatgtgatggaatgaatacgtgagcagcatgcagagacaacagaggactggttgaaatctttacccatgggagctagagaaagatttctttttgcacaatcaatgcttgaggatgatctgaagaaacaaagtgaccagtcctgtggaagcaatacttccaaatcttcatttatacatggtaaaaacaacaatcttaataagccacttattatatgttagatactattttaatatatgtttaatcctcacaacaattcaactgacaggttctcatcacccagctagtaaatgaggccaaatttaatcaggcctctggaaccatgaacccatcacactgtgttagatccatacgtaaaacagtgaactggaagacagtgaggaatatgttatttgtgtcaactgattatacagatacaaaaaagggatgttatggaccaggcgttttattggagcacagcacagtggcatgtgtattgttttccaaattttatagatgaggcatatagactttaaatcagtggttcaaagccatatagtcacagaagggaaggcccaagtgtgaacaccagccttctgatgtttagcgtgttgttatcgctactacctcccattgctttcaagcaccaaggggagcagataccacctggagttctaaacatttatgattagtatgagaaccaaaatggttgtaccaaatgcagatgcagaatttagatccacatctatattgtgcaattcaatcccagacataatcatttgcccaatctaagaagacatctgacttcccattcccatcctcccctagcaaatagaaatgaaaataagagaggtgaggaacaggtacaatatgagataaagttcaacttagctaaataataaaaatgtattatgactatcagataaattaaagcaagttacaaattcgaagcacagaaaatcagtttccagaatccagtaataaaatgagatactaaaagtccgcacaagtcttttctgcatgagctgacaatcagtcttcataaggtctctataatatagatatctaacatttggggagtattgtcaagttctattaaaatgatgatatagctaataaggaaagaatgatgcagcataaaatataggacaccatcttttttcttttaaatttgtgctctcagacttgctgagatattccttatcatgtcactgtgcagtttcagaaattatcatggaaattacatatatttctgtttatcaaaccaaccacctcatgataaatacttgtagactgtctctcatttaactcacagtttgggttttagaccaaacacactatgtccacactgttaaatgtacattaacacttgcaataaagaaacaaacattagttgatccagtcatctcccattgacagaccatcatcattctggtacacagagaaatatacacttcagaagctcatggcatgtttcctccttgattcaggttccttgtttattaccacatgaacatttctctggtatatttttagtacaatgtgttatcctagactgatcatatgttcacagattgtgaggagcctgtgaaagactttttgctgtacttgctattgggcaaaatcctgtctgctacctggtattcatgtagagtaaactgcaatgtggaaacagatggtatgaccaagtgggagagagactctgtctgcaaaactgggagagcttcactctgactgggggtggaagaggaatgaacaagtccaccccagcgtaaaaataagatgaaaatataaaagaatgtcagtgttgaaggttactccttttgattttgccaatatcccggaaccatgtgagcacatgaacattccaaagaagaagatacctccaggttcttcagatggtgagtggagccttagtgtttaaacc

SEQ ID NO: 25606 - DNA, 2300 bp, Homo sapien
gcggcccttggtaaagcactgattgctgaaaggtagctctgtcccatgggaggatttggaatgagatctagtagaaattttcattcaagttgaatagaaaacagaaaagtgagtgttctatggaaagcagaagtctggcaatgatggatttgccctgtgaatgaaagtctaggaatgtgtgtccttcccacagttggtttattaagaaagtcctgcaagttaatatcacagtatgtgtttgaatacaggtataaatttcttgagagtccacaaatcaactatcagtggaaatcctgatacccaccaaatgatgtttttacatctatgtattcatcaatctaataattttctaagagatagcagtgtgtctattctattgagtagaatactattgtttttcttttttttttttttcttttttctttttttgagatgaattctctctctgtcacctaggctggagtgcagtggcacaatcccggctcactgcaacctctgcctcctgggttcaagtgattgtcctacctcagactcccaagtagctgggaatacaggcatgcatcaccacacccagctaatttttgtatttttagcagagacagggtttcaccatgttggccaggctggtcttgagctcaggtgatcctgacctcaggtgatccgccctcctccgcctcccaaagtgttgggattacaggcgtgagccaccgtgcccaggctgtttatcttttatttgtaaatttagatatttctgaagacaatattaatttacagggaagtcattatccttcttcctagaatatgcctgcataaatctatggcatgaaatgcacacatttccgacaggattcttttaataatactctctcattttacaatattccctgacaccatagcatgactggatgaattattctccagacatagcctaatttccaatagtcatatttcttaaatatttttgaaattatttttaatagaaatttgtaagattatcaaattcagtattttattgatggacaaaattttacctgaattgtcttaaaagtgccactttttatttctaaaagcaacagaaaatgaaaggcattcattttataactccctagtgtggatccttctcctgttaacaaactcaaatttttaggaagcttcaattcttccaattccactttaatgccattttttctctcattctgttttcggaggcaatgaagaacagctggtcaccattctctgcaataataaccttcatatagttgaaacccaaatggttttggacatggtacttacaaaaacatctccttgcaaatgatgtagcctatttggtatttcccctgtaaacagctagattccttatagccaacccttccagcaactatcaaattttagctctgtttagtataatgcaagcattttctgctttgtctattcaggaatgtcttcctaggaggtttcacaataaaatttattgtgtttcatttatgacgtacaatgtaagaagaatggaatgcttttctgttaggatttgcattgataatgaaaggttactatagtgctggtctgctttgaccaaatttgccaaattctgaagagaatgccaattagaaggctgtaatgcttttcactgaaacagactgaggccaatacctggtggtggggacctgtcattgttggccagactctatttttaattgggagagaaggcaaatgctagatcaaacagtgtttactaagtgataccaataattccaagtcatagccacaccccaaaaagctgaggaagtgactaagtccttctgaggtcgtcttttctattagtagcaatgtagccaaaagtctgaaaacgctcacattttgctctctttaggaaaagacaacattgattttagaggtttttgttatggaggccagggggatttttccagtgcagcacagagaaatctgggtttggattgggaagccagacatttcttggcttacatttcctacttgaatgggattcgtttgccccctcctcacctctccccaacccccaggcagctagaagccccacctccttgcttggaccatatggggaagctggctcggtggctgttattctactgactccaagttcacgcagctgttcatcccctgcttaatgtactggtaattacagcaatgtgctcttctctttccaatcatgtaacttttactaatggaaaatgatttgtttttaacaacttccatgcatttctttctcgttttaataagaaagggtgtcttgtggcattgagctattgaattctctataaaaa

SEQ ID NO: 25607 - DNA, 2300 bp, Homo sapien
ggctgctgatctggtccactcatgaagtaaccattttcctgtacagttgagctggcaccatccttgttttctccctgttatccttgtggtcaaggttaaaaacttatagggtggttcaatgggtgtgggagctgtgtgtgaaacaaacatttcagccaatatttgcacagtagggttttggccttatgaaccctctgaaggtccctaacagctttttaaagtcacggatagacttcggaatatgataagggacctctcatttcccctcccccatgccctcagccttaggtgtgagtccccccgtcacacggatgggcaaggggagcaggagaaaaggtgatatttacattttctccctacttgatcagcaactaattccacagcgccggacgtgagacacttcctggggatccctgttctccttttgtagtgaccataactgcccccagtcactgcccttgggcgtccctctgttccttccaggtacctcacggcagcaaatctggggatcccaaggtggaaggctggcccagaagtcctttagaaaaaccttaaaaaatacagatcccctcaccatggcctatcgccctgaagccgaaatctagcttttaaatttcctgggggaaacagccttgactagaaacctccctcccgtgggtcagtcttacctgataggtaagaggcagcccagctccggcgcccccgcctccccccggcctcccactcggggctctgtagccgcagtgcccccccgtggccccccaccctcactcctgcgtcttcccgagctcgccccctcccgttttcccagactcccctcgtgctttcgggtagccacccaaacacccccgcctgcgcccgccgcggggattcctgcgggccgggggcgccccggttggcgcgcgtgtagggaggcgctgcgccggagctggcggccgcgcaggggcgctgtcctagcgctgcgccggggtcggcgcgggcgccgctgcagcacggctggggggcggagaggggcgggcgcggggcgggctcggcccggaatgtagagacccgggcgggagcctcccggcggcggctgcccggctgccgagcgcggaggctccgtcacgtgtttttctcctccgagtgagacggcggcgcggtcggagggggccggcgcgcagagccagacgccgccgcttgttttggttggggctctcggcaactctccgaggaggaggaggaggagggaggaggggagaagtaactgcagcggcagcgcctcccgaggaacaggcgtcttccccgaacccttcccaaacctcccccatcccctctcgcccttgtcccctcccctcctccccagccgcctggagcgaggggcagggatgagtctgtccctccggccggtccccagctgcagtggctgcccggtatcgtttcgcatggaaaagccactttctccacccgccgagatgggcccggatgggggctgcagaggacgcgcccgcgggcggcggcagcagcagcagcagcagcagcagcaacagcaacagccgcagcgccgcggtctctgcgactgagctggtatttgggcggctggtggcggctgggacggttggggggtgggaggaggcgaaggaggagggagaaccccgtgcaacgttgggacttggcaacccgcctccccctgcccaaggatatttaatttgcctcgggaatcgctgcttccagaggggaactcaggagggaaggcgcgcgcgcgcgcgcgctcctggaggggcaccgcagggacccccgactgtcgcctccctgtgccggactccagccggggcgacgagagatgcatcttcgctccttcctggtggcggcggcggctgagaggagacttggctctcggaggatcggggctgccctcaccccggacgcactgcctccccgccgggcgtgaagcgcccgaaaactccggtcgggctctctcctgggctcagcagctgcgtcctccttcagctgcccctccccggcgcggggggcggcgtggatttcagagtcggggtttctgctgcctccagccctgtttgcatgtgccgggccgcggcgaggagcctccgccccccacccggttgtttttcggagcctccctctgctcagcgttggtggtggcggtggcagcatggcgagccctccggagagcgatggcttctcggacgtgcgcaaggtgggctacctgcgcaaacccaagagcatgcacaaacgcttcttcgtactgcgcgcggccagcgaggctgggggcccggcgcgcctcgagtactacgagaacg

SEQ ID NO: 25608 - DNA, 2300 bp, Homo sapien
taaacaacccttttataatctctcttttttcttgtctagggtaaaaccaggcacacagttacacttttccaccaacttcaggcttctttattctgcacctccctgccctaccccctgtaaggcactctatacccccagaatttcggtcactgtgagtgccgcctcgcttccatttccaaatatctgctattaatagccttgctgtagtgggcacgtgtgcccacatcaccaagctgtcagaggaaaagaagggagggctttcaattcaacatgtgtactcaaattatagattaaccaggtttagatgaggctgcatgacgaccgggaacaggaaggggagaggagaaacgagaggctcccaggcttgggtggggaggagcccctctgcagatgcccaatccccctaatttacgtatcgcacacccctgaatggcgcctatggttctttttctccttcatcatcatcatcttctttttctttttttactacgctttgcaacctaccttggtaccctcaacccttctacccccaccttccctctgcagtgcaaggcttgaaaaacaggccatcccaccaatcagcaggcctccccgggaaactcgctccgcccctcagccgcattgggccgaggcgcgctcccccgcggcccgccgggtcccagccactgagcatgcccagcgcctcgactgctgagtgcccagccagcatcctgcagtgcctgggagcctgaggccgaggagggtcccggcgtagtaaaggggcggcaaccccaaacgggccaggcatcaaaatgagacagcattaaaccgagtgacatctctgtgggtccttagtgccaggcgagcaagcagggacaaactgcttgtttataggtcggcttaaaaaataaaaaaactctggggagcgtttgtttgtggggagactgataccgcaaggtgaccctgaaaggggcgcttcaagtagacccaggctgctgatctggtccactcatgaagtaaccattttcctgtacagttgagctggcaccatccttgttttctccctgttatccttgtggtcaaggttaaaaacttatagggtggttcaatgggtgtgggagctgtgtgtgaaacaaacatttcagccaatatttgcacagtagggttttggccttatgaaccctctgaaggtccctaacagctttttaaagtcacggatagacttcggaatatgataagggacctctcatttcccctcccccatgccctcagccttaggtgtgagtccccccgtcacacggatgggcaaggggagcaggagaaaaggtgatatttacattttctccctacttgatcagcaactaattccacagcgccggacgtgagacacttcctggggatccctgttctccttttgtagtgaccataactgcccccagtcactgcccttgggcgtccctctgttccttccaggtacctcacggcagcaaatctggggatcccaaggtggaaggctggcccagaagtcctttagaaaaaccttaaaaaatacagatcccctcaccatggcctatcgccctgaagccgaaatctagcttttaaatttcctgggggaaacagccttgactagaaacctccctcccgtgggtcagtcttacctgataggtaagaggcagcccagctccggcgcccccgcctccccccggcctcccactcggggctctgtagccgcagtgcccccccgtggccccccaccctcactcctgcgtcttcccgagctcgccccctcccgttttcccagactcccctcgtgctttcgggtagccacccaaacacccccgcctgcgcccgccgcggggattcctgcgggccgggggcgccccggttggcgcgcgtgtagggaggcgctgcgccggagctggcggccgcgcaggggcgctgtcctagcgctgcgccggggtcggcgcgggcgccgctgcagcacggctggggggcggagaggggcgggcgcggggcgggctcggcccggaatgtagagacccgggcgggagcctcccggcggcggctgcccggctgccgagcgcggaggctccgtcacgtgtttttctcctccgagtgagacggcggcgcggtcggagggggccggcgcgcagagccagacgccgccgcttgttttggttggggctctcggcaactctccgaggaggaggaggaggagggaggaggggagaagtaactgcagcggcagcgcctcccgaggaacaggcgtcttccccgaacccttcccaaacctcccccatcccctctcgcccttgtcccct

SEQ ID NO: 25609 - DNA, 2300 bp, Homo sapien
tcaggcctgtaatcccagcactttgggaggccgaggcgggcatggtggcaggcacctgtagtcccagctactccagggggctgagtaagtagaagcacatgaaccaggcaggtagaaattgcagtgagccgacgtcacgccactgcactctagcctgggtaacagagcgagactctgtctcaaaaaaaaaaagagacactctggaagctctgttggaatagactgttggggggaggacaggggtagtggcagaagcagacctcataaaaggctactgcagaaatatgatcaagagatgatggtcattcgtaaagatggtgagaagtagtaaagttctgaatatattttgagggcagcatcagcagaatttgcaggtggtatggatgtgacatggaagaaaaagaatgtaggatgactccaaggttttttttacttgtacaactgaaaagataaaatcaccatcaactgagacaatgtatcagttttctatggctgggttaagaaactactctaaaggaataattatgaaacatcaactcttttattatgctctaggattctatgggccaggaattcagacagggcacagtgttgatggcttgtctgtgtcctggctgggatggctcaaatggttgtgggactatttgacttgaaaggctggagcctggaatcatttgaaacattgttcactcatgtgtctggcacctgcgttagaatgactgaaggctacatcaactagagtacttacatccggtctctccatgtgacttggacttttcacagcgtggaggctggatttcaaaggtgagtgtctgaagagagaccatctcgagagttaacatgccaagagggagcttctagagaggaggtgttccaagagaatcagacagaaattgtgtagccttttatgaccttacctcagaagtcagagcttcatttctactgtatgtatcctattgatcaaagtagacatgagcccacccagataaaagggcagggaacctagaccacagttcttgatggaagtagtgtcaaaaaaaaaaaaacttgtagtcattgttttaaactaccacagattgaaatactgtggctgaacaggaatggggaagatgggggaagatcaggagtttggttctagacatgctgagtttcaggtgcttattgatcctccgagtggagatatcaagtaggcatttgtgtatataaaccagagttgaaaagatgagtctgggcttaggtataaatgtaaaggttgtcagcctatgagtaggatttaaagcccatgatactggataaaatcatcaagaaagagaaagtagatagacaaaagaagaggacaaagatgccagcaagggagacagaagaacaaccagtaaagttgctctcttttaggcaggaagacaccatatcaggaaaaagagagtgaacaactgagtcaattgctgctgatggtcaagtcagaagaagacttggaattaacataagatctagcatcatgtttgtgttatgtataagatattaacattgattgcagatgcccacaatgtttatgatctgactgaattctttagtggaatcacaaaagttcaacatactcagatgtgtacagtaggttagtagagtttgtagggataattatggcaacatattttatatttcctaaataactttaacttgaaaaattcctatgaggacagagatactaaagtacagtggatgctatgtttagtctcactatgcaatttagtcttgtctctaagattagacttctaaacattcttaagattttgagaaagagagggagagagagagacactcatattaataggaaaaattgccaagatatgtcctaatttttaaaccaaatattttaaaatattttagacaaaagtttatatctaggaatctacttctagatttattagtctttactgatttaaaactttacaaaataacaaataatagctttcacctttttaaaaactattttaaaagactaatgtaaggtaatttactgcaaaagacaaatatcaataccaacacctagttttaagttggaaaatgtgaaataaaatcttatgtaaaatacatcaatacccaacaatataataataatgtaacataaaattaccatgtcattggtgggacacacaatttactaaagtgtaaaaaccataacataactcttggaatctctatagaactacaaaatatagttgatgcttgaacaatgcaggcattaggagtggcaactccacaaagttgaaaatctgcatataactttagactctccaaaaact

SEQ ID NO: 25610 - DNA, 2300 bp, Homo sapien
aggtcattttttaaaaggtagatatttttttctatctgttaaatgtcttttaccccttaaatgtctatgaaaattttcactgatatttgaaacagaacataattacctaagaatattcttaatccgtatatatttcttacattttaacgaaattattgaattgagacttcttgatttgtggctcccttaaaatcacctctgcatttgatgtattatacggacaagaaaatgatgcaattatagaaagatgtagagagtgatggagaatagaagataagattaatattaattgaatggattcatatgattgtggttcagaaggataaatgaggacttcttccttttgagaaattacacatttccccctctagggaaatacagaaaatacctctataggcaatttacttttccccgcattcatttgacttttcatgtccagaaatgcagtttctcattgtcagttgagcttttggaggagtatattgtttttctaggaaagaggtaacttatgagtcttaatgaacacgtacaatttgctaagaatcttctttgtcacttgaaagtcatatgtacacccacacctatgcatgagccacattttcacttaaatttcaaactccaaaataaatatttctatgaagagttttaatacacaatggcaaaagataaactcttctggtttaggcagtttttgttttagcagactatctaaacacagctgctacaacttccaataaacaaagagtaacactaaaccacctgtattcggatactcggattccttcttggaaaaagagcatctttaccctagctatcagaaaattccataccaaatagtaagattttttttttttgagatagagtcatgctctgtcgcccaggctggagtgcatggacgcgatctcactgcaacctctgcctcccgggttcaaggattcccctgcctcagcctcccgagtagccgggattacaggcgcccgcaaccatgcctggctaatttttgtatttttagtagagacagggtttcgccatgttggccaggctggttttgaattcctgacctccggtgatccgcccgccttagcctcccaaagtgctgggattacaggcgtgggccaccgcgccaggcctgttgttgttttttaaatagagacaaggtctcactatgttgtccaggctggtctcaaactcctgagctcaagcgatcctcctgcctcgacctcccaaagtgcggggattacaggcgtgagttaccgcgcccggctgtaagatagttttttcatatcctattaaatatatatagcattgcaacatttaacttagcctaactcctacagctaaacataaaacttgctcccgagtagcaaacaattaaaatggtatcaaattatgtattaatcgaaattctattaactgaaatatgaaacacctaaagccctcaaaatgggcaaacgttgcgtggtgcagtcccagacccaagcttctgggagtgaaaggtgcacccgcgaccttgccttgctggctggctctgggactctgcgataagccgccctccggttgtctgcgatagctcctgaagcaggagagtgtctttcccaccctccgcctaacaggcggtatctgacccttccaggcagcagctccccagcctccggctgcgctggggcccggaaggacgaagcttcccggcagagaacctgggcagaggcgtccgttgggtaggcggccgcgacccgctcgctgcttctcccctagtcttcgggtcccttgaacgcaggtcgcttgtttgccttacgcgtagtcagcggccagtggctatttatggcagtaaggaatattatccacatttcacatggagcttagaggacagggcgagggtccacactctccttactgcgctctgccgcggtcctgccccgctgtgccctcgcggcccccttagagccactgccggcgcacgcggtctgcagacagcagagcgcgggcgcgcacaactaagcatgcgccgcggccgagccgtccgctttaaggccctcccctcccgcacccggccccaggaacccggggcgccccggatcgggaacgtgcgtgatgacgcacgtgcgcgcgaagacgtggggacgcaggcgggtcgtagagagcgtgagtttccgcgtctgtttggtccggctgctgtcgttggttgtgagcggcatctctcgccgtttccccgggctgcgggagctggcggccgggctggggctgctgggcggaggtcggcgcctcccggggggctagggcgagggaggcatggcggggct

SEQ ID NO: 25611 - DNA, 2300 bp, Homo sapien
acctgacttcaaaaggagctgtgctgtaggtttctcaggtaagggagacaaaattttgaggttgcatgcataaaggaagcaagggaggtgtggctgctgtcattttatgaagtgtgggtccctatcaaattctgagtggttaagggctgctgaggctttgcgtcttgaagaggaggctggagcatgcagggactagtttttgccattctacattatgctgcattattcactcttagtctgcactaggacctgctggaaggtggttttgtagaagacatagtattggaaatatgcaccagctccttatggtagggtcacagaaagacccacagatgtatttgtaatagggagttctcaaaaaagatgactgtgcttgtgaagtaggctcagtgtgctgtctctgattaccaacttgtctgcacctggtgagacagagcacactcatctgcaacaagttacatgaggcagatttagtatttacagttaggcagcaagggaaaacaggagcctaggattcatcgtgagcccatcttcaaggctcaaaaagctgcctagggctgttggagtcttcactgtgtgtgttccttgcatgcaaataaggaaccccaaagaggcagccaggtacaaacctaggaatcacatgaatcactgggcaaagctttgaaagacatcctattcgggagaggattaggctgtttcagccagcccccttttatctcagggtgttggatttccagcacatttccatagttattcttgagaactacaagcgagaaaggagggggagaactacataggtccaaggccacctggagaactgtcctgcgatgcctctggatgacttcgttaataaatggaccacaccctgctatggcatgctggccatgttttaggagccatgataatcactctgcataacctaaccaatttaatttatgcagcagatccacatggagatgggattatctttattttattttattatttatttattttttttgagacggagtctcgctctggcaccaggcctgaagggcagtggcgtgatctcggctcactgcaacctccgcctcccaggttcaagcgattctcctgccacagcctcccgagtagctgggactacaaggcacgcaccaccatgcccagctaatttttgtatttttagtacagatggggtttcaccatgctggccaggatggtctctatctcttgaccttgtgattcacccaccttggcctcccaaagtgctgggattacaggcgtgagccactgtgcccggccttgattttattttactttttttatttgtagttttttttctgaccacctgctgactgttgagggattgtcttgattttatagatgaggaagccaagacccagagaagtgaggttactagcacaaggttacccagctcggaagcgatggagctgggacttgagcccagtctacagattagctgtgtgatgcattgtctctcactttcttcctcactagttcctttttacagatatttcatgggaccaaaattgccagcaggatttaaattaggcgttctaaatattagaatgtgaaggggaggagagaggtagtcctgaaacaaggaaatctaatccttccttctgcttttcctgacatccttcccctttccttccaagatgtatccttatgcatctaattgtgggagaagaaagaatatatgccctgtcttcaacatgtttttccatagaggttagaaaaatacatattactggtatttttattgagttaaaatttatatagcataactattttgtagtgcacagttcactggcgtttaatactaataatagtattttattcacatggtaggtattatgtatttagtagcatactgaacaccaatatgaacttctatatttagaaacatcaaaggagtgactgcctttaacgttgtctttttaccaaatgcaaggttgtaaggaatagggtatgttttaaagcacaaagttggatgtaatcgaataatcattttcacttttaattaactttctttgtaaatgttgatactcctacttttggattgttgatatttgcatgttcttcattctcttttaggagttttgtttgctttgaaagttcttaacaaccattattgccctggaggctttgtcaacattttgggctttcctgtaccgaacagatttgcttgttgggtcgaacttgtggctattcatttattctcaccagggtaagtgttttcttttggggaatacagttgaaggacctgatgttctgtggagaaaaaaattgcaataata

SEQ ID NO: 25612 - DNA, 2300 bp, Homo sapien
tcctgtttgtctctttctttcaagtgttcctcattgcatgttcttttcctgagagccagcgagtcttttcatagcttggagacaaagaaaattactcagaaccatcttgcttgtggtgtttcagggaatctcccctaggctgctgccatagtaggcgaaatgtattggttttgactctgagtctcgtgtaggttaccaaatggcggattcttagctctgtgattgccgtggctcagcaagcaccctgagctgaacatctagtggttttaacttacctcctgttggtcttggtgaaacggtcctggcacacttgagccatttactcaacatatccttgagtgcctctcatgtgcctggccctgtcctgggtgtttggaatacatatgtaaaagccacataaaggctatgttcttggagtctccatcaggctctttcataactttcagtttcccaccttctggaatgagaggtcactattccaggctgtgggaatgcgttcatttgcttggcttttttttttttttaagcttctaattttgtataatgtatgaatgagacaccattgctgccctcagggagtttgtgtgtgacagagagagacggacaggcaggcagacgtgtaagtactgtgccaccagcagactggcttcgtgccagaataaggtaggagcctcagctctgaggggaggcaggagaaggaaagaacggctcttcaactggggtggcattttttgacagaggtgctgtttggcttagcctatggtcagagagtgcttgggggatgtgacagtggggcatgtgggaatggaggtagtagacgatgaggtctccaccctctgactttgcagagatgggcaaggccaagtgttggaagggcttaaacacacaccggagtattctgtgagaaccagtggatttcagaggatggcaatgacaccacttgccttctgcctcaggaggataactgatggccgtgtgtgggatgcactggagagcaagagctggcttgcagggagaccagctggatgattttctttcatttattttattcattcaacacacattcatctggggttcactctgtgcccaacactgggcatttccaaatagtccagatggcagtaagcatggttgtggcagtaggaatgggaaggctgggaggggtatgagaggcattacaaacgggaagtgggagtggcaccccagaaaagtctagtttaaggtgctagtggatgtgtgcatgtgtgcgcgggggtgtctagagggtggcgggcagctggaaattgaggtcaagtgcttaaagaacaactcgttgtgtaggacccccccctttgtggtaacagcagaggtttttgagaatcgccagtaatttcttaaactcaggctggttgggaggtcattcagccagggaactccacaaagagtgttgccacttgggtcaaagtagacctctgaaaataaatcttacaagtaattgctggttttagatgccagtttaagaagagttaaaccactgtcatgccctaacgcaaacactttcatgccctaactcatctttcaagtttgaaatttaaatgtatgtttctttgttctgagtgactgaaacatacacatgaagacaactttggtggatgcaggtgggcatctcagttccttttgctgagtttcacttgctctctgcttcactcatccatggtgtagaaaactgcagcagtctgccctgccataacacagatagacatcatccctcacaatggctggataattccagatttaatgccaaacagagaaaactgattttatttatgttttgtgataagaggtacagaaaaaaaacggaaagcgatgtaatgacttgtcttgaccaaatgcttccactgctctggaggagacaacccacttcccctggttaaggaggggtgttgcgttttaaacatgtggtggttgttattcattgtacttttttttaaggtaggagatgttgttctttggactgagttaaatgctgcttagcataaaagacttgatgtggaacaaagcctgcagactgtgactatttgacatgcactgggctaatgagaagacagaatgtctctaatcagcagcagaacaaacactcacaaagggtctccttccctcctaggacttccttcgctgggcatctggctgggattcttgttggactaatgtacactcaagggcctctgaagaaaatcatggaagcatgtgcaggtacagaataaaacacctttggcatgacaacagcttggaagttcatgttaattttaatgtgaacagaa

SEQ ID NO: 25613 - DNA, 2300 bp, Homo sapien
acctcatcaacagaacacctaccgtttcattccacaagagtggcagaagtttccagaagaaccttccctaccaatggaaagaagctactgcataccacacagcaacatctgcgatatggtcataaattccgcagtgttcccaagttgtaatgaagagtttaatatatgtgctttttattattctactaagaatatatcctaattcaacatgtgcgtgaaattttcacatgttcgtgaaaacaggagctctcatacttgattgtgcatgggaatgtacaggaaattttaaaacagctagagagtctgataaaattggcttggaatggtctgggtagcaacattgttttatcctcccaaagattctaatgcacaacgatagttgagaatcactggcataaaagacagaaagaagactgtaagattcatgctatagtcaaaataaaaagaatgggaggagtgtcttcattcactgttagggttttgcctacctgcatggctacaaagttctaagataccaatagatcccaaatttaactgcaagcaagtggttccctaaaatcagtgaccaactgcatgatcatacttggtgtctgaagccaattgcagcaaatatcagcaacactgttccaaagcaaagattcttaacctgaggatggaattcaggtgatctgtataggaaactcacataggaaaataagttgcatctttacttttagtaacatgtcacagaagttcaacatgtccttcccttatgagcacaggcaacagagcacagtagtattggcagttcttgataatttgcacccaccggtattttcatgtcacatttcagtttgggctattatctcaaaataccatttgcagacatcactactttgacattactgttgcttaatcggcctgctgttaaatcaagctatttaatgcaataatgatgatgcacctgtgttagttactatatcacgacttgaggacttccataattgcattccaataaaactgattctgatttaattgtattttatgcatttcacaacattcttctgagaaacagtctaattgctttaccagagccagtgtggtccgtagcacaggaaacggcgagagccggctggaggaccgtgccctggcacatttgcatcgcaggccacccccaggaagagcgcaccctgaccagagctgagtcttgttttgccctgcatttccgcagataagatttggcctgaaaagcagttcaactcagcggagaataagatgggctttctctttctcctcagctgcctctttctcttggcattttggagtgccccgactgccaggccggtaactcgagcctccaaattaatcaaaacacacagcacccagttaaagcccaggcagacaagcccaggagccagacgcgctctcctctggtgacccccgggccacaactccccagctgggcccgccaccaccccttgaatgccacgctccctccactgcccctcccaggcaggtgccggggccccgggacagcggttgccccacctatgggcgccttacctgtggggacgcccgcagcgccaggagctgccgccttgccaccccacgggacgcgcacctccagccccaatccacccgcgccccgctgcctcttcgcggcgctctcgcagccaagcccggcggccgcaagttggaggcgggctggaggcggggaacgcggaccgccgcgggcgcggggaacaagcggggcctcccgagtgcagacgcccggcgcgcctcccgcttaatctgggcagggccgctggccactccctccaccctgcgcagccacctccccaccgcgcagccacctccccaccgcacacccccaaacgccccacctccgaccgcaccccacttccccgcctgggcccccggaccttgggagcatcacctccttaaccccttaccctggatccgcgcccacctgcccctcaggcgcccagccctttctcgcctcctgggcacgatgcccgggtagaagggacactgcctggtaagttgggagggagggggtatgagggcgggacctgagccacgtcttccctcccttgaagccacaaccaaaaagcctgggtggggagggacgaaccgcgcgaccgagccctacaaaacccgccccggccgagtggcgaggcgagctttccagccgggctcccagagccgcgctgcgcaggagacgcggtggcctgagagcctgagggtccccggactcgcccaggctctgagcgcgcgcccaccatgagcgcccggaccgcccccaggccgcaggtgctcct

SEQ ID NO: 25614 - DNA, 2300 bp, Homo sapien
aaaacaatacaaatggattaatttcagcaagaagtcaccaagatttggccaaactcaaaacagaaaagtttacatgtaaaaataacaaaggaatgtaacaacagaattgaaaatggtataactagagtttgcatggtccccaagcattactttttcaggctgatcctcacataagtacaattcttccaccccttcccaatctcattcctgttcttctaaattcagaaacatgtgcaaaccctgctctggatctcttctccaggcttccccacaacacacatttcctttaggattttgcttttttggatttatttgtcctggttaaagctggtagataatccccactgagttttatctatcatgcctagtagcatttaaatacctggtctgggaattcctaatgtatgcaaagtgcatttttgttagaaccagctacacaaacagattacatagattacaaatgtcctttagaatgtgaaacagtgaataatctaaatgtaaactgatagggaaatggttcaattaactttggcatattgtgaaatactgtgcaacaaagcaaaaagaaaaacaggaggatcttaaatactgacatggactggtctacaggttgcaaaggaatacagcacagtatcatttatgttaaaaggccaacaaaaacatacatatatgtttgtgggttcatatgtgtgtgtgtaaattcatggacaatgtttggaaaactacatgaaatatgaaagtggtgaaagtggacacctcttggaagacaaggaaatggggagaggtatggggggtgtcagagagggctttagtttcacctataatgtctgcaatgtcttcatttaatttaaataggaaaaacatatagaacctatatgtgaccataggttctaaaattcttttcatgtaacatatataaatatttatgtgaccgttaatttccaatcataatctcaatgataacatttgtaaaaacatctgctcatccttggaaatgaaatttcctatgccacgttatcacccaaatcaactttttaaagtgtaaaaataacaagtatctgaaaagttaaagtttactttcacaaggtaaaatcaagtgagtcaactctaggaggcacaatcgttttgaggacaatcaatttctatttaatggcaaagaataagaaatatgggatggatttaaataaatccagtttcactcaaattccaagtcaaaaatcaaatcaaagtgtcagattgcttaaatgattctaacctgagttcgatttctaaggtgctcttaatttttcagtgatagcatttgcttttcccaacaatagcaaaggaaaactggagggcaagttttgcaaggaagaaactgagccccagagaggtcagggtttagtgtgacgtcccagctaggaagtggcggctgggactccctgcaggtgtctcctgccagccctctgtgcgctgggccaagctgcttgatttgattcaccagcgtgacaccgtgcatctccacatccggtgttctcacgtatcatccctggcgattatctatgtgtctattttttaatttactgacctctggaggcctgtccccgccatccctgactcctaggcactggacaagccccctcctcgcctcttcccccagccccgcgcattccacctgttccggggcatccccgcttgctcccttccgctcgctgcctgtcccgggacctgcgtgaagccctcagcctcgccactagcccggcagccgctccactaccgcgccgctgcgggtggggccagcgcgtcccccggacgcgtggaggagggatggaagtgcgggggtgggggtcgcgcagcccccactcaccttgctggctgcgggcgccgccgccaggagcaccagcaggagcggcagcaggagcacctgcggcctgggggcggtccgggcgctcatggtgggcgcgcgctcagagcctgggcgagtccggggaccctcaggctctcaggccaccgcgtctcctgcgcagcgcggctctgggagcccggctggaaagctcgcctcgccactcggccggggcgggttttgtagggctcggtcgcgcggttcgtccctccccacccaggctttttggttgtggcttcaagggagggaagacgtggctcaggtcccgccctcataccccctccctcccaacttaccaggcagtgtcccttctacccgggcatcgtgcccaggaggcgagaaagggctgggcgcctgaggggcaggtgggcgcggatccagggtaaggggttaaggaggtgatgctcccaaggtccgg

SEQ ID NO: 25615 - DNA, 2300 bp, Homo sapien
ttttgatcaaggggcactttaaaatggcagtgcttctgctctgtcaatagtaggatatgccaacccaaaatatggcactttggcataaagattattttcgagtcaaaggcacttaaaaaaaaaatgcaaaaagagcactgtggctttcctttttccttcctgaaagcaggagataaaacttccgtatgaaaggtgccctccctgtataaggaggaagggagatgttctcaacaccagagacatggagtcaaagctgagctgtatctgcacaaacttaccgattttcatttccactttgttacaacaacctttatcttcttagtcacttctgcattaactgcactaacccaaatctgtttgttttctcacattttcacaatttactactctttttagccttccctagaaaaatggagactcaaaagcacttagggtccaactgttaatttgggtctccatttttctagggaaggctccaatgtaaatgtaaaaattactaaataaaatttgtatgctttcctcctgttatgttttatgtctctattttacgtcagtggagactaagctctgattttttttttaatcttgctcaaattcctatctaaggggcctagggattcatgccctacaatccataaattctcatcagatgggttttatttaaccctatatattgtgacttactttccaatctgacactggcataacgagacaagaaacaaaatcaaaatattttaccgcaaaacattttttttagtttttgacatatcttgaaacggctctgcaaagctgtcctttgttgggggaaaatctgcatctacatagaatttctattaacatagctagatcattttcttccaggtcctcccaatcctaaagagattacgtaagaatctagcaccttttaaagatctgaataggaaacatttgtcatccattgtctctaagggcagccactataagacttcaaaagaaccttggtctccacaatcttttattttaacctcaacatttcctttctatgggtcccaggtcttcaactgtcaaccagaaaatgtttaaatttacctacagccttggaagcccctgctttgagttgtcccacctttctgaaccaaaccaatgtagttcttaaatttatttgattgatgtctcatgcctccctaaaatacataaaaccaagctgcgccccaaccaccttggacacatgttctcaggacctcctgagggctctgtcacgggccatggtcactcacatttggctcagaataaatctcttcaaatattttagagtttgactcttttcctcatcagtttaattcttaggcccagccaagaccccaagaggggagaggaaatattttcactttccctacaccagtgttaagaagcccaagaacgcaattcagagggcttcccaaatcattttgaagaatggtaacatctctagaatatcaattagatcgtaggggagtacataagtcatgtgtacacctttaggtgtttgtgaaaaccaaggcatataaaatatcacattatttggcctcagtacattcccatactgacaagcactgtaccatttttcccccgctctaagcaagggcttcctggggggaagagtctgtggttgggtgttcagaagcagagagtgctctcccaaagctaaacgatgccgccaactactgtgaaacttaacttcccctctcccggaattctcatggaagacaaggtctgatcaaccgagggcttaagaagtatcaaattggaactcatggaatcactggcggagctgatttacatatgagaattcctaagcctcacagcatagaaattttcatgccagatggtcctgaaaaagttgttttaattggctaccaaaggtttaccttgcaaacaccaagttcttaaagattacaaaatctaataaagccgaagtgtgaattaaacttaaccgcaagaggagtcacctgcggtcacctcgtttcgcccacaacaaagatgtctgcgcatcgcttaccgtggagccgttccagtgcgtgggccacgcgtccgcccttttccgcgtcacatgaccacgaacactcttccgctacggctcccagaaggggccagcccgcgcctttcgcgcttctgccctggccctctgcgggccgctccgccggtgctgtccctgggcgcctccgtgctctcagccaaccacctctgagagcgcccactcgagcgccccgggagccagagggcgggggtcctcgccgggaccctcctgtgggcccaggggtgagtgttgacgtcttcccgac

SEQ ID NO: 25616 - DNA, 2300 bp, Homo sapien
gaggcaaaatctctcttagaatcacagatgatttcatatttctactttctaagcccagtggttcccaaacaccagtaactaacttgccaacttcatgggttttttttttcccatattcacagagtacattaactttttgctacagttaatttttttaactcgactttttaaaatcaaaaaagtattgtaaaagaaaattttgtatcactaccttaaaccatggctgtacatatataaatacagattgcaaaaacatcctattacaaaaaaatcctcatccacgtaccgcctagagtcaagtcacatgccactagcggaaagtgtaccaattttgggacacaatgattccagcccaactttctcattttctgtattagaacactggaacccagaaagcctcggaagtcaccgaaacaacttgagtcaaactgactgtggttgcaaatgtttatgtacttttcaaaaacaaacatacaaacaaacaaaaacaaaccaaaaaaaaccctccagttgtttattacctactgcgtggacctagttcacacagatgggccactctgcacaccctgtttcagttctttttcaaagaaactatatttaaaaagtcactgcaaacttttaaaactatatattaatgaactttaaaataaggttatgaacccacagaaaagtttcaataccagaagagaggagagcgaagactaaactttgcaattctgaaaggaggcagctctatcagacaggaagggagagaacacaatttccttttggaaaaaatggcaaaaccaatatacaagcctttgaaaccaaaagatagaaggtcccccaagcaatttaattgcatgggaaaagactactaagtataactaaatcgtcctaattttcctaagggtttttcttttgggctctcattagccaacggaattgaggcagaaaaaatgtttttcacgcagggagacaaaacatttgtgatcatcttaagtctctcggtggatgagaggcctgaatacaaatggttctatatttgggcagaagggccagaaaccttttttttttttttcccctttaatgttctccaatgaaaacatgtcacttttgaaagggtgctcttccctcgagaatgccctttgcttctaactttgtgggaggtagacaggggtgttcttttacgatagtaatagtagcacacgtcctgcagaggaaggtcagaagctcggcggaacaggaaccgcagctttcctccggcttcccagctcctggaaggaaacccgagagcaactgcctgcagccacatctgcgagcagggatgctcacagacggacagggtggcccgcagccacccgcgatgccacaacctgggcttccaacaaggcccttcttttccaaaatgtacttgccacaaaacaacacaaaaacctccttttaaacaaggcaggtttaaggtcagcctgtaaggtgtcagggccttggcagggaaggatgagtgaagacctgcaaagcccggcgttcacgctcacgggactcccgctgcttcccaaacccctattttccagtcggaaaagtccgggttaatacacaaaaggagacgccgaaccacacaaggtgaagaggttcgcccaaaaacacctgcagaagacgctcctctccctcgctctcctcggggactcaaggtcccggggaggaggaaagaccagggttgaaggcaagaggcccggggacgggactcgggtcagggagacactaccgggggggccggggccaccgcgggtccctgttggccggagggtctcggcggcggcgataggcctggcagccagctcgggcggcaggtcgcgggtcgggaagacgtcaacactcacccctgggcccacaggagggtcccggcgaggacccccgccctctggctcccggggcgctcgagtgggcgctctcagaggtggttggctgagagcacggaggcgcccagggacagcaccggcggagcggcccgcagagggccagggcagaagcgcgaaaggcgcgggctggccccttctgggagccgtagcggaagagtgttcgtggtcatgtgacgcggaaaagggcggacgcgtggcccacgcactggaacggctccacggtaagcgatgcgcagacatctttgttgtgggcgaaacgaggtgaccgcaggtgactcctcttgcggttaagtttaattcacacttcggctttattagattttgtaatctttaagaacttggtgtttgcaaggtaaacctttggtagccaattaaaacaactttttcaggaccatctggcat

SEQ ID NO: 25617 - DNA, 2300 bp, Homo sapien
tcctgtgggcccaggggtgagtgttgacgtcttcccgacccgcgacctgccgcccgagctggctgccaggcctatcgccgccgccgagaccctccggccaacagggacccgcggtggccccggcccccccggtagtgtctccctgacccgagtcccgtccccgggcctcttgccttcaaccctggtctttcctcctccccgggaccttgagtccccgaggagagcgagggagaggagcgtcttctgcaggtgtttttgggcgaacctcttcaccttgtgtggttcggcgtctccttttgtgtattaacccggacttttccgactggaaaataggggtttgggaagcagcgggagtcccgtgagcgtgaacgccgggctttgcaggtcttcactcatccttccctgccaaggccctgacaccttacaggctgaccttaaacctgccttgtttaaaaggaggtttttgtgttgttttgtggcaagtacattttggaaaagaagggccttgttggaagcccaggttgtggcatcgcgggtggctgcgggccaccctgtccgtctgtgagcatccctgctcgcagatgtggctgcaggcagttgctctcgggtttccttccaggagctgggaagccggaggaaagctgcggttcctgttccgccgagcttctgaccttcctctgcaggacgtgtgctactattactatcgtaaaagaacacccctgtctacctcccacaaagttagaagcaaagggcattctcgagggaagagcaccctttcaaaagtgacatgttttcattggagaacattaaaggggaaaaaaaaaaaaaaggtttctggcccttctgcccaaatatagaaccatttgtattcaggcctctcatccaccgagagacttaagatgatcacaaatgttttgtctccctgcgtgaaaaacattttttctgcctcaattccgttggctaatgagagcccaaaagaaaaacccttaggaaaattaggacgatttagttatacttagtagtcttttcccatgcaattaaattgcttgggggaccttctatcttttggtttcaaaggcttgtatattggttttgccattttttccaaaaggaaattgtgttctctcccttcctgtctgatagagctgcctcctttcagaattgcaaagtttagtcttcgctctcctctcttctggtattgaaacttttctgtgggttcataaccttattttaaagttcattaatatatagttttaaaagtttgcagtgactttttaaatatagtttctttgaaaaagaactgaaacagggtgtgcagagtggcccatctgtgtgaactaggtccacgcagtaggtaataaacaactggagggttttttttggtttgtttttgtttgtttgtatgtttgtttttgaaaagtacataaacatttgcaaccacagtcagtttgactcaagttgtttcggtgacttccgaggctttctgggttccagtgttctaatacagaaaatgagaaagttgggctggaatcattgtgtcccaaaattggtacactttccgctagtggcatgtgacttgactctaggcggtacgtggatgaggatttttttgtaataggatgtttttgcaatctgtatttatatatgtacagccatggtttaaggtagtgatacaaaattttcttttacaatacttttttgattttaaaaagtcgagttaaaaaaattaactgtagcaaaaagttaatgtactctgtgaatatgggaaaaaaaaaacccatgaagttggcaagttagttactggtgtttgggaaccactgggcttagaaagtagaaatatgaaatcatctgtgattctaagagagattttgcctcgtttgttatgtaacagaatcacgtactggttgcctactggattctaaggtacaaaacttctggaattaacatatcaacaccaaatgagacgtttatttattgccaaaagatattatcagaaatgccacagtctaacgagggagaaaaaaaatcagattttgattggttttaagcagaaaacccaataattgggataatacagtgttaaatcttagtagaaatccagttactttttaaatgtaagtagttcagctacaggagaacttggctttttccagaagttggcatttcagcatccacctttattttctaagtcactagttttttacaaactcagatattctcgtaagaaaagatgttgctatagaatggaatatagtagtgagacctatgagatgtactactagaaagttcgtaagactgaa

SEQ ID NO: 25618 - DNA, 2300 bp, Homo sapien
tcataaccttattttaaagttcattaatatatagttttaaaagtttgcagtgactttttaaatatagtttctttgaaaaagaactgaaacagggtgtgcagagtggcccatctgtgtgaactaggtccacgcagtaggtaataaacaactggagggttttttttggtttgtttttgtttgtttgtatgtttgtttttgaaaagtacataaacatttgcaaccacagtcagtttgactcaagttgtttcggtgacttccgaggctttctgggttccagtgttctaatacagaaaatgagaaagttgggctggaatcattgtgtcccaaaattggtacactttccgctagtggcatgtgacttgactctaggcggtacgtggatgaggatttttttgtaataggatgtttttgcaatctgtatttatatatgtacagccatggtttaaggtagtgatacaaaattttcttttacaatacttttttgattttaaaaagtcgagttaaaaaaattaactgtagcaaaaagttaatgtactctgtgaatatgggaaaaaaaaaacccatgaagttggcaagttagttactggtgtttgggaaccactgggcttagaaagtagaaatatgaaatcatctgtgattctaagagagattttgcctcgtttgttatgtaacagaatcacgtactggttgcctactggattctaaggtacaaaacttctggaattaacatatcaacaccaaatgagacgtttatttattgccaaaagatattatcagaaatgccacagtctaacgagggagaaaaaaaatcagattttgattggttttaagcagaaaacccaataattgggataatacagtgttaaatcttagtagaaatccagttactttttaaatgtaagtagttcagctacaggagaacttggctttttccagaagttggcatttcagcatccacctttattttctaagtcactagttttttacaaactcagatattctcgtaagaaaagatgttgctatagaatggaatatagtagtgagacctatgagatgtactactagaaagttcgtaagactgaaatgcaatgaatggaatgcagagaaagcacatttcaaggagatactgaggttctagccacttggttctcgtttattattataaaacttcaatttataatggccaaaggctataatctttttgaggtagcttttttcagtgttagttctgaatatgagcttttgctatgcttgagatacacgcaagtattagaagagcatctcatctggaatgatgcacaaaaattgattataaaggttgcctgtgggaacctgggtggttaaggataggattgaaagtgggacacttccttttctctgtatagcttgcgtactttgtaccgagtacatgcattactagttcaaaattttaacatcgtaagtgaatgaaaatttaaacaggccgggcacggtggctcacacctgtagtcccagcactttaggagacgaaggccagaggatttcttgagcctaggagtttgagatcagcctgaacaacataataagaccctgtctcaacaaaaaatacaaaaattagctgggtgtggtggcatatgcctgtagtcccagctattcaggaagctccattgcaatctagcccgggtgacaaaaaaaaaaaaaaaaaaaaaaaaaccaattcatttgttcttctttaacatatatgtgtacctatatgcatatatatacgtaagtattagattcatttaaacttacgtatttttcatctgccacatttttctaaatacaaatcagaaacaatgacagagctagtcttttatattgccttaactaatgaatagttgtaggaccccatctgtggaactaagattggtggtaagcttaatttttttctttctttattttcttactggtctcttgatgtcaggttgtgcatctttgtgactgttactatttggagaatttccagtaatgaatccctaatagtggtttcatctagtttctcaattagcccctgtttttcttccccagggacaaaagtggctctcaatccagcacatgcacattgaagcaagttaaaggatttaatatgaagcacagaagcagatagtgccaaatagcaagcagtagttgttacacatttgtgagtaaaaatggtcccttttggcttactttcttagtctttaaatcgtctgcatgccaaatccttaaagatctatgtccccagagattttttgataaagaataaaagatgtgagttagcagtcatagtcaaaccagtt

SEQ ID NO: 25619 - DNA, 2300 bp, Homo sapien
aaccatgcagaagtatataaaccatacaatggaagtgtctcctgtctctcaacccagttgtattctttcagttattctcggtgttttgtgtgttgtgttgataggtgggtgttttttgtttttgttttaagatggcgtctcactctcttgcccaggctggagttcagtggtgtgatcttggctcactgcaactactgccttctgggttcaagtgattctcctgcctcagtctcctgagtagctgggattacaagcacctgccaccacacccagctaatttttttgtatttttagtagagacagggttttgccatattggccaggctggtctcgaactcctgggctcaagtgatcctcccacctcgccctcccaaagtgctgggattacaggggtgagccaccatgcccagccaataggtgggttatttttaatccttttatacaaatcctttcatacaaaggatttcacatttcactgaggtccagtaactggaccccctagtctggagctactgttttggtgtccattaccagggatgccccttgtaccaggctgtgtgcgccccccacactgctgcagggtggagcgctgctctctaagcctactacgcctgagcttttggcccacactgactgcaccgctgcatacattatttcaccattcccaacagcactcactgaatctatgctctgggctgagcgggggattacacagaagcagaaggaaggcgctgtagagattagagctgcctaatgtcccaatcttttctcctagacatattggtttgtatttccacccacttgaactcatgcataactgagtgacttttttggccaatgaaatgtgaacagaagtgatgtgggtcgcttctgggcagaaacatatagatccagtatgtggctcaccacatttttgtaccctgcctctgtgactgtggaagcctggatcaagaagctgcctctgccagtctaggtctaggtctaagtctaggtctttcagtaactaccatgaccccatttagatcaggatggtcagtcagcataagcaagaacttttgtattgtttttgttttttgagatggagtctccctctgtcgcccaggctggggtgcagtggtgcaatctcagctcatggcaacctccaccccccaggttcaagtgattctctggcctcagcctcccaagtagctgggatcacaggtatgtgccaccacgcttggctactttttgtttttttggtacagatgagggttttgccatgttggccagactgatctcgaactcctgacctcaggtgatcctctcgctttggcctcccaaagcactgagattacaggcgtgagccaccgcagctggccagaacttttgtattttaaagcttatgccaactgatagtcttttctcaaggagctcaccagctagtggagaggcaatgtggaaccacagtctagagatgtaaagtactgcacatggccaagtaagtgttcaagggcttaaataaaatatgataatctcctcatccaatctctctcctattgctatctttcagtctggtagcattagccaaagctctcacatgtcttaggtgggctatctctaaatgggttagtctgcaacactggaataatatgacataaacattttcttttgtgtatgtgagcatacggcttgaaataaactctaatatttgcagcagaggaaatacctttctccacatctcatacgtgttcattttcttgttgaacaatttcaaaataagaaacttccatagctggtaataatatcgatagaacaggaaaatatagtttagctggatatttttgtttttactttttagaagccatactaataaaggagtatattaaaggagcttatcgtaagcctatcttcttacataaatttatctcatagatttttttttctgctttccttccttcacctcatcataatatggaattattttctcatttcccatcatagtcatcataataatgtcctaccctattggactctgaactattttccactattcattttttattagcgttaaattttaaccagaagattgggataaaaggcaacatagtaccatgcaagcatagccactttgacaacgtttctgagccaggggtgaccatgacctgctgcgaaggatggacatcctgcaatggattcagcctgctggttctactgctgttaggagtagttctcaatgcgatacctctaattgtcagcttagttgaggaagaccaattttctcaaaaccccatctcttgctttgagtggtggttcccaggaat

SEQ ID NO: 25620 - DNA, 2300 bp, Homo sapien
attaaaaaaaaagagatggtggagagacccaaagaaaccttatgagacatattacccagttgcaaggagtgggttcaaacaaactgtaaaaatctcattaaaatattgataattgccaacttaaacactagtgcgatatttgatgatctttaggagttattaacttttttttttttgaggcggagtcttgctctattgcccaggttggagtgcagtggcacaatcttggctcactgccacctctgcctcccaggttcaagtgattctcctgcctcagcttcccaagtagctgggactacaagtgcatgccaccatgcctggctaattttcatatttttagtagagacccggtttcgccatgtaggccaggctggtcctgaactcctgacctcaggtaatccacctgccttggcctcccacagtgctgggattacaggtgtgcgccatcgtgcccagcctattgttaactttttagatatgctaacggtatcatggctaagtttgaaagagataaagtttttattttttagggatacaaatggaactatgtaccatttagatgaatggtacgaaacctagaatttgctttaaaataataggagaggggatggagggttgaggtatttataaagcaagattagccatgggcttaatcattgctgaaagtggtccatgggctcatggtagtttgatattttccataatagaaaagtttaaaaacattcattggccaatctatctgtccatttcttttaatattaaaaacattaattattattagtagtattatattaatatgaagtctcactttgttgattcacccaatccctttcatgagagatgtggaggttggtcttggctgttaggaaacgtagattctaatccattcaacagcccagtgatttgagaacttcagctctctgggtctccctgtactcctttggaaaacgagagacgaagttgattgttgcagtggggatttgggtcctgcagtctggctgtctgggttggaattgagcttcgccataggtacccttgggtaaatttacttaatccctcagggtttcatcttcctgttttgtaaaatgtaaataacaataacgctcacctcgaagggttgttgtgaagattacatgaacgatttcatgtattcattccgtcaacattgaacacctagtctccagctctgcgaggggaatggggtggagtggcacagaaaatacgggggccaggctgtttagcgcctaaagggagagtccagatcacccatggtaaacacgaaataagatgcagtatttcaaatagctagaactgagacgaaaatacaacgcagcaatttgatggagagcaacttcgagaaaggtgagctgcaacattaactcggctgatctgggacagtctggcgggggaggtgacatctgagccccacctgacttagaggatgtcagctatggatgatccgggtttccacacgcagcagttctcaagccaggtgactgcaccgccctaaagttccctccacttttggcaatgtctggggatttttggttgccagcaatgggaattggggggtttgttcttgtatctagtgggtataggctaggaacgccgcccagtatcctacagtgcacaggacaccccaagcccccccaaattagctggcccaaagataaagagagaagagcaagggcaaaggtcctgcaggagtcagaaaggagcttgctgtgttcagaaaactcaaaatccagtgtggctgagtgaggacgacgaagaatgaggtagactgggctagactatggagcactttttacggcacggtgaggaatttggaattatactcaaagcagtggaaagcccttgaagagttttaaacagaaggggaaggtaacccatgtgaaacgctttgcatatataagcgctcaataaatactgtctattattaatattattatcaccattgtgtctaccctacttggctccagacccggcccatgcctcagcgaggccgcagtgactcctcctggccagcagagggcgccagcggacacttggctaccggccgcccagggcgggcctcctcttgccgtccccttcctcgtcttttcccctcaggagaagtcgggaaggtggcggcggcggcggcggttgtcccggctgtgccggttggtgtggcccgtcagcccgcgtaccacagcgcccgggccgcgtcgagcccagtacagccaagccgctgcggccgggtccggcgcgggcggcgcgcgcagacggagggcggcggccgcggccagggcggcccgtgg

SEQ ID NO: 25621 - DNA, 2300 bp, Homo sapien
agctttggtattaaaagaggtaaacatcagtttcctcaaacattttattcatgttgaatgcctttttgcaatgatgactgagttgttatcatagtattttaaaacctgtatagtgttttagacttgttaaaacattgctgtctagtgtacatctagctaaaagtgtggtttatctaaaccgttttaataagcaagatgactgggaaatctctgccccttttctgagcagtatgcctcttcttttagaattaaatgaatgctgcacaggtccagatgtgtgttgatgtagacttgaaatgtctccacattttggaggacttcctcagcccttttcattgagggaaaatatatttgaatttctgttttagattgtatcgggtcccagttgattcatgtgtacaaagttatgctacctaattacagaccattacccaaatatcctaccaggctttccatctgaatagtaaattaaacagttgttatcaaaatgattttaaagactatttctttttctgggtaactattgaagtttgtaattaaatgggggctcttactgactttaaattagcgcttataaaataaaaatgtttagttcaagaagagacccaagctgggtatggtggtgtgagagcctgtgagtcctagctacctggaggtgaggtgggaacatcacttgagcccaggagttggaggctgcagtgcgctacgatcacaccactgcacaccagcctggggatagagtgagatcccatctctaaaaaatgaaaaaaagaagagaggtagctttaaagtggtttttctcatgatattcactgtttattattaaagaaaatcagctttcgttagacttttacatttagatttattctagttttatatagaccatcaaaattatgttgagtactaaaaaggagaaaaaatcctggaaggtaacaaggctgaagaccttcaaatttcctggcttactggtttagtcacatcatttttcctgttcaggtatctgcagatatccctgttcaggaaagatcttttttcaggatggcaaacttttgacatagtttaaagacattttttccccattttttgaaatagagaatattttattatttttgtgaaaatagagttttggtaatcactttcttcctcaaaataagtccttctgttaatttgtaaaagcacattagtgctttacctgtgaaattccccgcccccctgcacacacacccactttagtacagttcctgtcaattggcaacatggagagggtgacctggctgctggtttaccactgtaccaacatctctggagcattttagtttcagaaccttaacactccccaacagctttgttgatgtagcttgtatctctgagaatttattgtattaaaattaatactgagatatttttaaaacatgtttatttatttaagtataacagtaataaactaataacttgctaacataaataccatttttgataaaaataacttttccaaaacaaaaactaatgagaacaggaacattgttttacattttatgcatttaaatctggcttaataaaagcagtgagattttcatgctgcttttgcattccaacttaaaaattacacagcatacacacgctggaaaactccactgtgcacttgtgagatcaggagaatgaaaactatgtaatatctcagtagtacaatgaaaatagtttgacttttcacagcctttcaaagaaagggttgtagggaccattaagggtctccagactctttgagaaccactatactttaaatttgtgtatttctagaacagtatttacttgcagggcaaacataactattccctgggttttttttgtttgctagtgagaactgaaattgcagactttttaacactacttcaaggtaataatagcagtggtattatgggctgtgtatgagatagtcatttgtaaaacaattttcatatttcatctcttacaatccctgcagtggacctatacttttaggatgaaagaagcaaagcatagagaggttaagctagtggcagctttttgctctggggaacagatttggattaaatgctatcacatttatatatgaatgcattctttcttaatattttgaaattctgaacaagttaacgttcttgtcttgtatatctaaaaaaactttaatcacttgaattcctttcataatttgatgaaatcagtacagtttattcttggtttttttttttaactttagaagtaaattaatatggtaactagtggagcgtgctttagattgaagactcatctgaagtatcaca

SEQ ID NO: 25622 - DNA, 2300 bp, Homo sapien
gtgccgtcattgtctagcttgttccctgttatgcccctggtgtttcctctagttctcactttaagtaggtacttggttagtatttccttcaaaaaataaaaaaataaatacatgcaatatgaaagtaaaactttgagctattgatttttttttttttttttttttttttgtggtggagtctctctctgtcgccaggctggagtgcagtggcatgatctcggctcactgcaacctctgcctcccgggttcaagcgattctcctgcctcagcctcccgagtaggtgggactacaggcacgtgccaccacgcctggctaatttttgtatttttagtagagatggggtttcaccgtgttggccagaatgatcttgatctcttgacctcgtgatctgcccgcctcggcctcccaaagtgctgggattacaggcatgagccaccgagcccagcctgaaatttttttaatttaacaatttcattgttatacaggcacaacctaatttttttatgctttagtaaatgttcccattactttcctttaagttatagagtaaattgggaaatgctaatctcatacttccgtaatacacgatatataaatgattgaataaaacttcaaggtagttctattttttaaattacagacaatcccccagaggctcatctgtacttactgccaaatgcccaatggaagaatataaatacaacaattacttttctaagaacttgctagtcctaggcaatgttctctgcgtggtagctcaatgtctccacagcgaccaagtgaaggccactgtgaaataacccagccggagcttcaagataagatttgaaatagtatgattacatgtaatttcaggtatcttggaaataatttgggggtttggactaaaaatcttaggattcaaagccactctcagcccaccgtcagaactgtgtttttttctaatccatcacatgtagaggtcttatccaaaaccaaataaatcactgtcaagctgcttaggcatctgaacggattaaatcaagattccaacatgaaataatttgcatactaaaaggaaatctgccatttgatttcatctaagttttaaaagcatcaatgtagttccacatttgttcaagggaaaaactgttagctgaacaagaaagacctgaaattacaagtcccatttgaaccacctgtcatattcactacgtgggacctaaggtcatttatgggttttgctatgtttagttggtagtatcttgcatggaaataatgccttttgttgaatcacatcgttttaaaatgcttgtatttgtttttttatgtaaagaattttggaagggacataaaaatagttaacatttttcatttggttcattttgtaaatagattcacattacaaatgttttagctaaattgcatggaagaactttaactatatatgtcagtcttgactgactaaatttaacatcccagtacaattatttaaaatgaattaattaccagattgaatgaactatgaaaggaaataatttgtggattttgcagagaaatattcactgattagactctgaaattgctaactcaataaataatccagtgattaaatctttaaataagtaaaaaattcttcatgctgacctgttttcacttattgataagcttaatttttttttttttttttttgaaacagagtctccctctgtctcccaggctggagtgcagtgacacgatctcagctcactgcagcctttgtctcccaggttcaagcgattctcctgccttagccttctgagtagctgggactacaggcatgtgccaccacacccagccaatttttgtattttttggtagagacagggtttcaccatgttgaccaagctggtttcaaactcctgacctcaagtgatctgcctgcctcagcctcccaaagtgctgggattacaggcctgagccacagtgaccggcctgatacatctgattttaaaagtgacttgctaagccatatttatctcaaataatgttgaatgttttctagttgcagagtattttgaaaatttggtttaattttagaattgtttaactagttttaaattcttagcgtactatatcccatcccacggaatgttaaaatacattgcaccatcccatttgtctatttcttcagtctatctctgctaaaagagctttcagaaagaaactgtcaatagaaacctgggcttcctcagcagaccaaagccttgagaagaacacaattcgctgttttgtatttgaatgcgcatgtgtgtgtccttttaaaactctttccatttgt

SEQ ID NO: 25623 - DNA, 2300 bp, Homo sapien
aaatcatacatttttttgtgtctggattccttggcacagcaaatttttctttttatgttcattcacgtatttgcagtagttcactcctttttattgctaattagtattggttgccaaaatttatcattatttattcattccccatttaatggacatttagttgcttctcattttttcacaaatataaatatatgaacattcttggatagattgccaaatgattttccaaagggttggtgccattttacattcgaacaagcaatgtatatggattcacttgctgtaaatctttgccaacatttggtatgctggcctctgtagccattctagtgctagttttctctcctagtcttaacttaggatttctgattacttatgttgagtatctttgcatgtgctcttggccaaccacatcttttgcaaagtatttaaatcttttgttcatctattcttattgagttacaggggttctttattttggagacaattcttttatcagatattgcttttaagactattttctcttcagtctgtggcttccctttctaatttctttgcctttgtgtgtgtgtgtctgtgtgtggtatttttttgtacagacaaaaaaaggtgttgtccaggctggtcttgaactcccaggctcaagtgaccctcctgcttcagcttcccaaagtgctgggattacagtcgtgagccactgcacctggtcccttgccagtttcttaacagtacctcttgagaagcagatgtggctttttttttttttttttttttttttttggagacagagtttcattctgtcgcccaggctggagtgcaatagcgggatctcggctcactacaacctccacctcctgggttcaagcgattcttctacctcagcctcccgagtagctgggattacaggcttgtgccaccacgcctgggtaatttttgtatttttagtagagacggggtttcgccatgttggccaggatggtctcaaactcctgacctcaagtaatccacctacctcggcctcccaaaatgctgggactataggcatgagccacggtgcccagcctcctttccattcagtttcttaacagtacctcttgataagcagatgtggctttttgatgaaatgcaatttatcttttttttcttttaagattctttttattatttcaaatatgtgccagtccctaggtaacgaagatctgtttccttctggatggcatgctgtggtgttagtatttgttatgtcaaattagtttttgtgtatggagtgaggcagtgatcagtaagatgcatttcaagtaagatgaagttacagccagaatacaataactccctagaagttggtggaaccaccttccaatttttattttattttattattttattttattttattttattttatttttttgagacagagtctcgctctgtcacccaggccacaatgcagtggcactatcttggcttactgcagcctccacctcctgggttcaagagattcttgtgcctcagcctcccaagtagctgggagtataggaacccaccaccatgcccagctaattcttttgtatttgtattagagacggggtttcaccattttggccaggctggtctcgaactcctgacctgaggtgatctgcctgtctcagcctcccaaaatgctgggattaaaggcgggagccaccgcgcctggccaccacccactaattctgactgcagcagaacgacggtggttaagcaagaccctggaatcctttcccctgccttccttcaggaccatcttgccctgacttaagctgactgcagccctttgctttatttgaatgttttactgaaagttatattctcttctattttagtaataagcagattaaaaggcataattagtttgtctgctctgatatgtcagctaaaagcaaatatttttgtttttagtaatcagactttgagtttgctctgtctagggaagggcttgactctagcagtgttgaaagcctgggaggtgggctttttggaaactgtaactgatataacataaaatgtatttggtctttaagctaaaacttttgggaattcctgagtaacaggtgtctttttattcataatgaccctctttgataacgtgtttatgctaataagatagcttggagtggggtccatagatagtctaaaaactgggggggaaggagctgaagatcatgctctgtaagattcgtttttcttttttttaatatttaaagagatggggtctctatgttgcccaggcgggtcttgaactggctaatttttatatttttagt

SEQ ID NO: 25624 - DNA, 2300 bp, Homo sapien
atccacagccttctccccacacagtcgtatgggatcaaactcaaatgtcatgtcatgtaatctgcaaatgtgtcatttatgtttctatgcatgaatgaatgaattcctcaatatctctctctgatttagactgtggctatgagatattagagaatcagagtaaacttctcaaggtccaatttgaactcattttcttcaagaggtgtgaaggaaatcatgacaccttcagcctttaagaaaatttcacaatattctttgggaggacccagcaatttgcaaggttgcacaatgagcagggcactcctacacctaaggttcagctcaggacttttcacaaatcataggaagatgaaaatagaaaacgcagagtcgtaggacagagaaccaagacacctcggggtgttttaatccatttcacttccactggtagcccttagaagccacgcagtgtttatctttagggagggtttttcaagtccaccaagagatgaacagaaataaaaatattttttccattttaaccaataagaaccttgtaatgctttaaaaaaattctctgtttaataagaagtttcactttaatatataaactctttgcaggctaagcgtagtggctcatgcctgtaatcccaacactttgggcgggcaaggcaggaggatcctttgagcccaggagttcaagaccagcctgggcaagatagtgagactctgtctctaccaaaaaaaaaaaacaaaaaaattaatgtgacgtggtggcacccacctgcaagcccagctacttgggaggctgaggcaggaggatcagtgtgcctgggagattgaggttgcagtgagctggggttgcaccactgcactccagcctgggagataaagtgagactttgtcaaaaaaaaaaaaaaaagaaagaaagaaagagaaaagaaaagaaaagaggccaggtggccgggtgctgtggctcacacctgtaatcctagcactttgggaggccgaggcgggtggatcacctgaggtcaggagtttgagaccagcctggacaacatggtgaaaccccatctctactaaaaatacaaaaattagctgggtgtggtgacgggcgcctgtaatcccagctactagggaggctgaggcagaagaattgctggaacccgggaggtggaggttgcagtgagccaagatcgtgccattgcactccagcccggggccaacaacagcgaggctccatctcaaaaaaaaaaagaaagaaagaaagaaagaaaaaagaccaggcgcggtggctcacgcctgtaatctcagcactttgagaggccgaggcaggcggatcacgaggccaggagttcgagatgagcctggccaatatggtgaaaccaaaccccgtctctactaaaaacacaaaaattaactgggcgttaatttttggaggctgaggcaggagaatcgcttgaacccgggaggcggagggttgtagtgagccgagatcgcgccactgcactccatcctgggcgacagagggagactctgtctcaaaaaaaaaaaaaagaaagaaagaaaagagaaaagaaaagaaaaagaagaagaaaagaaaaaattgtttgtatcagattttcaaagtgccaggaaaccatcccactctacctcctttaaaaaaaaaaagtgcagagtgattataaccactggctctggagccaggagccccaactaaaacccaggcttctctatttactaggcctacttccttccgcctcactttcttcatgtgtagagtgggggtgacagccagccagccctctctcctaagcttttggagagaaataaatggattcataagaaaggacatatttgtaaataaagcaaacgatcgctgttggattcaggccctcttgcttcattatgctgaatgtcagtgtattacttaagttgttcctttcagcagagttgactgtttctgcccagaaaaccggccctgggccaggaaaatctgggcttccacactgggatgaaaggtctggacgcccggattcgcatatgcaaagcgtgggggcgtggccccgggctccgggccaggcaggctccgcccccttcccaccaagagcgcctggatccatccgacagccgcgggtgcgtggtcgtgcggcaagtgagcgatttggtgaacagacactcccttctgtaggtaagaatatctcggggggcgaattaattgaagaagcaccgtcatccctcggtcttagcagtgtcgcctctctcttcccgggtttggagagctgggggcgggttcctggctctgcgggcctgggctacac

SEQ ID NO: 25625 - DNA, 2300 bp, Homo sapien
tttacatttcaaagttgttttctactttctctagtgacttttcttttgacacattgttgttgttgttgttgttttttcctttgagatggagtctctgttggccaggttagagggcagtagcgtgatctcggctcgccgtaacttctgcttcctgggctcatgcgattctcctgcctcagcctcccaagtagctgggattacaggcatggactaccacacccggctaatatttgtatttttagtagagacagggtttcactatgttggccagtctggtctcgaactcctgacctcaggcagtccacccacctcggcctcccaaaatgctaggattacaggcatgagccaccactcctggccagacacattggttatttaggaatatgtggtttcctttctgtctgttactgatttctgatttaattccattgtggtttgaatgtatactttatgtgatttcagtcggtttacatttactgagacttgttccataacctaccatatgctttatcctagagaacattccatgtgcaactattctgttgatgttggatagagtagtccttcgatgcctgctaagtctatttggcttatagtgttgttcaagtcttctattttcttgtggatcttctgcctaaattttattaattagtgaaaatgtggtaccaaagctgtcaacttttattgttaaatttcctattctgctgggcacggtggctcatgcctgtaatgaggtcaggagttcagcctgggcaacatggtgaaaccacgtctctactaaaaatacaaaaattcgctgggcgtggtggcacgtgcctgtagtcccagctactcaggaggctgaggcaggcgaatcgcttgaacccaggaggcggaggttgtagtgagccgagatggtgccactgcactccagcctgggcaacaagagcaaaattctgtctcaaaagaaattataataataaaataaaataaaatttcctattcttcccttcaattctgtcagtttttgctttctgtagtttggggtgctactgttaggtatatatatggttataggttttacatcttcccaatgggttaattttgtgttaccatgaaagtccctttttatttccggtaacattaaaaaaaaatctattttgtctgatataggcatcaccaactccagttctcttttgtttactgtttggtatacctttcttttgatccttttactttcaacctatttgggtctagtggagagttcttatactgccttaggttagggattcatattacattatcatcattagtactgttatttgacatttgctgtgctgactagctactgctgataggttttctttcctcaacaattctgaggctctatattgagttatattagtacatcatcatggagagttaaaggtaggtaaggattattttctgaactgcaatattgattaaagccatgtgaatgtataagattcttagaagagttgacattaaatcaaggtgaagctgaggtttgagccttacttaaaggctgatattttccactctaactgcggacagtactgtagcactgttatagtacctgctctgaatgttagtctagcaactcagggtcttcttcatgacagctgaacctcaaccatgtgatggtaaatgtgtagcagagtatgcctggcatcccacctgctcctcctccccctcctccttgactggttctggaaagcaaatagggtgtaacaataggagttctggaatgttcctgtgtggggctgacctttgtatcgctgttaatcctctattttcagacacaaaaatgattaagttaaaactggatgaaagtcttttctgggtcacagggctgagctgcttttgctctttgcaaatacaaagaatttaacaggattctccccttctcaacttcctgtcccccaccctgaccttcgcaccttcccaatatgaggaaaaagcaggaagttttccttgcgggttttttttatgatgacatgatggggccagttgatcaatggggaaaaccccatgtggcaacacgccttctgtgtacattcccaatatttgctataaatagggccatcccaggctgctgtcagaatataacagcactcccaaagaactgggtactcaacactgagcagatctgttctttgagctaaaaaccatgtgctgtaccaagagtttgctcctggctgctttgatgtcagtgctgctactccacctctgcggcgaatcagaaggtaagtgtcgctctttccgctagcacagaagaaagactattttcattttccttt

SEQ ID NO: 25626 - DNA, 2300 bp, Homo sapien
gagtgctattccgtcttgtagcctgtcttaacaatctcaaacagttgctaatttccttccttcccttcctccctccctccctccctctttctttcctttcttccttcctttgtttacaaagaaagggatggttttgggttcagagtctttggcagtatatagtaattagtatatagtaatatagtaatatatagtagtatatagtaattcaatgcctttaggtcaatatattttccatttttactgtgcatacgcatatatacaatgtattttaaaagttggctttacaatatgtagttttatcatttggtttacaactaaatatattgtgaacattttctcttctacaacagttaaaagaattgcatagcttggaggaaacataatttattaagcagtcttgttggggacattgaggtataattttttttttataaggagacttcattctttttacaacacctttgggaaaaaaattggagtccttgtctcatatagctttctatagatgacggaaacttacccttccatttagccttttaactttcttctctacacccacctaatcaccatcaagtaacccattttatgttttccaacctctctctcccatttgcttcctctttcctacccagtctccctgcatacatgcagatgaacttccattccttcagccctctgtttcctccccttaaagaggctttctttccatttaaagagactattttaattgatttttatcaactctactcaaaactgtatcctaaggtccacattaggattggtctttaataatctgaagataatattcaattgtttaaaagaacttttaagaagaccttggtagaattacatgtatcaagaaacatgacttaggcacaatggagatatggctgactttcttttgaaaaaagaagtagtttttgtggggagggcagggcaaagaggtaagaagtatttggtactacaaggaaatgttagagaccattttggaaatgtattcattattttaaggcaactaacaaatgatcatctttcagttaggacattatagcagcagcctttactggtcatgaaatttgaatgatatctaaaatcatatttctggaaataggtcaatgtcaattaatagtaactttgtatagaaaggcagatgccagctagcatataaaagtggtgcatgcagacggtggtagttctggagtcctgggagccatgaggtgctcatccatcacaaggccatcacagccaggtagaaatgcctgaggaaagcagcggagctgcccgtgccagcatttacacatggaacacttcttgggcagccgggtgtcatggggcacagacccacaattctctttgcgtacaccgtgctcacagttccatccatagaaggaggggaggcaggcacaaaaggaccccagcatgcaggttcccccattcaggcagcaggttctgtttggctccttactgtcctgtatccccatggggggcacaagctgggaagaccgaggacgaattgcaggctcctcctggggctgaatgctgtcatctctgaaggccaggtctccctgagatggacgcacaagttcccgatggctcagcctttaacaagcaattcaacgcctttaaaaaattgcctttacttttacagttactggctgtttactgaaaatttcatataattttaaatttagaaataaaaacttcacagatggaattaaatttcatataattttcagtaaacagccagtaactgtaaaagtaaaggtaatttttaagattacattttactaagtgaagtaaaataagtgagtcaatctagagacattttaagaacttaaaacttaggtatggatctctggaagaggtaaggagagatatggctcatagttgcgcagataacacaggaatgactcaagtttgagaaattccagttgaggccaaattccttaaaggaaattgacaagctggttggctgactctgtctctccgcaggctttctcatggaaacgtggcaggcaaacaacgatgctggcaagaaattggacaagccgcatgaaggcctggagagttttaagcccaggttgagagcacaggtgtaggctttctggtgtaggttccgacgcacctgccttccattcccgcctatccatttaggctgcgacctctggtagttctccactttctctaattctgagttacttcatccttaagaagtggtgcataactcacaccttgttaggattgtatgagtatgtgtgcatacaccgtttaaagcaatgtagggcacagagtcagga

SEQ ID NO: 25627 - DNA, 2300 bp, Homo sapien
cccacctaatcaccatcaagtaacccattttatgttttccaacctctctctcccatttgcttcctctttcctacccagtctccctgcatacatgcagatgaacttccattccttcagccctctgtttcctccccttaaagaggctttctttccatttaaagagactattttaattgatttttatcaactctactcaaaactgtatcctaaggtccacattaggattggtctttaataatctgaagataatattcaattgtttaaaagaacttttaagaagaccttggtagaattacatgtatcaagaaacatgacttaggcacaatggagatatggctgactttcttttgaaaaaagaagtagtttttgtggggagggcagggcaaagaggtaagaagtatttggtactacaaggaaatgttagagaccattttggaaatgtattcattattttaaggcaactaacaaatgatcatctttcagttaggacattatagcagcagcctttactggtcatgaaatttgaatgatatctaaaatcatatttctggaaataggtcaatgtcaattaatagtaactttgtatagaaaggcagatgccagctagcatataaaagtggtgcatgcagacggtggtagttctggagtcctgggagccatgaggtgctcatccatcacaaggccatcacagccaggtagaaatgcctgaggaaagcagcggagctgcccgtgccagcatttacacatggaacacttcttgggcagccgggtgtcatggggcacagacccacaattctctttgcgtacaccgtgctcacagttccatccatagaaggaggggaggcaggcacaaaaggaccccagcatgcaggttcccccattcaggcagcaggttctgtttggctccttactgtcctgtatccccatggggggcacaagctgggaagaccgaggacgaattgcaggctcctcctggggctgaatgctgtcatctctgaaggccaggtctccctgagatggacgcacaagttcccgatggctcagcctttaacaagcaattcaacgcctttaaaaaattgcctttacttttacagttactggctgtttactgaaaatttcatataattttaaatttagaaataaaaacttcacagatggaattaaatttcatataattttcagtaaacagccagtaactgtaaaagtaaaggtaatttttaagattacattttactaagtgaagtaaaataagtgagtcaatctagagacattttaagaacttaaaacttaggtatggatctctggaagaggtaaggagagatatggctcatagttgcgcagataacacaggaatgactcaagtttgagaaattccagttgaggccaaattccttaaaggaaattgacaagctggttggctgactctgtctctccgcaggctttctcatggaaacgtggcaggcaaacaacgatgctggcaagaaattggacaagccgcatgaaggcctggagagttttaagcccaggttgagagcacaggtgtaggctttctggtgtaggttccgacgcacctgccttccattcccgcctatccatttaggctgcgacctctggtagttctccactttctctaattctgagttacttcatccttaagaagtggtgcataactcacaccttgttaggattgtatgagtatgtgtgcatacaccgtttaaagcaatgtagggcacagagtcaggaaatgcaaaatattaagttgaggtcatttttcttttgggaggacaaggacagggcacgggctggggccctagagtagtaattagcgatgggcttttcctcccagccttccttttgggaaacgcagtgtgctaaaaaagtgcatgcagcccaggctgtggcctaggccgtcggttcccggccatgcctagctcctctgaggtcgcccttagtgaggacacgaggtgccctcacctctttcactctagacacctccagaacactcgccccccgcgcgccggagccccgggtcgccaccaaccgcccgcggagccagacctcccagctctgcgccccaggaccgcgcggtgcaacctgcgcatgcgcacccgcgtcccgctgctgtttagccgtttccaaggctacgaagcccatcggccggggataagagagcaagaaaatgaagctcaagagcctcctgctccggtattacccgccaggtacgcaccagcccggccccgtcatccccacgtgggaccctgggctcccagactgggagggtttggggcggaggagggcgc

SEQ ID NO: 25628 - DNA, 2300 bp, Homo sapien
ggccagtgccgtggctgtctgtggtctgggtgaaagagaagaggtgacatgctcagtggctccaagtggtagcctcccgcctgcagctgaggcttctgaagccatgcccccactttgtggtttagcaagcatggagcttggcaaggaagccattgccaagggattgctcaaggaggctgctctggttttaacaaggcctaatacctacagcagcattggagactttctggactccatgaacaggagaatcatggaaactgcttcaaagtctcagaccctgtgctcagaaaatgtcgtcaggaatgaactggcacataccctgtccaatgttatcctgaggcattccattgatgaagttcaccacaaaaatatgataatcgaccccaatgacaacaggcattcatctgaaattctggacaccttaatggaaagtacaaatcaactgcttttagatgtgatatgcttcacgttcaagaagatgagtcatattgtacggcttggtgaatgtcctgctgtcctttctaaggagaccatcagaaggagggagacagaaccaagctgccagccatctgatccgggtgctagtcaagcttggacaaaagccactgaatcctccagcagctctccacttagcaattcacacaacacgagtcttgtcatcaacaatcttgtggatggcatgtattcaaaacaagacaagggtggagtgaggccaggcctcttcaagaaccccacgctgcagtcacaattatcacgtagtcacagagtgcccgattcttcaactgctacaacatcctccaaggaaatatatctgaaaggaatagcaggagaggatacaaaaagccctcatcacagtgagaatgaatgcagagcctcttccgaaggacaaaggtccccaacggtcagccagtccagaagtggttcccaggaggctgaggagagtatccacccaaacacccaagaaaagtacaactgtgccacatctcgcatcaacgaagttcaagtcaacctgtccttgttaggggatgacctgctgcttcctgctcaatccacgcttcaaacaaagcatccagacatctactgcattacagactttgcggaagaattagcagacacggtcgtctccatggcaactgaaattgcagcgatttgccttgacaactccagtggaaaacaaccctggttttgtgcatggaaaagagggagtgagtttctgatgacacccaacgtaccctgccgatccttgaagaggaagaaagagagccaggggagcgggaccgctgtgaggaaacacaagcctccccggctcagtgagatcaagaggaagacggacgagcaccctgagcttaaagaaaagctgatgaacagggttgtggatgagtccatgaaccttgaagatgtcccagattctgtcaatctttttgccaatgaagtggcagccaagatcatgaacctaacggagttctctatggtggacggcatgtggcaggcgcagggctatccccggaatcggttactgagtggcgacaggtggagccggctgaaggcctccagctgcgaaagcattcctgaggaagactccgaggccagggcctatgtcaacagcctgggcttaatgagcacgctgagccagccggtcagcagggccagctctgtctccaagcagtcgagctgtgagagcatcaccgatgagttttccaggttcatggtgaaccagatggaaaatgaagggagaggatttgagttactgctggattactatgctggcaagaacgccagcagcattctgaactcagccatgcaacaggcgtgccggaaaagtgaccacctcagtgtgaggcctagctgtccctctaagcagtccagcacagagagcatcactgaggagttctacaggtacatgctgagggacatcgaaagagacagcagagaaagtgcctcctccagacggagcagccaggattggacagccggcctgctgtctccttctctgcgatccccagtgtgccacagacagtcgtccatgccagacagcagatccccatgctccaggctgacagtgaatgtgcccatcaaagccaactctttagatggctttgctcagaactgcccacaagatttcctaagcgtgcagccggtcagtagcgcgtcctcatccggtctctgcaaatctgactcttgcttgtatcggagaggtgggactgaccacatcaccaacatgttaattcatgaaacgtgggctagctccattgaggctctcatgcgcaagaacaaaatcattgtggatgatgcagaggaag

SEQ ID NO: 25629 - DNA, 2300 bp, Homo sapien
acaaggaaaagtggctttatgctttggaagacaaatacatcaacaaatatcccacaccattgattaaaacagaacgatctccagaaaacctaacaaagaacacagccttgcagagtctagatccctcagccaagccatcacagtggaaaagagaagctgtggggaatgggagacaagccacacattattatcattcagaagcttttaaaggtcaaatggaaaaatcacaggcactgtatattccaaaagatgcttatttctccatgatggataaagatgtaccttctgcatgtgctgtggcagagcagagaagcaacctaaacccaggagaccatgaagacacaagaaacgctctccctcctagacaagatggagaagtcaccactggcaagtatgctacaaatttagcagaatccgtgctgcaggatgcatttattagattatctcaatctcagtccacattaccccaggaatctgcagtcagtgtttctgtaggaagttctctgcttcccagttgctattccacaaaagatacagtggtttctcggtcatggaatgagctccccaaaatcgtcgttgttcagagtccagatggcagtgatgctgccccacagccaggcatctcctcctggcctgagatggaagtctctgttgaaacctcaagcatcctctctggagagaactccagcagacaaccccagagtgctctagaagtggcgttagcttgtgcagccactgtgattggaactatttccagtccacaggccacagaaagactcaaaatggagcaagtggtctcgaactttcccccagggagcagtggtgcactgcaaactcaagcaccccaaggactcaaggaaccttccatcaatgagtactcctttccatctgctttgtgtggcatgactcaggtggccagtgccgtggctgtctgtggtctgggtgaaagagaagaggtgacatgctcagtggctccaagtggtagcctcccgcctgcagctgaggcttctgaagccatgcccccactttgtggtttagcaagcatggagcttggcaaggaagccattgccaagggattgctcaaggaggctgctctggttttaacaaggcctaatacctacagcagcattggagactttctggactccatgaacaggagaatcatggaaactgcttcaaagtctcagaccctgtgctcagaaaatgtcgtcaggaatgaactggcacataccctgtccaatgttatcctgaggcattccattgatgaagttcaccacaaaaatatgataatcgaccccaatgacaacaggcattcatctgaaattctggacaccttaatggaaagtacaaatcaactgcttttagatgtgatatgcttcacgttcaagaagatgagtcatattgtacggcttggtgaatgtcctgctgtcctttctaaggagaccatcagaaggagggagacagaaccaagctgccagccatctgatccgggtgctagtcaagcttggacaaaagccactgaatcctccagcagctctccacttagcaattcacacaacacgagtcttgtcatcaacaatcttgtggatggcatgtattcaaaacaagacaagggtggagtgaggccaggcctcttcaagaaccccacgctgcagtcacaattatcacgtagtcacagagtgcccgattcttcaactgctacaacatcctccaaggaaatatatctgaaaggaatagcaggagaggatacaaaaagccctcatcacagtgagaatgaatgcagagcctcttccgaaggacaaaggtccccaacggtcagccagtccagaagtggttcccaggaggctgaggagagtatccacccaaacacccaagaaaagtacaactgtgccacatctcgcatcaacgaagttcaagtcaacctgtccttgttaggggatgacctgctgcttcctgctcaatccacgcttcaaacaaagcatccagacatctactgcattacagactttgcggaagaattagcagacacggtcgtctccatggcaactgaaattgcagcgatttgccttgacaactccagtggaaaacaaccctggttttgtgcatggaaaagagggagtgagtttctgatgacacccaacgtaccctgccgatccttgaagaggaagaaagagagccaggggagcgggaccgctgtgaggaaacacaagcctccccggctcagtgagatcaagaggaagacggacgagcaccctgagcttaaagaaaagctgatgaacagggttgtggatgagtccatg

SEQ ID NO: 25630 - DNA, 2300 bp, Homo sapien
tggtttttgactctccacaacaattcctctgacactgcttcagtgtagagtggaagtggggcggggcgggggggggggggtgccgattactgctctgtggatgtgaaagtacaagctccactgataccaaggtgaagaagcggtgctgctactccttgttaggattaaaagtcctggatcccatggaaccagcccaaatgcccatcaatcaacgagtggataaagaaattctgctatacatatatatgatggaatactactcagtcataaaaaggaatgaattaatggcatttttagcaatttggatggaacacgagactattattctttgtgaagtaactcaggaatggaaaaccaaacatatgttctcgctcgtaagtgggagctaagctgtgaggatgcaaaggcataagaatgctacaatagactttggggactcaggggaaagtgtgggaagggggtaagtgataaaagactgcaaattgggttcagggtatactgctcaggtaatgggtgcaccaaaacctcacaaatcaccactaaagaacttaagtaaccaaataccacctgctccccaaaaatctatggaaataaaaaatattttttaaaaagtcctggctccctactttgccttaatgccacctgtatgtgtggaatgggaaggggacttcattatttctgtgtggatgtggaagttcaagctcttcttggcaccatgacgggggaaacgagacatgaagaggtgagtgcggccagtgtttggaggggatgaaagtcctggtccctacttagtctcctctgacaccacctcgcccaggggactgacttacatccttagagcctacagatggtgaaatgtaggctccctacttggcctttgatggtgtagttgaaaaaggtccacaggttttttctcatggtgtttggccacagtggagctattattgtgtgtaaattttccatcttgctaagctgcctctctcctgatcctttggctagaaagaggagtcctttgtcaaggcttttcctgtctctgccccttgacatttccgggttgtcatcttcttcagccaaagtctgggagaacctcaggaacccatcatcatgccaagccttgagtcccaggatctctagctggtctgcattcttctgtccacctttttctcatgcctgtttcagagataatatccgggggatttcgttgtacttactaggaggaatagctaaaagtacattggctcaaccttcccatttgtggaagtcccaaattttatttttaatttgttttttaattggaaaaagaagcagattcaacagcgccctcattttagcagatatttgctactatcagtgtctttcttcttaagaaaactgtcctttttgctcagggagatacccagccgtcaactggggaagtttgtgacagctctccctcccaggttctgagtgctgtcctcggatggatggccgctctcataggttttgagatttctatgtgcgcacacggttctaacagaagagagagaagactaagtcacagttaagcaaaatgagttaaagaaacgtgaaaaccaaaaccaagagagaaagtccaaataaagggaaaagacttaggaggtcaaagccagcatcgttctgagtgatcgaccataacatggtagaccacaaacaaaaatgaaatcgacacaggaagccagaggagtggcgcgcaaccagtggggagtgtcggcattgccaggagtgagggcgtgaatgtgggaaagtgcgtgaacaacttcagggctcagacctactgtacgccagcgagaaagggaggggagacgatggtggttggggagagaggaattttgtcggagtcacctatgcttctgggcacgaatgagcgatagagcaggatcctcgagcaactgagactggggcccgcctgcaggaggcaggagccaggcagaaaggtgggagcgttggccacgcgctcctgcaagatcagagaggacggcgggaggggacagcgggcggtcgcagcgcacagagcttgctggccagggaggagctagtctccgtgggcgccgccgccgccccagcctgcgcgcctctctcctggcgcgcgccagtctggcactctgggagctgggtcctagcaccacagacttatccttcgcctgcactttccgtctttcttctctgggcgcccaccaacaatggatggcaactccctgctctcggtaccaaggtaagacccgcttctttctatgcccaataccatgtcgatcaaactccgttccgcgttgtgagtcgctcac

SEQ ID NO: 25631 - DNA, 2300 bp, Homo sapien
tttaggttttatttgtcttctctgttttggctcaatgtctctaattcctcttcatttttcaaagttaagttcaagacataacctttcatgaagcgctggctactctggtcaacatgctggcctttccccacagctttgatcatctttggcatatggtgttcaacacatttatcagggattatacattattttctgggtattttctgtacgtcttagccttccaagtcatatgcttcttgagactaaggatatttttgtgcctatcctaacatgatgcattgttgtaaataataaatgtttgttgattgactggctaaaaacaattctgtaaaaataactgagacacatgctggtagtagaggtttcctcgttgtataataactatagaaaatctagcacaaggctgggtgtggtggctcacacctgtaatcccagaactttgggaggctgaggtgagtggatcacctgaggtcaggagttccagaccaacctggccaacatggtgaagcccaatctctactaaaaatacaaaaattagtcaggcgtggtggtgggtgcctgtaatcccagctacctgggagactgaggcaagagaatcgcttgaacccgggaggtggaggttgcagtgagccaagatcgctccactgcactccagcctgggtgatagagtgagactccatttcaaaaaaaaaaaaaaaaaaatctagcacactgactactttcagttacctggatttcaagacccttcatttctatacctcttttttcatcttggtctcccagccccatccccaccctgcccatgtacatctagaactattaagtagttcaaaagaccttatgatgacatgccagctggcctttagcttctaaatgttctcatattacaaaatatattattcctatcctgttgttctctttgcacatctaaaacctctccagctttgaacaagtaatccaatttgaataattcatattatattatgaaagacgtaaggcaattttaaccattctgattttttattttctaacaaagatcttatttaaaaaaattaaactaaggaatttatgtgatttatgaaaacatccgctgccttctcctcttgcgctttctgctaataagagtctcttggcacttcccattgaacagtttacagctctgctttattgagaaatggaacacacacttgttcacttgttttagtggccatactatgatatggaaaagcagacttgagaaacacatcctccagtctcaactcggagtgactttctgttgctttagtttgcatttcatatctcatatactttcttcggcagtttctttcctataagtgtgaatacacacacacatacacatgcatgtaaatatatatatatatatatatatatatatatatatatttatgtgtgtgtgtgtatatatattcatttttggtcagtcaacaaacattattaacaacaatgcatcatattggaatgtgtgtatatatatatatgtatgtatacatacatagcacacacatgcatacacacacacacacaaattgatgtgattttgttgagtggagatgggtgaggttggaaaagggagaggaacgttaggtgacattatcttcctatctctgatttccttctctgcatacgtggttgaggagtgctatagtttaaatgtgtcccctccaaaattcagatgttgaaacttaatggccaaagtgatgaccttaagagagacttttttttttttttttttttttttttgagatggagtcttgctttgtcacccaggctagagtacagtggcacgatctcggctcactgcaggctctgcctcacaggttcaggccattctcctgcctcaacctcccgagtagctgggactacaggtgcccgtcaccacacccagctaatttttatttttttgtgtgtttttagtagagatggggtttcactgtgttagccaggatggtcttgatctcctgacttcatgatctgactgtctcggcctcccagagtgctgggattacaggcgtgagccactgcacccggccaagagggacctttaagaggtggttaagtcatcagggctcctcccctcttgaatggaatgaaaagccttgtacaagaggcttcgtgccatgttcagcctgccccttagccttccactgtgtgaggacacagcattccttccttccaagtgctgcagctctcacaagacaatcaaacaagcccgcaccttgatcatgatcttcctagcctccggaacggtgagaaaatcaatttctgtttttttttataaa

SEQ ID NO: 25632 - DNA, 2300 bp, Homo sapien
catttttctggatgatgtaacaattctccagagactacagataacttttgcttgagttcattaactacacatcttccatctcacctttttctctgcagatgaagccccagcttgttcaggcagcagatggtcataccttggcctgagggtgggtgttctagcccagccatgataataatctcatactggtccaaggattgtcagagaccagtttttaaccattgggatatgagaggatatctactaaagatactttaccttcatgaataacaaataaagcttcttggggaaatagccttttcctccttttctgtcttcttgctgtcctgagcatagatgtgatgtctagcattgcagcagccatattgtgattctgcagcaatacatgacaagccttaaaaccagtccactaagaaggctagcatgataagatggaaggacttggatcagtaagcagcacctgaacctacctcctaacaaaagttatatgagaaaaatgtgaccccctttcatttgtttatgcccatatgtgaattgggacttctgttacatgtatctttgacattcctaaccaacacagctactaagggaccaaaattcagattcaaacccaagcctccatatgttattcattgttgaaggttgaattgtgttcccctaaaagatgtgttgaagtcttaacccctggtacctgtgaatgtagctttatttggaaataaggtttgtgcagatgtaagcaagttaagatgaggtcatattgaattagggtgaaccctagagccaatgactaatgtccttataaggagagatttgcagacacagaagcggcacagagaaggccattgtgaagatcaaggcagaaaccggagttatggcatcataagccaaggaatgccaaggattgctggcaaccacctgatgttagaagagtcgaggacatgttcttctccagagcttttggatggtgtgtggccctgccaacctttacattttggacttccagcctccgaaatggtgagagattaaatttctgttgttttaagctacccagtttatggttatttgttacaacagccctaggtagctactacaccagtgaaaccatatagcctcttgactatgtttggtcactctacttctgtgatgtaggtatccccaactttcacatactgcgacacaatgcatgtgtctataaggaatcctttttttaataccgagtgtgagtttatctactgtggattaaaaaaaaaatgaaaacagcaaacaactaagctattgcttctttctcctttatttccttctggtggacaacatcctaggaaaaggcagcaaaccttgagtgtaacatgtgctgtgttgctcagggaaggtcctctggaaaatatggtacatgagcttcaggcctgaagatggttcgctttggagatgaaacttatgggctggaatgtgaaacacagttactttgaggtggacctcagtgaaacttttccagacaggctgagaccaagggaagactagtattaaggattttatcctcaaaacaaactaggttgtcagagtccctgtaggctctctgggtagcagcctctgtgatttgcctcttcctgactaggaaaacctgtaagctgacaaagaagtatatttaaattgacctccaggtgagcctcatggtatgtcaggttgattatttgtacctggtttggtgttttgttttgttttttacttgataactgtataaattattttagtgaagagcctgttcttattctggaactcactttgaagacaaaaaaaaaaaaagtcagccatgtcataatacttattttcttgggcaagcttgtctttttttgatacagccaggaaggcacaaatgtttccagtccctctgagacgaaggcagggagcctgtccaactgcagaactgctctgtcagtgtctctttctgagagtgaagagtcattctggtcttaaaatgctgttttgcttttcattctcttctctagaaggaatatcccctgtgtccatgggagcaggaggggaatggacagttaccaggggaaaggagctgcataattgttagatccatcctaatcctttcatgacaaacctttcctcagagttgctttatagttgtgggtctgagaataaattcacagattcacccactgcatgctttgatggtttcacgtcaggaatgggcctacttttcctcaggtgagagcggaatcctgctgtacaagccacctgtaatgtgggcagtggcaactgctgtttcctttccaagtcttctgaggttgttt

SEQ ID NO: 25633 - DNA, 2300 bp, Homo sapien
tttatatgcatgtctggattttctagatttttgtaatgaattgcatttctttctactttgggatttgataaaagagaactgggggctgggaaggtcataaggaattttgtaggtgtggaggtgtgcaggaggagttaccggaaaagcaaacagagaccatatcaccaagcatgtgaggcacatgtctgtgcgggctgacaggcaaacacctcatgaaaagagatttattaataagttcagaacaagtagcaggaactggagaaggagctgagaaggttcaggtggttatcaggcaggagtgggagggtcctgtggatatccagggagacagagacaagctcttcagaggcagctctgtggctttgccagaggctcctagaggcactgagggtcctgggcttgccaaggctggtggcaccaacatagcaaccgcagggtccagaaggatctgcctggaatcctggatctgaatcgccattgtaactccccacagtgtgactctgtgaaccctgtgctccccaagccttgggagataggggcttctgtcccacggagagttgctgcgagggtccgatgagctgagggttagattctggagtggttccatatctggaaatcattgtagtcatgcagaacaaggaaaatggacagatcctccttccagacatggagtgtggattttgacattgcatgagtagctcacggcccaagctgtgcagctgtctcagtatgaaatgcctctctttcacacccctctgctctcaggaccctgccttgtaggagcctagggctccccacaaacattgtgttctctctgctcctctctttggtcattctatgtcctgagttcttcccaccatgttctcctctcccactcttcatcagctcgagaatcagcttagtatccctgacttgccaagtgcctttaacccccagccctagacggatgctctttccactgggtttccatggtcagttagaggcgcagggccacatctcctgccctgaagtcatctgactgtgcactctctaagccactcactggctgtgtgacctggacaagtgacctaaaccttataagcctcatttgtttgatccacatggtgaaaatattaatagttattttgccgagttgtcaagagaatgggaagggctggcctgtttaggacaggaagtcatctcatggtggccggcactagccggggagcctccaggcctgcgagcccagagcggctttcccttgggttctgagagcctcctgctgcacctggcagatctcaggatgagttagtgattcgggagtctgcatggccctcctcacccctgtataggttaggagtcgagtcctctccccatcatgaagcatggcctcttcgtggccaatccctctcatctctcaggtcttactccaggcattccccagggcccttgtctaagaagctctcctctccccttcttcccacatctgccctgttttatcaccacccgatatagcaccggcttgttgatgtgtttgctcagtcacgactctctctccaaagcagaaggtaagctccagagagaaggaacattctcttgtcttctattctgcgtcgctgcatcctcagaacccagcataggggctggagcctaatagatgctcagttaactggagtgggaagaatgaatggaagtgtctccctagcacagcgccaggcacagcacaggcacttcagagatgcctgttatatggaaacccgggacccccggggctacggtttccttattttaggaatttcccccacccccgccacccccgacatccccgctgcccccaccacccccggctccaggcccttcccccctcagccagtctgtcccttttcccagaccccaacccaatgggggcttcctgcagggaagggccggctgttctagcctccccattcacccctcactaggatttagagtcggccgcgctgcactcccgccccgcgcggcccctgggcgcccgccccgggcatgctcagagcgcgcaggtccgggcggcggcggcgggggaggagggagcggccgcccccgccgccgccgcgcgctcgccgggcccgggcggagctgcgcagtcctctcgcagctgcgccaggacagccggcgcgcggccgtgcccacaagttgccggcagctgagcgccgcgcctcctcctgctcgcagccccctacgcccacccggcggcggtggccagcgccaggacgcacatcccgcggacaccgaccccagatgtaaagcgggaccccagcccctcgccccccggcgcgatcgac

SEQ ID NO: 25634 - DNA, 2300 bp, Homo sapien
tccctggctacccctatttccccggatccttttcctgaatttggtgtgtttctttccatgcatcttggtatacttttactgtatgtatacatatgcgtaacagcgtttcttaatgcttcatagatttcaatatttatataagtataaataacgttgagaaaaaagcagtttgccaaaaaaattctccatatattctggcagctaagcatttgctggttttatgcattataaatttcattttcaagcctgtgtcttgtctactgtctttttttatggtagctatgtacatataatttaaaatcgggtaaagttaaattgattgttctttatggttattattttgcccttgtttaataaatcccctatctttagatcaatgaaatagccccctatattttccacttgaagttttaaaggtttttttgtttgtttgttttttatatattttttattatactttaagttgtgggttacatgtgcagaacgtgcagtttggttacataggtatacacatgccctggtggtttgctgcacccatcaacccaccacctacattaggtatttctcctaatgctgtccctcccctactcacccccgcccctgacaggccccagtgtgtgatgttcccctccctgtgtccatgtgtcctcattgttcaactctcacctataagtgagaacatgtggtgtttggttttctgatcttgtgatagtttgctgagaatgatggtttccagcttcatccatgtccctgcaaaggacatgaactcatccttttttatggctgcatggtattccacggtgtatatgtgtcacattttcttaatccagtctatcattgatggacatttggtttggttccaagtctttgctattgtgaatagtgccactttaaaggttttaattcgtatttagctctttaagccatctagatttacttttgtatagtgtgaggtgtgagggatccaaacctactctttttcctgataatggaactcatttcagttgccctagaatcaattcttttctctctcttttccccactgactcctagtagtccccttggtcttacaaatcttttgttgtaaaactatctatgaatgtggctttgtaatgatgaggctttttaacttttactcttgacagagctgaggaaactttttaaaatcatattcattaatttcgatattttgttttaaaattaaaaattagatacaaatgaatgttcatattagaaaaaaatgctcacttagtgaaaataatttaatccttgatgcaaaaatacttataatatttatttctcctttccagttagaggctatatttattcatcaatttattccatatttattgctacctactatgtatgaatagctgctctaggacataaagatcattcaatgacaaatacggtgtgtcaatgatactgcaatccatattcaactatgattagtcccattttattagatggctaaaactgtatggcttaacttgatactgtggagtcagattggtgatcaagtaagatgcatatcttatcaatgatcaataaacccaacagagaatttgtacccatgctgcatgcctactccaaggggaccgagactagggcaggtgataactgggtggggcctttgaggatttccagcatttgtgactccaaagtagccaggaggaggaggacttgggtaatgcaggtaagctgctccctggtagaagactggggttccaaagcagaaactgaattctaagacgccagcacagggatgggattgagagacaaagcagcccccagagggcaagggcgggagcaaagcgaaaggatctgaggtggttgctcaagtgcctggtgctgattttgcttggccttaggtgtttcttatgaggcttgggaggaccagcctgccctaaagtcctgaggtctcagtggatggtggccatgtgctttattcccttgcctcactgcattttgttttgtcagacttgagtgctgcctacactaaattcatagtcttgtagaaaggctgttggtaaagctttcaacacactgcctttaaagaggagacacttgacaatttccttttgcctcattttcttttaggttttgtgaatgattctgtgactaagtctattgtggctttgcgcttaactctggtggtgaaggtcagcacctgtgtgccgggggagagtcacgcaaatgacttggagtgttcaggaaaaggaaaatgcaccacgaagccgtcagaggtaaggggatgcctggtagcttgtaaatacacatatttacatgaatatttacct

SEQ ID NO: 25635 - DNA, 2300 bp, Homo sapien
tgagcgtggtaacagtaataatagttaacactttcatggcacttagtacatggatgttttgggaccaggacatgcaaatcaatatgctttttccccagcattaatcatgttgctctgcctataagctaaggtgctggaagattatagttttcctttttagcctggaaaaaatgaaaggatcttgtattgtctctgccataatatgcattttaaagattaaagactaagagaatacttttagcaaggaaaattatctgaaacatgcagtaaccagcatccagaaaataaaaccacttttaattatcctatatttcaaaataatatgaaatacacaaacaaaggggttgctcaggcaaaagtacaataaactgaaatgtgattttaattaactcacaacctttttacacttcatcttgcttcatttgtgtgtgtgtcttgatggaaggcaatgaagagcactatccactagtccaggatttaaggtaagagaagttagtttcaggaaagaacgcaactccaggggcacagaaaccacctgaatgacgacactagtaccagcagagggtgctggcgtggcacaaaattaagaattttcaagaggaagaggtcttagattgaaagacagcaggtgtgaggaaaaatgtaataactctatccacttggaggtctgaattctccgcttgcagatctgtctggggttcagtgatttcctgcaatggccacatgaattttaggtatctcctgaagcagaaaagtgtgacatttgcttctgcgtttgaacaggacagggagaagccgtgcagtttgccttctgtttccactggaggacttttagcaatccctggcgtctgtgacacctacagcagaagttcacatggagtccttactttaatttttttaaaaaacaaaacaagctatttttgtgtttactaaaaaaaaaattggcccagactgtcaatccaggggaatcacattttcttttttcatttggccaccttaaaaagaaggtaacaggtacctgggaacccacaggtaatagagattgtgaaaggtcaggtggaggagacaaggctggatgcgctttattcagcggagtgcagcctccttggcggtcgcagcaccagccagcccagccaggacgtgtagaagagcccgccccccccatcccctccgaagtaggtcacagcgaatgctccttttatgcagagtcccctgttgcgattcctgccgctagcagcgcctctgccaacctgggcttttgaactgttctttcgggcgttctgggctgggagtcaattgacccactggattcgaatccagactttctgggcctcagtttccccctaggttcaacgacaggggtggacagccttacaccaaggcctcttcccggcctcacacggcgcggccagacgttccttagtggtgcggcaaggccccgcgctctggaaagggccggcgagaatgagacagctgggtcagcaccaaggacaagggccccgggtccgcctggcggaggcgaggtcacttccaggcgaacccggctgctgagcaagcgtcgggcgcagggttccgtggccgggcgggagggcttggggtgccgggagaagcgctgtgggaaggggagcagtcccgggggatgaggcaaggccgggccccgcggcggtctcgcagattctgcgccaagaggccaaaggtggctgctgcgagcgcgccgcccctcccttgaggcgccctgccgcctcccgcgccctgccctgcccgggccttggggcgcactcggtgctcccggctctggaagcccctcaaagccccgcttccctcactcgtggacctctccagcccctttcctgccccagcgtcgcctggctccctgtaccagggctgcttctggacacacccgtgacttcgacccactcctgggggatggggtcccgcatcgtcttcctgcaacccccatcccaactccctgcggggaaagaggccccactccccgatgctccagagccggggccgccaggcgccccgccccccgctcgccccgccccgccccgccccgcaggccccgcccgccgttgcccggggaaccgcggatcccgcagctgcaggaggcgcccggcccggcggagcagccctagccgccaccgtcgctctcgcagctctcgtcgccactgccaccgccgccgccgtcactgcgtcctggctccggctcccgcgccctcccggccggccatgcagccccgccgcgcccaggcgcccggtgcgcagctgctgcccgcgctggccctgctgctgctgct

SEQ ID NO: 25636 - DNA, 2300 bp, Homo sapien
tttgttttgtttttaaagaggagactctgagactcaacttgctaggtctttaaaaaatgaaatgccaaaaatacctaatgagactctcgagaggaacataaagttaaacacatcactaaagggcctacaaaacggagtaaagcccggagatcgggtgatctggcagcccaggcaagatcgaggaccgcgactaggaaaggagacagcaggagagcagttagacgtccacttagaacggattcactgcgctattaaccgtacccgcctccccccgcaccggcccaacctttacacacaaacacattccctcccccaattaactaaagaagcaattaaactatgcccaccaccagactcgatgcttaggctaaacctcccccaaagtaaaacagcattatcaaaaaaacacaacatttgtcttaagggtttggaagctgccccttccgttatctcctcaccacgtaaggtaaccaattccctcctgtcccccaccaggagttcaaagtgtgatttccccccgatttacatgtgtttttatgtttttccgcatttttccgtctaggaaatgaaggatttcttattctgaggaagggagagacgccgaggaagacaggatttgaggttttactaccttcgttattcgaactcccctctaacttgttcctgtactagaaacccactcactatggagaaggaaggagaggggctgaactgatggacaaacgttgtaaataataggttttatgtaatccacatataaataaattaatcgcctgactcgctctgaatgctaatacgattggggtgacaattggcccacctccctcccccaagtcctagttaaacccacctaccaccaatttccattctgatctatttaaaaggatactctattcctctcagtcaagtttctcggcttctttaggcctccctgcatgcccccctcgtcatcatcctccctcagcctcaacttcccacggcttaaaaaactgccccgcgcagaccccgtctccgggctcgccctccctcaaccgtccctcgccgtccccctgggcaggaaaccccttactgcggtctaaagtctctctggcctctcccttctctgaccctcgcttcccacaactgttgtcactggagctgcttcctagtttccatttccgggccgtccacggccccggagcctcccctttcccgatttccgggcccctcgtcccatttccggggaacccttgccgtcttcacaccccccacctgcacttccggccccccactttctctcttcccagacaccctccaagctccaaagcccacttccggccccccttggtccccgccgagctccccaacacccgcaagccttaccccggttctgtgaagggccctcctcattgcgggaagccggaggagggacccagcgacccctacctcccgccaggccccggtccctccggccgcggccgccctcgagcgtctctcccgtccacccccggcccggtccttccgcggccccgccgccgccggcgccgggagcaggccaagcgggggccgaatcgcggcgatgacacaaccgggcttcctgggactttctgttccagctcctccccccgcccccccaacccctcagctggccccctcccccaaggcttgcccccgccgcccagagctgcgccccaattacctagttaggccccaaagtctccggtccggactcggtggcgcggcagtaacttccactagctccccccaccccccccagcggcgcggcggcggcggctccgggttccttcaattatcagctgagccgcagcaccgcgcccggcgtgcgcctccgcccgtgccgcctccctccccgcctgctctgacaccctcggggaactactttgtcctcgggctccggttacgggctcgtccgcgggaccggcaccgctgcctactggcggcccatcacatcgcccctccctcccacgcctcccggctcgactctctcagcagcctccgatctccgcccgatcccttcgagggaccaggaaggggactgtggagatctacttggtatccctccgccggggtcaccccctcccctccgtggtagcaggaactaattccccctcgggtcacccgggacctggagctggaaatttcacggatcagggttccctaagacccttggaagaggggacgatcgccccaagttagaaatccttctgccagctcataagcgtggttcaatttaaactagggttttggccccttgaccccaaccaagccccgccccttcctggttgtcttagcgacggcgg

SEQ ID NO: 25637 - DNA, 2300 bp, Homo sapien
aatgtacaaggccgggcgcggtggctcacgcctgtaatcccagcactttgggaggccgaggcaggcggatcacgagatcaagagatcgagaccatcctggccaacatggtgaaacgaggtcgcagtgagccgagatcgcgccactgcactccagcctggcgacagagcgagactccgtctcaaaaaaaaaaaaaaaaaaaaaaaacaacaccaaaaaaaaagtacagaaaaggatacctttcagtatttcatacatcactaaatgtgcaaaaccccctaagaacagtttaattaaaaatttgagtctgaccctgggcccactgcctatgaattagccctgctccgcaaggagcagtactgttttaaaaaaaattttttttggacaggctgattttacatttgtaatatttctaaatcttaaattaaaaaatatatattaacatttatattttaaaagatgctttcaaaaatataaaaaaattaactcattacctattttgtttaagggctcctggaaaaactgagggaatgatcaatatgcacaccaaaacaaatatatacaaacttctaaatttcattttataggaatagtatctattgaaagggcagggtgcatgaataactcagtgacaggcgtaaactcagccaggattagaaacgtcttcccaatggaggccccgctcaagttgagaatttcatggacacagtaaatcatccaaaagcccaccttcaataaccaaagtaggcataaaaataggccgatggttactttggagataatataatcctcggtcttattgttgtggagcagatgtcattatgggtggggctgaagcgcagagcagctgaaacatttttataccaccacccgcacactttcaatgggatagaagggactccaaaaggtaagagctcccaatcgtcagttgctactagaaataactaagttttgatgtggccgtggcacgcgtaaaggccacaaagagatttataaaattctccatgattaattcctatcctggaaaagaggcaatctccttttcccctccctagccggctcctccttgggacacttggctgagtcgttctttccctccttctcacgctgaggtgaggccgcacgcaagccggagacgcccgttttcctcttcgcgcggaggaaactctacgggtaagaagccggggtggcgggaaaggagcacgcggcaccgcggggaggcagagaaggcttgccagggactagccgggctcggggagagcagggacacgcgggccgtcggaccgaggaggccgaggtgacgaggaaaatctcccggcgcggagccgggactgggcgcttccggcgggctacggttgctcttggcctagcacagcctgcgtcccgggccccaaccgggccaggtagggagttaggagagagggtaaaccgcggctcgcacttgcctgagaccgggtgaccagtaactggtaatagtctttgctaggcggcgggccttgtcctacagtttcaaagagagtctccggcagccacgacgccatcttgggacgccaccgccgtcgctaagacaaccaggaaggggcggggcttggttggggtcaaggggccaaaaccctagtttaaattgaaccacgcttatgagctggcagaaggatttctaacttggggcgatcgtcccctcttccaagggtcttagggaaccctgatccgtgaaatttccagctccaggtcccgggtgacccgagggggaattagttcctgctaccacggaggggagggggtgaccccggcggagggataccaagtagatctccacagtccccttcctggtccctcgaagggatcgggcggagatcggaggctgctgagagagtcgagccgggaggcgtgggagggaggggcgatgtgatgggccgccagtaggcagcggtgccggtcccgcggacgagcccgtaaccggagcccgaggacaaagtagttccccgagggtgtcagagcaggcggggagggaggcggcacgggcggaggcgcacgccgggcgcggtgctgcggctcagctgataattgaaggaacccggagccgccgccgccgcgccgctggggggggtggggggagctagtggaagttactgccgcgccaccgagtccggaccggagactttggggcctaactaggtaattggggcgcagctctgggcggcgggggcaagccttgggggagggggccagctgaggggttgggggggcggggggaggagctggaacagaaagtcccaggaagcccggttgtgtcatcgccgcg

SEQ ID NO: 25638 - DNA, 2300 bp, Homo sapien
tcagtaaatgttagctaataggtaaatatggttatatatataaaacatacgagctgaagtatgtatcttttgacaggaggagaaggtgaacataataacctactgtccatataaatctgcaagttgcttcttgtaatatatatctatacacatacacacataaagcacttctgtatcctttgaagcatagtttaaaaaccattgattgaaggacctgataacagttctctttttcccttattatacataatacatttttgatatttctattttagtcgtaattgacaatggtaaatatttgtggagtcaaatgtgatgttctgatacatgtatatattgtagaatgattgaataaggctaattgacatatccatcacctcacatacttgtgatgagaacatttaaaatctacatttagcaatttgaaaaatatagaatacattagtactaactacagtcaccatattgtacaacagatcactagaacatattcctctggttaaaacagttctttaaaaatgtcagatgttggccaggagcagtggctcccacctgtaatccgagcactttgagaggccaaagcaggtgaattgcgtgagcccaggagtttgagaccagcttgggcaacatggtgaaaccacgtgtctacaaaaaaaatacaaaaattagccacacacggtgatagtcccagttacttgggagactgaggtgagaggatcatctgagcctggggagttcgaggacgcaatgagctgtgatcgcaccattgcattccagcctgggcaacagagtgagtccctgtctcaaaaaaaaaaaaaaaaaaaaaagaagtcagatattttccctgagtacattagaaactcttccctataatagtcccgtgaatagggctagcagtgggatttttgtgttataggcgaggaaataaacactccttttgctgagactaaagagccaggttggggtctctggacacatagtgcaatcaagggaggcttaagacagcagaggccctcagagaagacgttcattctcccagctacttgctaagcacgtgccatgtgatctgggcagtcctgggcacaccagtggtgaaaatacatggtcctgcctgcctgcctggagcttctatttttctgatgggagaatgctgctccattttgttattggaggaacttgtgcagcaaagcctgttggggaaaatggcgggctagaaacctgcttgggtggatggtctttctgctgcttatccctgggagctgctttttaaataatcagtgttattgctttgttagaaataaaaagcataaatagatgctaattaaggaaatgcaggtgatctttgctgcgaattctggatatggccactgatgttgcactgtgtcttttcttccccccgtcggcctgtacaggcctgggcagcgggatggcctacctgccagcggtggtcatggtgggcaggtatttccagaagagacgcgccctcgcccagggcctcagcaccacggggaccggattcggtacgttcctaatgactgtgctgctgaagtacctgtgcgcagagtacggctggaggaatgccatgttgatccaaggtgccgtttccctaaacctgtgtgtttgtggggcgctcatgaggcccctctctcctggtaaaaacccaaacgacccaggagagaaagatgtgcgtggcctgccagcgcactccacagaatctgtgaagtcaactggacagcagggaagaacagaagagaaggatggtgggctcgggaacgaggagaccctctgcgacctgcaagcccaggagtgccccgatcaggccgggcacaggaagaacatgtgtgccctccggattctgaagactgtcagctggctcaccatgagagtcaggaagggcttcgaggactggtattcgggctactttgggacagcctctctatttacaaatcgaatgtttgtagcctttattttctgggctttgtttgcatacagcagctttgtcatccccttcattcacctcccagaaatcgtcaatttgtataacttatcggagcaaaacgacgttttccctctgacgtcaattatagcaatagttcacatctttggaaaagtgatcctgggcgtcatagccgacttgccttgcattagtgtttggaatgtcttcctgttggccaacttcacccttgtcctcagtatttttattctgccgttgatgcacacgtacgctggcctggcggtcatctgtgcgctgatagggttttccagtggttatttctccctaatgcccgtagtgactgaag

SEQ ID NO: 25639 - DNA, 2300 bp, Homo sapien
tgagccactgtgcccagcctcaataatttttaaatcaagagttgatataagattagctgggcatggtggcacgctcctataaccccagctacttgggatgctgaggcaggagaattgcttgaacctgggaagcagatgttgtagtgagccaagattgccactgcactctagcctgggtgacagagtgagattccatctcaaaaaaaaaaaaaaaaaaaaagagagacagaattgatataagaaatagcaatataggccgggtgcagcggctcatgcctgtaatcccagcactttgggagggtgaggcagccagatcacttgagtccaaaaggtcaagaccagtctgggcaatataatgagactccgtctctataaaaagtcaaaaaaattagccaggcatggtggcgtgtgcctgtagtcccagctactcaggaggctgaggtgggaggatcacctgagcccaggaggttgaggctgcaatgagctgtgatcatgctactgcactccagcttgggtgaccgaggaaggcaatgtgaaatacatgtgaattttttttcaaagaaacgaaaaagaaggaagaaaagaaaaaggaaaagaagaaagaaggaaatctgtggtaggcagaataatggtctcccaaagatgtccacatcctaatccctggaacatgtgaatttgttaccttacatggcaagaggggaattaaggttgcagatggaattaaggttgctaatcagctgaccttaaaatagagagattatctggattatctcattggactcaatgtaatccccagggtccttaaaagtggacaggggtgggggcagaaaaggggagacaaggcaatgtgagtatggaaagaagacaaaatgacgcagcagtgctggctttgaagatggaggaagagccaccagccaaggaatgtgggcggcctgcagaagctggtggctctcccctacagccacgagaaggaacacagccttcaaggtggccaacaccatgatctcagcctagtatgacccatttcaaacttccgacctccagaactgtaaaatagtgaatttgtgtggttttcctctgctattactgtggcagtttatcacaacagcagcagagaattactgcaaaaccttcaggcgggaaaaaacagcacaggcttcatcgactcacacattcacttcaataatacagaaaactgtccaaggcaaagcactatgttgtgtgccctgctgggaatgaggtagggaggtattgagatgaaagttgtgcctggtgcccacgaaggtaggtaatggacgtgcagaaagagcagggagaggtgggacccagggtggaaacaagaatgagggactggccggtcacggtggctcagcttgtgatcccagcactttggaggccaaggccagaggattccttgagtccaagtgttcgagaccagcctggcaatatagtgaaacccgtgtctctaaaagagagagaataagggactttgagtcctctttggccaaaaatatttcagtgagggtctgtttcatcccttctctcccatctcagagaaatggaggctactgctagtctcacttgcatcctggattagatttcaggacctttccgccagtgataaatgtgcagcgccttagcggaacctcagccaaagctataaacttcaaccggccacaagagtgtgcatgtgaggtgactgcattttttttccctgccaaaccagaattagccggtataggaatgaacgagcatgaagatttgaaattgctccgattggaaggaagcccaggttaggtttgggcacctccaaacgcacccgttttaaagccacctggactgaggcgtcgagctttcagctccaccaaacgctcacctggcctggcagcgagcggcggaagagcccgggagcccctcacagagcgcaccgagccgggcggagagctgagccgcaggcacccgcgtctccaggatgataggcgacattgcaacaaatctctacacccagcagctcagggggctccaagcagagcagcaagttcgaggatccgggcgtggagccgagtgaggccgcagcccagcgggcctcgggcggtgagtatccgaggccgcgcgcgccgcgggcctggggaatggagcgacgccgggggcatcggagcctaggtttcagatggccgctgcacccccagggacccccgggaaggggcagccccagcccaaggcaggctcgggaaaggctgcccgggcggtggagggcgagactgtgccggggcaggtggtagtgccaaggccgccgcggg

SEQ ID NO: 25640 - DNA, 2300 bp, Homo sapien
tgtaaaccactgaagcctagcacctcatcaaaatgccctcacttggccacaatttctcacaattttctcaaaatttttttttcttttttttttttgagacagagtctcactctgttgcctaggctggaatgcagaggcacgatctcagctcaaggttcaagcgattctcgcctcccagattcaagcaatatcgtgcctcagcctcccaagcagctggaattacaggcaggcgccaccacacccagctaatttttgtgtttttagtagagacggggtttcaccatgttggccaagctggtcttgaactcctagcctcaagtgatccacccgccttggccttccaaagtgctgggattacaggcgtgagccactgtgcccagcctcaataatttttaaatcaagagttgatataagattagctgggcatggtggcacgctcctataaccccagctacttgggatgctgaggcaggagaattgcttgaacctgggaagcagatgttgtagtgagccaagattgccactgcactctagcctgggtgacagagtgagattccatctcaaaaaaaaaaaaaaaaaaaaagagagacagaattgatataagaaatagcaatataggccgggtgcagcggctcatgcctgtaatcccagcactttgggagggtgaggcagccagatcacttgagtccaaaaggtcaagaccagtctgggcaatataatgagactccgtctctataaaaagtcaaaaaaattagccaggcatggtggcgtgtgcctgtagtcccagctactcaggaggctgaggtgggaggatcacctgagcccaggaggttgaggctgcaatgagctgtgatcatgctactgcactccagcttgggtgaccgaggaaggcaatgtgaaatacatgtgaattttttttcaaagaaacgaaaaagaaggaagaaaagaaaaaggaaaagaagaaagaaggaaatctgtggtaggcagaataatggtctcccaaagatgtccacatcctaatccctggaacatgtgaatttgttaccttacatggcaagaggggaattaaggttgcagatggaattaaggttgctaatcagctgaccttaaaatagagagattatctggattatctcattggactcaatgtaatccccagggtccttaaaagtggacaggggtgggggcagaaaaggggagacaaggcaatgtgagtatggaaagaagacaaaatgacgcagcagtgctggctttgaagatggaggaagagccaccagccaaggaatgtgggcggcctgcagaagctggtggctctcccctacagccacgagaaggaacacagccttcaaggtggccaacaccatgatctcagcctagtatgacccatttcaaacttccgacctccagaactgtaaaatagtgaatttgtgtggttttcctctgctattactgtggcagtttatcacaacagcagcagagaattactgcaaaaccttcaggcgggaaaaaacagcacaggcttcatcgactcacacattcacttcaataatacagaaaactgtccaaggcaaagcactatgttgtgtgccctgctgggaatgaggtagggaggtattgagatgaaagttgtgcctggtgcccacgaaggtaggtaatggacgtgcagaaagagcagggagaggtgggacccagggtggaaacaagaatgagggactggccggtcacggtggctcagcttgtgatcccagcactttggaggccaaggccagaggattccttgagtccaagtgttcgagaccagcctggcaatatagtgaaacccgtgtctctaaaagagagagaataagggactttgagtcctctttggccaaaaatatttcagtgagggtctgtttcatcccttctctcccatctcagagaaatggaggctactgctagtctcacttgcatcctggattagatttcaggacctttccgccagtgataaatgtgcagcgccttagcggaacctcagccaaagctataaacttcaaccggccacaagagtgtgcatgtgaggtgactgcattttttttccctgccaaaccagaattagccggtataggaatgaacgagcatgaagatttgaaattgctccgattggaaggaagcccaggttaggtttgggcacctccaaacgcacccgttttaaagccacctggactgaggcgtcgagctttcagctccaccaaacgctcacctggcctggcagcgagcggcggaagagcccgggagcccctcacagagcgcaccgagccggg

SEQ ID NO: 25641 - DNA, 2300 bp, Homo sapien
ccatcttgccctggaggctggcctgaccaggctggattcattcaaagtttaaggcactggtctcccaatgccatctattatataaatcatctttcccatgctggtctgaaataccctgagaatcaggggtgctcagtgtaacatcataatagcaaaaaattagggacgaacacaagttctatcagtattgcagaataaactgatacagctacagaatggtttttttttaaacttttcttatagaatattagacctttgatatagatatttgtttaaatacatggattcataagtatggagttatccttcaatcaatggaaagccaccaaatggttttgtggtcaggagagcttcaggacacttaatgctagttgtgacgtgtggggaaggaacccattgttgcttatgtgaacgtgtaggtaggtctatgagtgaaaaaatagccaaaagaatcaactgcacttattttgagatgagatcacagggacatatgccttctgtattatacctttatgtacaattggaattactataatgaccatttgttacttttgcaaccagaaaaaaaaaaatctttaaaatccagatcattaattaatagccccaacatggtaataccctctaactctcctaatgccacatgtcagctcataatagccaggggcatgcttgacccagcctctcagtcccaccttccagggccaggttgggagaataagatgaaggtttacccgactgagaatgagccagtgcgggccttgccctcagccccatcatccagtgtcactgctgctcggcagcacgtccgtctgtctccactgcagtctcacttatgtatgtgtacaacaaagagaccgatgctggtactcccaaaatgtgttttgtggttgccctgcagcgtgctgcctccatgacccacacatgatgggcagctggtgtaaagagccacagacttggcctgtgagagcctccgtctccagaagggcttggatgcagccagcagttgccactctatcagcatatagtgtgaggctgaggagaacagcttttggggttttggtttttttttgtatcagaagcccatggccatcatgggtggtccagagatgccaggaggcatgagaggaggttgccaaagcttccacagtgaatgagactcaggagggcactaatgtctgctgtattgcaatttgacagattctagaaccttttgttagaaggggccccattcaaagtgggcttattttgcaagtaacagcgtaaatgggcttacctaaaatctacaaatgaaggatgtgtttccttgaactcaagaggcctgaaggatgctgggaggtttattagaacactgtgagtactcagagggtcaataattattttttgacagtgtcagggatggagcatccctcaactgaccagacaatggccagaaattggtgtggatccctgtactatgcctggggcagtggcccatacttttttgttttagtttaatcccaccatgtggaaacacaaaccccatccttttctatgagttctttgtgagtaatgtcctgagtgtgtcaaatgaatttgctgaaagaagggtgtcttcagggtgatgttacacctgtactcctagagaatgtcagatgcagttcaaatcctgcctgcaaagattgtgtatggtggcagaactgtcgaggtaccccgtggtagccagataacggtctattgtgtcccttcgggggtgaaagcaacctgcagctgagatctgttgaaataggcgctgaacagaacacattagtcaaatctatgcctgcagagtatttaccacttgctaagtggatggagtcagtaatttcaataacattgggccatcacaggtggggtcacaggattcaggttgtagtaattcaccgagaggcaccattcattctttccaagcctaagaacagaccaaattgggctgttaaatggagaaacagtggggataatcaccctttctctaaatagatcttccataatgagtttcaatccttgaaagccgtgttttaattcatattgatcagtattaaatattttaacagagaaggtccatagagttccattttgtaaagccaattgtaagtgccaaaggtaacttaattttaattattttaatgtgttatttactgggtcatagcatccatgcccactgtggaacattttagggccatgttatgttacgaccatggggcagttaggcaaggcaccaggaacaacagttcccatactcctgcacccaaatgccagttatcatcatttcttactttggtcag

SEQ ID NO: 25642 - DNA, 2300 bp, Homo sapien
gtgtttttagtagagacgggattttgccatgttggcaaggctggtcttgaattcctggcctcaagtgatctgcctgcctcagcctcccaaagtgctagctaagctacaggcctgagccactgtgcccagccaagcatatatggcttagaataaacatctttcatcctcattcgcagctgtctttttttcatgtaacaatttttgcctgatttgacattgactttattttcccactcctgctttacttttgtttgtttgttttgcatttgcctggtgtatctctgaatagatctaaaggaagaagttcttgctgccaggatcctcagatgcccatgaaggggctttccaggtgatggggaggggcttcaggtaagtgacatgtgacatttgcataaaataaccttaattcctttaccaccgccatcccctgcatcacagcgctgtatgttactgcatgctgaggcatcaatgcaccctctcctcagctgttagcattgaatttttcctggctgtggcttccatgcctctgtttcacccacagccattacccgcaaggccgggtctgctattctgtacatactagggtgggatatgctgtttgtgcctgcatagaagggcttgctcttatgcagttagccttggtttcaaagcttcttaaactttagatccatgtctcccatcttttatctgaggagtttgtggatgtcctggtaggggaacttgtgggtcaaatacatttgagaattattgatttaatcaaagttacatagaattctttttttttttttttttcgagatggagtcttgctctgtcacccaggctggagtgcagtggtgcgatctcggctcactgcaacctccacctcctgggttcaagcaattctcctgcctcagcctcccaagtagctgggattacaggttcccgccaccacatctggctaatttttgtatttttagtagagatggggtttcaccatgttggccaggatggtctcaaactcctgaccttgtgatccacccatctcagcctcccaaagtgctgggattacaggcgtgagccaccgagcctggcccaaagttacacagatttctatagtgcagtggtgcaatcatagctcaccgcagccttgaactcctgggctcaagcaagtctccagcctcagcctcctcactaactaggactacaaggtgcatgccaccacactcagttaattttttatttttttattttttgtagagatggggtctcactatgttgcccagactggtctcaaactcctaggctcaagcaatcctcccatcttggcctcctaaagtcctgggattataggcatgagccactgtgcctggccaatagtttaggatttttcataggccccacatgtcaatgtacattagggatctttaaaaggggcatgagaaggggtgtccctgccagcccttgagttactgctctctggaatcagcaggtcccagttctgcctcagactcctggctcccaactacctgcccagctctcagccatttttctgcctggaggtctgcctgcctctgcacaattccagttcatgtgcaggttccctttcatttcaatttcttcctgtaataatcttatcctgacaagttctaggcatttctggcacattctctttgtttttttgtgtgttgttagagtttgataacacactggataaattccagtgaattcattcagttatgtaaacatcaccacaatccagtttgagaacattttcatcaacctaaaatgtacagaatgaggacaagtcatgggaaaatagatgtggttagggaagcatttggacgctgagttcccagttcctattgccgctggggctgtacccttatgcctcctcctcccatacctccctctctgggctgatcccaactggcaacacgccctcccccaaaccccaactgccaagacgtcctgggagcctcacaagtgcccatgaggaggtggagagaggctgcaggcaccgacctgccttcagcttccggcttggcaaactccgaaaactttcacttttcttttctcggaagcccggccccttactgcgtttgtcaaagcacagacttcctgttttgcctgctagcatctccctgtaactctcccaatcttgaggagtgatccctgtcccagcccctggaaaggggcaggaacgacaaactcaaagtccaggtgagtttctgtctttgctgctttattcttcgctcttggtgactgcagctcttagagttaacttcgcggcagcagctgcagggtggagttcaactattta

SEQ ID NO: 25643 - DNA, 2300 bp, Homo sapien
gattggttatctgacataattggacataaaaacagtgaacatccccattagcgttcagagtcaggaattttggagttgtgggcaaataggggtaagttggcaaattaaattacagcactggattgtgatcaagactctatacaattcatttccccaattccaggtgtcagattctagcatgcttagcaaaatgaagagaaatcttccaggtagaatgaaagcattgatttacctttggggattatgacctacttggcctaaatctggatgggggaacagagccaggaggcaggccggagccttctgactccactggtcacgtggcagtaaaggaagacattgggaaccagagatggtctgatggtcctacatatgcctggcccaggaatcccttacccaggagaggttctgtagtgagcatagggaaaaacaagatagtgggaaatagaactgaaatttcaggctatccttacctgggctaatgcatggtgttgcaaagtagggctttctagtagtagcagcagtacccctgaagtaccaatcttaccaccagtcagctgaggaacaccaatggccttgtgcttataagcaaaagaagctggcacattttcaaaaatgtccagttcattggtgtcctgggtctgcctactgcctaagggcagagagaagagagagaggggatgctggagcaggcggtatagtctgtaccaggccttgttggagccccatggagactgggaggagaggacagctgtgtctaacagaagcccagcatacttttccttcttgttttaaagagggagggagagggagggagagagagggagagggagggagagggagggagagagagggagagagagggagacagaggagagagaggacagagagagagagagagaggagagagagagagatactggaaaaggtgtcctcatcagtgttctagagtttgtctcaaccagattggtgtttgttcctttggtagaaagaaagcagaagtgtggaaggggtagaaatttcttgcactctgtattttgcaaacttatgtatgcaaatttccttgcatatgtgtaatgaaccagaaaaagtaggattcaggagcacatgttttggaaaaatactgctttgcctctggcttttcaatcctcactactgttctgtcactggccctggattctacccataccctggctctcatcagccccctgtctttgacccatttttctgcctggatttctagtcctgtggttatattttttatatttgccctttgcttccatttgtttatcactcgactttatgctgatatagtgtgtttttgtaaattgtttcaaatcctttacagaatgagggctgggtataaatgaaaaattgtgtgcaaacataaatgtaatacagctatcctcctgtatcatattgtccttgaaggtctagataatctcagctccaaaccctttccccatccagtgagaaggctgtcactctcctcaagatttcagtgaaatggttgaagctcatttttttcccagtcacccctggctgctgttgtaaagtgcccacatatttgagaaaacttagaattgcacctcatttctctgcccaacctcagcacttgcctttggctggaggagttgagagagttgtcttttacctctgtctgctttcatggagtgctaagagcatctcccccactttctaatgcatgctatttcagttctccctggccccatgtccaaacactgggcctaagccatccagcccaggctcactaaggtgcatggccagccctggagcctgactgaagatttgaaatgtctggtcttcacttgtccttctcagccacctcagcaaggggtggggacaaatacagagtttacttcctcctcatgatgccaccttacctcaaaacaactttgatctgcttgagttgaatgacttttccaccctctttccttggcaggaacaagtgaccctgtcttccgtggcctcgtggggctggctctgctcctcctcccttgactgagagacgtcatggagattgggtggagggaggactgtagagttggtgcacccacgtcagctagttaggcaatttcacttttcttttcctctttgactgagcaccgaggggcagttggcagcttcacctcagagctgcaggaaggaacggggcagtgaaaatcgaatcgggtgtgatcctaggccaagctcatggcccagcagggccagcaggggcagatggcaagtggagacagcaatctcaacttcaggtgggtcatcgtctcctttcccgtctg

SEQ ID NO: 25644 - DNA, 2300 bp, Homo sapien
gatttggggtggagagttctgtagatgtctattaggtccgcttggtgcagagctgagttcaattcctgggtatccttgttgactttctgtctcgttgatctgtctaatattgacagtggggtgttaaagtctcccattattaatgtgtgggagtctaagtctctttgtaggtcactcaggacttgctttatgaatcttggtactcctgtattgagtgcatatatatttaggatagttagctcttcttgttgaattgatccctttaccattatgtaatggccttctttgtctcttttgatctttgttggtttaaagtctgttttatcagagactagggttgcaacccctgcctttttttgttttccattggcttggtagatcttcctccatccttttattttgagccaatgtgtgtctctgcacgtgagatgcgtttcctgaatacagcacactgatgggtcttgactctttatccaatttgccagtctgtgtcttttacttggagcatttagtccatttacatttaaagttaatattgttatgtgtgaatttgatcctgtcattatgatgttagctggttattttgctcgttagttgatgcagtttcttcctagtctcgatggtctttacattttggcatgattttgcagcggctggtaccggttgttcctttccatgtttagtgcttccttcaggagctcttgtaaggcaggcctggtggtgacaaaatctctcagcatttgcttgtctgtaaagtattttatttctccttcacttatgaagcttagtttggctggatatgaaattctgggttgaaaattcttttctttaagaatgttgaatattggcccccactctcttctggcttgtagggtttctgctgagagatccgctgttagtctgatgggcttccctttgagggtaacccgagctttctctctggctgcccttaacattttttccttcatttcaactttggtgaatctgacaattatgtgtcttggagttgctcttctcgaggagtatctttgtggcgttctctgtatttcctgaatctgaacattggcctgccttgctagattggggaagttctcctggataatatcctgcagagtgttttccaacttggttccattctccccatcactttcaggtacaccaatcagacgtagatttggtcttttcacatagtcccatatttcttggaggctttgctcatttctttttattcttttttctctaaacttcccttcttgcttcatttcattcatttcatcttccatcgctgataccctttgttccagttgatcgcatcggctcctgaggcttctgcattcttcacgtagttctcgagccttggttttcagctccatcagctcctttaagcacttctctgtattggttattctagttatacattcttctaaatttttttcaaagttttcaacttctttgcctttggtttgaatgtccgcccgtagctcagagtaatttgatcgtctgaagccttcttctctcagctcgtcaaagtcattctccatccagctttgttctgttgctggtgaggaactgtgttcctttggaggaggagaggtgctctgctttttagagtttccagtttttctgttctgttttttccccatctttgtggttttatctacttttggtctttgatgatggtgatgtacagatgggtttttggtgtggatgtcctttctgtttgttagttttccttctaacagagaggaccctcagctgcaggtctgttggagtaaccggccatgtgaggtgtcagtgtgcccctgctggggggtgcctcccagttaggctgttcgggggtcaggggtcagggacccacttgaggaggcagtctgcccgttctcagatctccagctgcgtgctgggagaaccactgctctcttcaaagctgtcagacagggacatttaagtctgcagaggttactgctgtctttttgtttgtctgtgccctgcccccagaggtggagcctagagagacaggcaggcctccttgagctgtggtgggctccacccagttcgcgcttcccggctgctttgtttacctaagcaagcctgggcaatggcgggcgcccctcccccagcgtcactgccgccttgcagtttgatctcagactgctgtgctagcaatcagtgagagtccgtgggcgtaggaccttccgagccaggtgtgggatataatctcgtggtgcgccgttttttaagcccgtcggaaaagcgcagtattcaggtgggagtgacccgattttccaggtgccttccgt

SEQ ID NO: 25645 - DNA, 2300 bp, Homo sapien
taatttcaatctctgttaaatttctcattttggtcatttattgtcttcctgatttcagtgaattgtttcttggtatattcttgaagtttgctgagattccttaaaacaatcattgtaaattctttgtgaagcagtttgttatcttcattgctttggggtgagctatgaggagattattgtgtctttttgatggtgttatgtctctttggcttttcacatttcttattaccttgcatttatatctgtgcatttaaggaagtaaggacttatttcagcctctgtagattggctttgtctgggaaagcctttcaccctacttagaaattctaggaattacatcttgcatagaccaaagaaaggcttgctgctgaaggtgcctaggataatcagtgggcaggtctatgctggggcaggccttgagccagagtctgcagggatctacaccactggtgcagccatcttcaggcacttcagtgagcctgaagaccagtgcatgagaggcagcttggtactgggatgagactgaaggccagagccactggtagtagtctgggttcactgaggctgaagtagtgctggggcaggctgaagactgcatctgtaagggctggcctggagcctggggattcaggattcagcctgggttcagtgtgagcttggaggttcagaccatgtgtaccagctggagtatctacaaataaggaaactgctgattttatatagagttttaggaaacatagttcaggcactacagactttcagaaacaggagtgtatgaatagtttagcatttagccatcaacacgggctttctggagggggctgcggctgattggctggccttcagatgtgtaggactgccactgatgggctagctctcagaaatgattagtgatataagtaatcaatggccaattaggacaagttgaaacagttacttcttactactttctttttgtttgtttgttttcttgtttttgagactgagtctctctctctgtcacccagactggagtgcagtggcacaatcttggctcactcactgcagcctctgcctcctgggttcaagtgattctcctgcctcagcctcccaagtagctgggattacaggcgcacgccaccacacccagctaatttttgtatttttagtagagacagagtttcaccctgttggccaggctggtcttgaattcctgacttagtgatttgcccacctcagcctcccaaagtgctgggattacaggcatgagccaccgcaccctgccacttcttactgttttcaaagaacattagtattttctggaatgataagagctttttaattttttctattttactctcaggactacaagtagaaaaataaaagtaaagaaaaggagaaggaggtgcaaaacatggggagagcatggctgttatgtgtcaggcgtgattattggagcgggtatatttttttccagagagcacttcaccttggctcagaatattagtgtccagcatcacagcactgggaactcttctctggtcactgtctagaggtcacccgaggaatgtgtgtgacctctagaagctgaaaagacaaggaaataggttgtcctctccagaccccagaaaggaataaaggcctactaacataatgactttaggcagtgagacctgtgtcacacttctcactgacataactggaagataataaaatacaaaaataaaaataaaataacttttttgtttctcattagtatctggtgaactagaaaattaccaaatgaccaaagaaggagaatcagaagagcttgcttctagcttgctatgatgtgatgtaccaagtaattatgacttaaaaatattaaaaacagaaacagagttctgataatgaaaaaaagacaaaagaggacaaaaagggagacttaaaggaagagtcaaatatagggaggagaagtgaaagaagatttcggaggaaaaagtagagaagagggcagcaaccagggtgcagaaaagagggttattggggcaaattaaaagttcataaatcacaattttgccccgggagcagagcgaccagcatgtgaaaatgagaagtgttcctatgtcatgtgtttctcaggagaagtgccagaaagcccggaagcaaggaaggaaagtgaccaagcatgtggcaaaatgggtaaggctgcctgagggctgtgggatggggtggctcagtgggccccacagaccctgggaagagtggaggcaggtgctccagtccgcccagaatcctgttctgtgcatttgcctcacccaagcctttggggaactgcagag

SEQ ID NO: 25646 - DNA, 2300 bp, Homo sapien
ttgagttttccaggctccagtaactggaactacttcttgacaacagaaatattccctattgcctgtgctccttgcagccatggaaaatgccccaggagttccattatttccttctaaacagtccagcaggatttttagctcacatgtcttcttaatgtggtcccgtccctttcccaaccccagtgtgtctgacattgttttctggatcagagaaactttgctttcttcacagaggcctacagattctccatataccagcggagcatggtgcatgctcatctgtctccaacctcatctgatgagaacatctccttccctgctgccaggaggtgccccagcatgggcatgtctgcccgtgaagttcaacccgtaaggaattccctgccagcctgtggctcattggtctggaattccaggtgctgctcttagtagcccctaagcacatccagggaaaagctggcacgtttatgtcagtgccactcaatggcctgagcctgcctgctgcccagaggcagcgagaggggagaacgtgaaccacaccaaagcatactgtgtggtccatgccaggacttcttgggaccaatgtgcctcatggagactgggatcaaaggacagctgtgcccaaaagaggctcagcttaccagcccttcagccccataaagtcggggagtcatggggggtaggaagaatgagagaaagagagagagacctacaggtgagagaaagagagagagacctacaggtgtgcagtgcctgatagaaacagtgaccttcgcccaccggcaaagctgtcctcaccaatgtcctggtgcctggtcattcactcatggggaaaagaagagcagaagtagagtgagggtagaaagccccttcccccacattttcaaatgtacctggacaagcatccttattcacagctggaagaagttggattcagtagaatgccatttggaaaacaccgttctgaagtgccatcccctctggcccctgaatcctcaccagcttccaccctctgctcaccttgggccctggattccagcgcccccaggctcccagctgcctccctgtctctgccccatggtccggcctggagttctggtccctggttgtgtcctgtggccccattctcatgcgccctttgcttctgtttctttacctatgactttatactgatgtaaagcgagtcttctcggtcgcttcttgttctctgaggaatgatgaatcagaatctaaatggaaaatctgggcagagatagaacctcccgcgggagccaccctgcccttccatgtctagatcatctgggttccaacctccatcctcctccaatgagaagcttttgttctctcaagattccagtgacttctccgaagcttaggtgtctcttcacccctggctgttccaaggcggccccatagtcaagattccttaaacccttgccccttaaaatgtttgcctttcttaccatgctggctccagcctctggtcccaggggtgtggagagttctctcttacttctggctgatttccaggaaggctaagcacactctccccaggttataatgctgagcattttggttctctccagccctgggtcccaatgtcaggacctaccttagtccagtccatgctctcccatgggcctgagagaagatttgaggtttctggctttccctccaaccctccaactcccaccccaagccatgtcagcaaggggaaggggcaaacatggagtttcccccccaactcccatgtaaactatgccccctcttagagggcagagcagctaaggacaattttgtttcaaggacattttttttggctgtgtattgcacaaacaagtggacacccgggagctggccctgctcgtcccctgggccctccttccctggtcctgcaggtcttgctgcttgtcaggcctctcctccaaccctctgccacatttcagaaaagctgagaatcccttggagtgaaaaaggaggagaaacacagtgtccgtagcccagaaggaggttaaatactttcacttctcttttccccatttgggcggagccctttctgagtcagtctgtcggccgacttcctgcttggggcctgggcagccacactgcacgcaggctgggccgactgaggggctcagaggccaggctctgaggcccacgcagggcctagggtgggaagatggcaggtgggggcggcgacctgagcaccaggtgagtctttatctcccttcctttaacctttatctctggctatattgcagctttcatgcctttagttcagtttgtgcctaaggcttcac

SEQ ID NO: 25647 - DNA, 2300 bp, Homo sapien
accaaagcatactgtgtggtccatgccaggacttcttgggaccaatgtgcctcatggagactgggatcaaaggacagctgtgcccaaaagaggctcagcttaccagcccttcagccccataaagtcggggagtcatggggggtaggaagaatgagagaaagagagagagacctacaggtgagagaaagagagagagacctacaggtgtgcagtgcctgatagaaacagtgaccttcgcccaccggcaaagctgtcctcaccaatgtcctggtgcctggtcattcactcatggggaaaagaagagcagaagtagagtgagggtagaaagccccttcccccacattttcaaatgtacctggacaagcatccttattcacagctggaagaagttggattcagtagaatgccatttggaaaacaccgttctgaagtgccatcccctctggcccctgaatcctcaccagcttccaccctctgctcaccttgggccctggattccagcgcccccaggctcccagctgcctccctgtctctgccccatggtccggcctggagttctggtccctggttgtgtcctgtggccccattctcatgcgccctttgcttctgtttctttacctatgactttatactgatgtaaagcgagtcttctcggtcgcttcttgttctctgaggaatgatgaatcagaatctaaatggaaaatctgggcagagatagaacctcccgcgggagccaccctgcccttccatgtctagatcatctgggttccaacctccatcctcctccaatgagaagcttttgttctctcaagattccagtgacttctccgaagcttaggtgtctcttcacccctggctgttccaaggcggccccatagtcaagattccttaaacccttgccccttaaaatgtttgcctttcttaccatgctggctccagcctctggtcccaggggtgtggagagttctctcttacttctggctgatttccaggaaggctaagcacactctccccaggttataatgctgagcattttggttctctccagccctgggtcccaatgtcaggacctaccttagtccagtccatgctctcccatgggcctgagagaagatttgaggtttctggctttccctccaaccctccaactcccaccccaagccatgtcagcaaggggaaggggcaaacatggagtttcccccccaactcccatgtaaactatgccccctcttagagggcagagcagctaaggacaattttgtttcaaggacattttttttggctgtgtattgcacaaacaagtggacacccgggagctggccctgctcgtcccctgggccctccttccctggtcctgcaggtcttgctgcttgtcaggcctctcctccaaccctctgccacatttcagaaaagctgagaatcccttggagtgaaaaaggaggagaaacacagtgtccgtagcccagaaggaggttaaatactttcacttctcttttccccatttgggcggagccctttctgagtcagtctgtcggccgacttcctgcttggggcctgggcagccacactgcacgcaggctgggccgactgaggggctcagaggccaggctctgaggcccacgcagggcctagggtgggaagatggcaggtgggggcggcgacctgagcaccaggtgagtctttatctcccttcctttaacctttatctctggctatattgcagctttcatgcctttagttcagtttgtgcctaaggcttcactttaatccttctttgcaagaacataggtatgcgatgttatataatgaaatgaaagacaagtaatgaggaaatcagattttttaaacaggagcaggacagctgttggtgtgagttcaacttgccataacacacgtgactttcttgttttggatttactgctcagctgaccgggacactctaaacatagcagttgttggtggctgggattaactatttcctcatgatctgtgaaccctttcacccctcagccttcctctaccttcaaatatgtcatgtcaaaaaaggtgctttagaaaataaacactccagggtaaacacctggcttacttttaaacatcagacgctgtggtctcacctgtcctggcaaggggcctctgccggctgttcccatgactggctcagggtctgagttcttattccatcaaccttgatcaaaagaaggaaagggaagaaaaaggcccagggtgacaaacggctaaatattttcatttttacctcaatttcctgtcccaagatgggggatacctctgaccagaaa

SEQ ID NO: 25648 - DNA, 2300 bp, Homo sapien
cgttgaaaaggtaaatgttggtagtaatatttcttctcattgcatgatggtcaaagaaatgtacacacatgacagagagaacccttcatctctgttccttcaggctgggtatgaagcccctgatatctgacaggaaaattcagactttactgctacgatcctaagcccaaagtgggtggccccagaccccagcatggggggaggccaagttcaggtgttttcacagttggggagctcactttgccttggtcttacaggaacctcaaagaagtgtatacagagtgaggataaaaagtggttcactcccagggaatttgaaattgaaggagaccgcggagcatccaagaactggaagctaagtatacgctgcggtggatataccctgaaagtcctgatggaggtattctagtgacagatggctgaaaccaaggatttagctgtcatgcttcactaacaccaagctttagcagaatttctcagtgcccagaaattcatcatgacttcctctgcccaggtctccatgcatatgttattactaacgttctcacctgaacattacgttggctggcttatattacagcttaatcctctaagtactttatttcttacccttttgaaggttggacagtaaattgtggccttgactctgccattaataaactgtgcaatttggtcacatgaaagtaacttaagttggaggggaggtcttaaattttcgggggaggtaaatgttaaatacacacacacacacacacacacacacacacacacacacacacatatttaacatatatatatgtagttcctggattacaaaatatttcaacaagatttctttgaataggccacctcaaatttattcttgtaagagaatataaataaattgcattttaaagtaacattgcttctcatatgaaccccttgatgttacaaagcaggcacagggtctttgctgcagatgaacctgtgtctttagactccaaatacagtgctttctgttgcacgcccacagacagtccttcctcatgccactctaacaattaaaaaaaaaatctgccaggcacagttgcacatgtctgtagtcccagttactcagaagacagaagcaggagggtcacttgagcccaggggtcctgggcttagtgtactatgccaatgagatatccatgctaagttcagcatcaacataggggaccaccagattgcctaaggaggggtaaaccagtccaggttggaaacagagcaggtcaatactttcctgctgatcagtagtaggtttgcacctgtcgataggcactgcactgcactccagcctgagcaacacagcaagaccccatctctaaaaataaataaataactattacacaaataaaagatctttgcccagtaaatacttattgaaccaacatctaaagctgtggagggtatacaaagtgtgagccccttcccagaaggaaggctgtgctttcataattacaggcctggacacggtgtcaatgttctcacaagagacacctgcaggaagaggtacaatagatcggagaagagaaagtcatttctggctttgaggttgaggaccattttgtggaactcttgcactgagctaggtctaaaaagatgaacaactagcaaaaacgtagaatggggcattctacatatatagaaaggacagcatgcaaatctgctccacaatgtgtcaagaagttgggagtaatgaggtggctacattctctggactgattatagaagtcatgaggccagaggaaggcattgaaatgcttccttgaatccctggagaatcatgaaaagtaatttccatgaaaataccttgaatttgagttaatagtgggatatccaggtaggaatatttggaaggcagtcagaaatactaagctcacaaaataaaagcaagaacccatcaaatcatttatctcttttcttttttagaacaaatttctgccagaaccaccaagcacaagaaaaaaggtgatgatcaagtgatcttctgccaatgtctcgtctattatgttgttgattttctatctctgtggacttacagtctttaaattgacccatcatcataaaatttgattttataatatgatgcttttgcagttgctgctttcaaacattattcaatgtataagtccagggctcctttgaacatcaaaacgtttgagatagaggtgggaacaatcctcagaaatagattaaaagacagaactgaattgtatgtgttttttagtaaaggagctaaatgccatacttttttttttttttttttttaagagaaagagtct

SEQ ID NO: 25649 - DNA, 2300 bp, Homo sapien
atttctccagaattcataaactatttgtgaatattattaattcatggcaatgtgtttgcgtatgtttaataagaatctgttttctgctgggtgtgttggctcatgcctgtaatcctagcactttgggaggccaaggcaggtggatcacttgaggtcaggggtttgagtccagcctgccaacatggtgaaaccccgtctctactaaaaatacaaaaattagccaggagtggtggtgcatgcctgtcgtcccagctactcgggaggctgaggcaggaggatcacttgaacctgggaggtggaggctgcagggagccaagatcatgccactccactccagcctgggtgacagagcaagactccatctcaaaaaaaaaaaaaaaaaaaaaaaaaaaaagaatatgttttcttttataatgagacacagttggaggaactggtcattttcccagggctttgactgaaatggccttgtgagaggttccagcaaagccagtttaagatagcctacatggacaatggttcttgctgcactttgtgtgggcaaataagccaagtatatgggactgaagcttatttggcaggtaggttggtcctgctgtgatttgtctttagtggaagtgggagactggagagaaaaagagtgtgtttcagaagaaacctatagtattcagttaacttttgatttttgggtggctatgtgggtcacccatggtatggatttgcccacgacactcctcatcagcatgaaacagccagaaagattgacaaccagttccccatgattgaggaattgataaacagaaaaggggcactgaaatgaacccaattgtcccataaatctgatttttacagtttattttgaataaacatagaaattgaccctctcagtcttaaaacttgagagagttacatttgtcttatctgagttctttctcaggaaaccaaccgtcagacccccacataacatcaagggactgaaactcaccagattactgtatttggacaatgagatgccaaactcctcaccccttatgactgcctaaccaataatctccttcctgttaaccaattcctccttaccactccctaattcctgcttccctgaatatagatacatttctgctatataaacccctaactttagtgagtcagggagacagatttcagactgatctctcatccccttggctgcagcacccgactaaagccttcttgcttggcaatactcattgtctcagtgattggctttctgcgtggcaagcagcaggacctaaactgaacccctggtatttcaataacaaaatcatgggtgacttccctgtctaaacaaagtcacattttgattcttttcattgcaatgagatgagcattttaggcagggtcagccttttgcacaactgcaaggagcaccttttgctgtaagaatgccatgtaagctaggcacagtgattcatgcctgcaatcctagcactttgggaggctgaggcaagaggatcacttgaacccatgagtttgagaccagcctgggcaacatggcaaaaccccacctccacaaaaaataccaaaaattagtcaggcatggtgggacacacctgtagtcccagctactccaggggctgaggtggtaggattacttaagtccaggaagttgaggctgcagtgagctgtgatcgcaccactgcactccagccgaggtgacagagtgagaccctgtctcaaaacaaaaatgccatgcagctggactggtacaggacactaattgagaggggatagaaaagaagttgccatgccctctattttcttagccaatgctcttccctagcaagatctagatcaatccacactgtttctgtttctttgctggaggtgagacccttcagtagtcaaacagctctcatctctggggtctgcataacttgtttgatgactaagggagacccatagggccatttcttacagcccacagccaagccctctgtgaagaggaaaaggcaactcttccagcaaggaagtcctcaccccttttcaaaaactttcctagacaaacttgtaggctgttaatgactctagttatgacctcccagcccttactcaggagaaaccactttgtaatgtgggttttcaaccttggctgcacgttgcaatcacctggggatcccccgcaaccgcctgacaaagattctgatgttattggtctgaggtgctgcctgagaattggtgtttccaaagctcctctggtgttttgtgtttttctagcacaagaaaagttgtgagtcactgtagtgcaatacagttcgatc

SEQ ID NO: 25650 - DNA, 2300 bp, Homo sapien
aaagaattagtgagcttggagacaggctatttgaaaatagaggagacaaaagaaaaaaaaaattaaaaagaatgaagtatgccggctgggtgcggtgggtcacacccgtaaacccagcactttgggatgctgaggtgggtggatcacctgaggtcaggagttcgagatcagcctgatcaacctggagaaatcctgtttctactaaaaatacaaaaaataaaaataaaaatagccaggtgtggtggtgcatgcctgtaatcccagctacccgggaggctgaggctggagaatcgcttgaacccgggaggtggaggttgcagtgagccaagatcataccactgcactccagcctgggcaacaagagcaaaaactccatctcaaaaaaaaaaaaaaaaaaaaaaaaaaaaaaagaaacgtgcctacaggatctagaaaataaccacaaaaggacaaatctaagagttgctggccttaaagaggaggtagagagagagttaaaagtggaaggtttattgaaagggataataacagggaacctctcaaatgtagagaaagatatcagtattccagtacaagatggttatagaacaccaagcagatttaacccaaataagactacctcaagacatttaataataaaactcccaaaagtcaaggataaaaaaaatgatcccaaaagcaccaacagaaaagagacaaataatatacaatggagctcctatatgcctggcagcagacttccaagtcttctttacaggccgggagagagtgggatgacatatttaaagtgctgaaggaggccgggcatggtggctcatgcctataatcccagtactttgggaagccgaggcaggcagatcacttgaggtcaggagttcaagactagcctggtcaacatgatgaaaacctgcctctactaaacatacaaaaattagctgggcatgatggtgcatgcctgtagtcccagctataggggaggctgagaatcacttgaacccgggaggcagaggttgcagtgggcggagattgtgccactgcactccagcctgggtgacctagcaagactctatctcaaagaaaaaaaaaaaatcaaaaaaattgaaataatgtcaagtcatcttctctgaccataatgaaataaaactagaaaccaataatgataggaattttggaaacgatacaaatacatggaaatgaaacaatatgctactgagtgaccagtgggtcaatgaaaaaattcagaaggaaagtgaaaaatttcttgaaacaaatgaaaatggaaacacaacataaaaaaacttaagggatacagcaaacacaatactaagaggaaagtttgtagctataaacgcctgcatcagaaagctacagaaggttctagaaaagagaattttgtcatggtcaaggcttactaagatttgatggacttatttatgattttttaaaagagctttactatcaaatatactgatacaaaactagaatttttctctctgttaaaatgagaaaagtattggtctgtccttattaagtagtgtgtggtagactgaacaatgcctctcctccacccccaagatgtccacatcctaatccctggaacctgtgaatacgtgaccttaggtggtaaagggaactttgtagaagtgattaagatccttgaagtggggaaattatccaggatcctctggtgggctcagtgtaatcagaacggtgtttataagcgtgaggcaggagaatcagaatgaggaacaggtgatgtgggaagggacatggtgggaaagagattggaagatcctctgctgctggctttgagatagaggaggggccctgagccaggaatgaaagggggccctagaagctgaaaaaggcaaggaaatgagttgtcttcctaaagtctccagaaggaaccagttttgctgacaccttaacttttagtccagtgagactgatttgggacttctgatctccagaactctaagacaataaataacaccccttaagtgtgtggtaatgtgttggcacagcaaaaggaaatgaatacaagattgtgaaagagtattcttcactttctttgtagtttgcctggggaacaaagattctgtgttttaccagaagaaccttctctggtttatgttgactttaagatgtccttgattttttaattattttttattatttttttgagacagagtcttgctctgtggcccaggctggagtgtagtggcgtggtcttggctcactgcaacctccacctcccaggttcaagcgattctcctgccttagcctcccgagtagctggg

SEQ ID NO: 25651 - DNA, 2300 bp, Homo sapien
agacagggtttcaccatgttgggcatggtgatctcgaactgacctcaaatgatcctcccaccttggactcccaaagtgttgggattccaggcgtgagccaccttttaaacgtgtctacaggtgatcattttactcttctactgccaccaccctggacagagccttatctttttttttttttttttttttttttgagatggagtctccctctatcgcccaggctggagtgcagtggcgcgatttcggctcactgcaacctccgcctcccgggttcaagcaattctccagcctcagcctcccaagtagctggggttatttttgtatttgtagtagagacggggtttcaacatactggtcagactggtctcgaactcctgacctcaggtgatccccctgcttcggccttccaaagtgctggggttacaggtgcgagccaccacgcccggccggacagtcttatcttttggctggctgatttcaacaggcttctcgctggtccccctgctgaaaccctcagggctttcagtctggtcctcataccacagccacagggatcctcctgaaatgtcattccacgtcctttctctgctcgcaacccttcaaattgcttcccatctccttgagagtaaaaacaggaagtcctaactttggttggtagggccgcacttcttcctcatctcttcccctatctggggccgctttcaagccagcagattctcgcctcagggccttggtcctgctattccctctgcctttccatacagaaagctcccaggctctctctctccaggaagctgctccctgaatgaacactgtaaataacaacaccctgctttctctcccctcctcacccagtggtgtttttaactgtccagtatttgtttttttgttgttgttttttgtttgttttgtttttgttttttggagatagtctcgctgcgtcgcccaggctggagtgcagtggcgcgatctcggctcactgtaacctccgcctcccgggttcaagcgattctcctgcctcagcctcctaagtacctgggaatacagacgcccgccaccacgcccggctaattgttttttgtatttttagtagagatggggtttcacggtgttggccaggctggtcttgaactcctgacctcgtgatccgcccacctcggcctcccaaagtgctgggattacaggcgtgagccaccgcgcctggcccaattgtccagtattatacatacctgtaggtttattagtcaattatttgtcaactgtttgtgctaggagcatggactgtttcgctcactgccccatccctgacgtacaggaggcgcttaaaaagtagttcagttacacattaaaaacaaagaaacaaaaatacacacatatggcatttgtatgtgccaggctccgttgtcagagctttgcaatgcactgtcccgttcatcctcagaagcccgtggctggtaccactatattattacacacttttttttttaatgtgtgaggaaatccaggcacagggacgtgaaacagcccatagatagcaaatggtggagcaggacttaaatccaggttgctgatttaaataggaatattcccattaatctggaacgttctggcacttgtccccctggatgctgtgtccccctggatgctaaaatgaagcgatctgctccaagaaagtaagaatcggtctgcacaaagtgggatcccggcctctcgcagaattaagcttgaagagttgaggaagtggtcgttgaaagtgggcgtgcgattcccgcagtaagagcgctcaggcggaggagaaagggctgagccccgccttggaagctgcggcggaggaagaggaactgcggggcttggcttctgcttttctctgcggcccctcccgctcgggcctcgcgcctacttgcggcgccctgagtccgccggccgctcgggggcgcccgaggcggaagggggcgttgcggcaccgcccgacgtcgcgtcctcggcggctgcgcagtgcgcacgtcaaagccgggctcgggccgcaagcggggcgaggggttcggggagcggcgcggcctgggagacacagagccttcaggcgccggggcgggggcacaggcgaagactaaggcggcgccgggccccacagcagcagccgcagcccaagcgagcgcagcagcgcggcggcagccgcgggagcccctgggcagccgtccgcccgcgcagccgccgccgccgcgggagcccgtcgccgggagcaggagcgggcggaagacaacggaggggccgagcgtccgagccactccgcggggaccgaa

SEQ ID NO: 25652 - DNA, 2300 bp, Homo sapien
aggcatagaaaagttatttagaagtggacttaaagatccttggattttatggctgggcatgatggctcacacctgtaatcccagcactttgggaggccgaggtgggtggctcccttgaggccaggagttgagaccagcctagccaacatggtgaaaacccatctctactaaaaatacaaaaattagctgggttggtggtgcacacctatagtcccagctacttgggaggctaacgctgaggcacaagaatcacttgaacctgggaggtggagattacagtgagccaagattgcgctgctgcactccaacctgggtgacacagcgagactccaaaaaaaaaaaaaaaaaaaatccttggatatttaagaacctatgacaaaggatatgcattaaactatttctctttggttaattttgtcaaaaaaggatttacaaggtgacagaaggtaagataggcaatatttggggttagagattggttggaacagttcacatcagaacatgttgagaaataacatacttgtttatgatttagttgtaggcttgacattagcattcatttgcatgttttaaacattctttataaacaaatatgtaagtcactctatttcaaacttaagggaaaaacactcaagtttgttcatcaaatcttaggtaaagctcaaaagaagtgttatgatactatgcaatggatgtatttttgtgtttatatagaaggggaaaacaaagtggggttggggtgtctgagagccaccttttcttgggtgtgtgtggggagcaccttgggcagttaaatataggatgttgaaacttacagtcagaaaaccactgatctaagtgatccataaggtttttctaaaaagtgtcatctttcggtgtctgataggagactgtttagtgcctgtgaatttaactacttctagtttttttactgaaaaatggtaacttccaacatgttcccaagtcacttccattgtttgtcttgttaactttgtttcttcatagtgccttcttggaatagttgcatgttctccttttggatgatgtaatactgtggtttatgtggttgaaatgttgttttctactacccacaaaaaattaagaacttctagaagttcatcatcctcagggttttatccagcgagttctttcataggagatggtcaaatccaggcaaaaagagtacatcttgacaactgtcacataggggattacaggatctaatgggagattttattcccctgtccaggcttctctctagctctgagaccctgtgactgcctgaataagatgggtgtgccgaggaagtgtgtgccatattcagggcagcccactggggtgcttaggaggagcagcgtgaacaccgggaaaagagcatctggagagacctagatagtaggctgttgctagtgctgtttggctaaacaccctacctaactttttgcctcagttgcctcagctgtaaaatagatactatcaatttgatgtacagtgtggtgattaaggacgctttggatcaagacagatctgagcttgtttgaccacttagtaccttgagcctcacgctcaaccttgctaaacttcaccagtaaataggagcaggagattgttagaaagggtttcatgaaatgatgagttctagtgctcagcatcaggcctggcagtagcagttgccctgtgagtgggagctgctgctctctacctcagcagcatcagtcagcatgttcgtccccatttgcgtggttaggagagcaattgatttgaaggaaagaaaaacaaagtgttttgaaaaatacagtgttctgtaattctaagacatctgtgtattatcatttcttgcatatatttgtggatttccctgttcctactgattttgaaagttatgtaaaatgacttgcctaaacacgggttttcttcccagattaggatttagaaagtctgtcttccgttgatcccagtgtttgctcacatgaaccttgtgctgtgttctaggtagcacaggcggagtgcagcggaggcccctgccgctgccgtcatgccgttcccgtttgggaagtctcacaaatctccagcagacattgtgaagaatctgaaggagagcatggctgttctggaaaagcaagacatttctgataaaaaagcagaaaaggtatggatttggctttatttatatttgaaatatcttaattagcaaatgcaagacaccttatatgaggaatcagtaagtcccaatttgggtttattttggattttaaaaataacatccaaaagcaacatatgctgctgttgcaacatacttt

SEQ ID NO: 25653 - DNA, 2300 bp, Homo sapien
tccacctcctgggttcaagcgattctcctgcctcagcctcctgagtagctgggattacaggcatgcatcaccacacccagctaggtttttgtatttagtagagacagggtttcaccatgttagactggtctcgaactcctgacctcaggtgatccacccacctcggccaggcactattctttaggggtgggggattcagcagtgaaccctacagacaaaacttgccctgtggcacctccatagcgggacatcagccataaacacaccacaatagcatgttaaatggtgctgtccgtacttgataacattccccttcaggtcctcatgttcctctctctgcatctgtgaccccatggaccacggtacgaagataatggaaattctcttaccactttcttcttctccttcccctggaggggaaacgttgtagcacttcttgccaaactcttgagtgtactcagaataaacttcaggtttttaatatggcctgttgaatcctcaaggaggatttgggaaaaattgggtaggtccttcctggccatccctgttatgatcaggaaatataacacataccctatccagcagtttgaacaactgtaaatctttggggtggggttagaaaccttctcaaaagcatactttgaagattgctgaatgtgatgtttttccagacatgttccctgattttattggttcattcattgatttattaaatattaagcacttactatgcactgggcactgcataggtgctggggattcaaaggttaatgaaaacagacacgatcctggtatttatggaacttacagtgtagcataagagagacttgaatcaaataatcccacaaaccagtgtagagtcacagctatgtccagtgcttttgtgctggtgaccaatcaggaggagttgaggtccgaaagacgaacagtaggtaaccacgcagtggggaaagcctgtacagaggccctttcgggaagggctttcacagaaagtaggtgacaaaagagctccctgtgcagtctaggacctgacatctggagtgagctgtggcacttccctcgtttgcttgaccatgggacatttcttaaagcgtttctcagaaccagtgtttcatttcagcatacttcaagaaacactagttctttgtaacctgggcaaccttcaaacataaacaggaacgaaaactaggaaaggtggttgggagaaaggcgatgattggcgctatcttctttagcagtggtacgaaggacctcaatccattagtttaccagctactggccaggccttcctgctgtcacttgttcccattctctttcccacccagtgagaccaaggctagtcctttgctaacttctaggtccttgaaggcagggatcatatctttttgtctttgaagccctagcacctagagttttacctggcacttagtaaatatttctgaatgaatgatccttgggaaagctatagggtgaggcatagggttctgtttcatggtaatacaaaatcagactggaggttcacagtcgttgttaattctacgttatcgtaccaacattctgcttacctaaaacacactctacctctaaaaaatttgcgttagctatgaacctgaatgtgattgaacttaggaggaagaaaatagagcctctaatcctttttctaataaaagaaatttcctctttctccaccgggagcgctaagtgggcgtggaattgtttgacagtttaccactactgttagctttgtttttgtgtttttgtttttaaataaccagcccacttggggagtgttaactttaatttcactacaattccttattcttttcctttagtttatatttccattgcctttatcattttttctaagagctgtagatccatgactcatcataatcattaaaattgcagttccaaataattaatgattttattttgctcttatagaatcagtgttttaatacaattcatgctaaaatgttaagtatggtgatttttaacaacagtttttattaggtaaaatggtgtggaatttaggattcgcttttttgaaaacttggagaacaactgtaaacaatttttttttctttttgtaggatttacttacaagacataaattgctcagtgcagaatttttggaacagcattatgatagagtaagtatatgaaatactatttttaaataataaattgtaacttttgttaccagaaatgaaagacttacattaggtttttgtactagaatatttattttgcatatgtaatgtttataaatggtgccgtagttatttctctacttaaac

SEQ ID NO: 25654 - DNA, 2300 bp, Homo sapien
aaactattttttgcaacaatataagtcattatttgcccttttcactctcattctctcattagcgtgcagtggggttttccagagactacatgtgtgatgacatcgctttgatgcccaatggaatatatgtattcttgtgtcttaaaactttctgagttttagtttctaatatggtaaatgttgatagacataagccacctaaacaaaagctcttggggtcctgaaaccaaaaaatttaggaatcactgcactaggttgtacgcccagcacttggccggcattgagtccatggtcaagcgtaaggagaggcccgagggggatgtgcacagtgctgaaggtgcacaggaaagggacttatcccagccggtctgggaaggccttccaggggaagtggggtgctcgcctgccaatctcaggcatgtggatgcttcacccaggtggccctgtcttgctgaccagagatttgtgccaaaccagctctgcgaccctgggtttagtcatgctaccttctatcactattaacatgaggctaatgtgtaggtcacagaggctgtgatgaaaattaaataattgaatgcacgtgaaagaatgccactcatagaaggtttcacatgaccacatccttggtggctgggttgtgtcttgggcatctctgttttctgccacagagcttaacacaatgcttggcacacaggggtgcttggaaaacactgagtgaaggaatgcatgttgggggtgtggcctaagcaagacgtggagcttgccttctccagacaccaggtttcccatgggatctggagcaggtgatgagcggtagtccataacaccttcctctctggctctgtgccaaaccagattcctcctcgtctcctccaaaccatctgtcttcttccacctccccattccctccccccagttccccaggctggtggccttagcatcagttagactttcttctttccccacctgtctgtcctcaaggttgctaggttcatccaagatctgagccaagaggtccgggtctgggacgtgggcgctaagggcccaaggcagctgcaaaagacctgaaaggtgagaagagagatcagtggaggaccccggactgtcctcaagaagcggacggactcccctgccctccactggcagcccaacagcagaaccaaagcggaccactcagcacaacctgtgtgtgttgctgggcgctgtccctggcccagtctggaccaggagcaaagaggaaagattcagggcgttagtgccaagagcagccatcccagcaacagaagcccctgcttccccagtacccgtgatacttgggaggagcagagtcttgagtggaacccgagcctctgacacccgccctgggggtcttccctccactctcgccagggtcctcctggatgagtgagacaagggcagttcaggaggtcacccaataactgaggtcgcagcaacacgaaggagccagggagcaggggcggccttcccttctccactccaggcggctccagcgtgcaccccaggaccccccaggaaggttttgcaggaataaagaatgaaggcagaagcaagatggaggatgaaggaggcgtggatggcttcagaaggcaagacggaggcagcagtttggcgcctgtctcaaagcctcctccccgcgccaaggacaggtcggaggaggggggcgtggggacaggtagagcggaggctccagcgtttctaaaggggaagacctgaagtggggcaggagagacgggtgagttgtctggaagctgcatttgcctggcaaacactgggttaacaaagacttgcgttgcggggatgctggccttggacagggaatgcgaagggattatgctacggagaacggatccgagcgtgacggctgaatgaatgagtgagcgagtgagtgagtgagtgagtgagcgagcgagtgagtgactgtgcgagcgagcggcagaaggaactccgacccgccccaggtgcggagcggcgcgcccggcaggggtcactgcgggccccgcgggcgggaagggggcgcaggcgcggcgggcgccggggccctcccgcggggacggggcggggagggctgggggtggggttagagagagggacgcgagcgggatccaaacttccggtgcctgcagagctcggagcggcggaggcagagaccgaggctgcaccggcagaggctgcggggcggacgcgcgggccggcgcagccatggtgaagattagcttccagcccgccgtggctggcatcaagggcgacaaggctgacaaggcgtcggcgtcggcccctgc

SEQ ID NO: 25655 - DNA, 2300 bp, Homo sapien
gagtattgatccagcaaacttgccgggctgtctttcttattccacaaagttctctgaggaaatttttttttttttttttttttttgagacagagtctcactctatcacccaggctggagtacaatggtacaatctaggctcactgcaacctccgcctctagggttcaagcgattctcctgcttcagcctcccgagtagctggaattacaggcccatgccactacacctggctaatttttgtctttttagtacagacggggttttgccatgttggccaggctggtctcgaactcctgacctcaagtgatccacctgcctcagcctcccaaagtgctgggattacaagcgggagctacagtgcccagccttgtgctttgtagacaagcaattctggtaactgattatgagtaaattttgtttcttccattcaaataattaaaacttttatttatttttcttgtgctatcttactgggtaggagctctggcaccatggtgatagccacaaatcttgttttgttcttgatttaaaaggaaattcaccttgaatatagtttagctgtaaatattagaagaatactctttgagatttaagaagttctctattcttagttttcaaagtgtttttatttttaatcaaggattgatattaaattgttttatcaaatgttttttctgcatctattcatatgtttgcatatctgttaatgtggcgaatattgctaactgatttagtcatgaggtattttcttatatctatgctactggattccatttgctaacattttgtttaggaattttagatatatgttttttgtaacattggcctgtaatgggagtaaattagtttgacaaaatcaaattttaaaatgcaatgtttttggcccagaatgtatcctatggatgtactccataggatatgcaaaagtatatgtacaagcatatttattgttataatagcaagaaactaaagacaaatgtcctttagttggagacttggtattttaaaaaagtacagtattttgttgctattacaaagaatgaggtagatctatttgtgctgatgtgtaaagttctccgaaatctataattagggtaaagcaggtggcaagagcaagaatatatatttatctctatcccgtttgtgaattttttaagtgatagcgctatggctgtgcatgtgctatttctggaagcgcactcaaagccttgtaacaccagttccctctggagagcagggatggcaggaagctgtaggactacgtctctttctacacctttttataattcataagcatgagcatgtattggtctctgtacacctgcccctgggcttgaggaggccctgctggctgcaatgtctcactttcacctaactgcacggagtctcagccacttccctccagccctcgaggactgtcacccatcctagaatggaggccttgcattaggcccgggtttggccagaagaatagagcagttggaaatgttaagttgacataaataggaagctctgtaacctcgtgcaagtgttgtcttggaaaccagagcctgggcggtctccatggaaaccgtgctcagccttctgcctgaaggagttaccacccactggtgctggagtgttacttatcagggacctcagagctccaataactgcttagggaatgatgatggactggtccctgcccaccctggccatgtcaggtgtggggccctgggcacctccagctctctgcctgggaaagaaaaagagcccatttccatgggacgtgccctcatggggaggcacagcagaccacccaaggcagcacatgcagtgtccccgaagtaaggagggagtcctgtgtcccgaggtcccggggatctggactctgccattgtcccctggtgcatctgtacagctgtggtgggctaacatcatctctgggctccaacttgcccttctgtaaaatggggagtttggaccaagtcattctgaaggtcttttccagctttaatgacacgtgttttgcatgtgacctggcagcacagggttcagaggagggagagatcagagtgactagtgcaggcttcctggggaaccatttgagctttgaaggtggggaagaggaatgtcagagagtgggcaaaatacaacaggaaaggtccaaattcaccctctgagggcccggggcacgggggcagcctgctctcctcctggggccctgttccctgtggggactggaagagaggctttgagtctagggcctggggcagccaggactgacgggggtgcagtcctagaagggtcggcagtcacgg

SEQ ID NO: 25656 - DNA, 2300 bp, Homo sapien
cccaaggtatccaagggatacccacaggagagggaggtggacaatgccttctactgcagagcagctcgtgtggtctctagcttctgtgtcaaaagagggagaaaataagagctcaggtgtacacgggcgggcacagaaactctggaagaaacttaacagtggtgccctggggggtaggtgagagctggatttaggagtgggacagatattttcctatatgtgtttacatatgtatttgaatcatgtgcatgttttcaaaaatttaaaaatttaaaaattttaatattgcaacagcaataaagtagaaatattcatttcttaaaagaaggtagccagggccgggagcggtggctcacatctgtaatcctaacactttgggaggccgaggtgggtgaatcacgaggtcgggagttcaagaccagcctgaccaacatggtgaaaccttgtctctactaaaaatacgaaaaaagttagtcgggcctggtggcacaagcctgtaatcccagctactcaggaggctgaggcaggagaatcacttgaacccgggaagtggaggttgcagtgagccaagatagtgccactgcactgcagcctgggcaacagagcgagactctgtatcaaaaaaaaaaaaaaaaaaaaaaaaagaaggtagccagaatgggagtagacaaggctccctttgagaaggggctgagcagagacactgctccctgcaggccactcagtgtggatgccttcctggggcctcacattgcaggctctgggtatggaggtgggtgccagacaccggtgtgtttcctccctgctactgtcccagcaggctcctggcctcctcccgcacccagggtgcgggcctggctgcccccccttgcccagtagccagcctttggcttagattgggctggtggcccagtaggggggcctcgctgggggcaggactgccctgtgccctgtcttggcacccaggccagcttggggctccacggcctggagcaggcagtggacttggcactgcccatcgcacaagcccaggtgagagcttaaaagttgtcatggttccatcaacctcttcaccagacagtgggaagacccagctccagagggccaggtggttcccctgcagtgacttgcaaggtgttatttacagaggggacccatgtgttggatgaatcatccaaaaaacccaggagtagtttctattcctgtagacacctgaaagtcccagcacgcatagcttttaaaaattgcttgtgtttggtcctccgacagggcctcccagcacctccagggcatgagagctgcatctgccggggtagtttcagcccagactttcctgatgggctggaatctatgagggctcccagctaagagccacccaggcccacgggtgagtctcagccctcccagccctgaaggtgggagatgccagggaaatctctgcttgcagggccctaggaagccacaggcccaaggctgccccaaatctctgtgcaggcctgggacagagaagccgaggctggggaacctgtggggccccactgaccattcttgcagacacacatgcagtggctgaggtctcctccgacgctaggcacgcaagtcctaacctgcaagtactaaatagcaccaccttcctttcctttctgtgggcagcagtttcaaatcctaaacccccaaagtgctggaagccacgacggcccttggcaggtgctgagaatggctgcccctgtgtggtgcccctgttagggtgtctggggtgcgtaggaggcttcctcctccagaggcttcccagggcttgacacatgcagtgtgatttttggctttttggttttttgttttgttttttggagctgcgggaggggggcgtgcagatcttccaagagggcgggagagtgtagaccctcctcctggaaactgctccccatgtccacactctagttccacacagcctctctgtagaccccagagcaagagcccctaagccagacagggtgacactggagcggctcaaagagcatctggtcccacccctttatttcactcacaaggaagtcgagacccagagaggggaagtgactctccccagaacaggctgacagccaggcctggaggagaaatgacatctctcagccctctcagctgcaccggaccaccaacaggtaacagcctctgggccatttagagaaactaaggcacggagcctccaacctgaccttgctcttgtggactgcaggtaactctcctaagatcagtggggcttgtgtgggcctgggctttgtgcacacctgtcccaactcagc

SEQ ID NO: 25657 - DNA, 2300 bp, Homo sapien
ttgaggccctcggccgaagcccattggtacctgaaaatccaactttgcagagattaatgccttaggagttcctgagctgtctgctagatctcaacagggttcccggcctcggtttccagtctctctgattctaaatggagtcccctcaagggttccattgctcttggcttcaggaaattaccagcttcatacagattcacttgctcccagagcctccttaggccaaggtcaaccaaacacaacccaatactcttgagctgagcttgccttcacttctgatccttcctgcctttgttttcttcaatcttctcgctcagggaccttttttttttttttgagacgagtctcactctgtcgtcaggctggagtgcagtggcacaatctcggctcaccacaacctccgcctcacaggttcaagtgattctcctgcctcagcctcctgagtacctgggactacaggcgtgcaccaccatgcccagctaatttttgtatttttagtagagacaggttttcaccatgttggttggccaggatggtctcaatctcttgacctcatgatctgcccgcctcagcctcccaaagtgctgggattataggcgtgagccaccgcaccaggccactgggggactttttaattcattatttcaaagcctgtataattatctgactccctattgttttctgggatcatgaaaataatgagccccaaactggaatttagtccttccgatgcccccagccagctgtgtgaccctgggaaagtaacttaatttcgctaaacctcagtgttctgaggaaaggtcatcattaaggtatttttaggctctagaagccctaaactatgtcctgtcatttcagagttcatgttgggtctggctttgtgtggcccaaagccccccatttttttttaagacagagtctcgctctgtcgcccaggctggagtgcagtggcacgatctcggctcactgaaagctccacctccaaggttcacgccattctcctgccgagtagctgggactacaggcacccaccaccacgcccggctaattttttgtatttttagtagagacggggtttcaccatgtcagccaggatggtctcaatctcctgacctcgtgatctgcccgcctcagcctcccaaagtgctgggattacaggcgtgaccgaagccctttttatctgcataggtctgctctaaaccttccgctggggcaggagctcctgcgcttgccagtcccacactcacccacctgtgacacactggcgatgaaagcagtctcctcaggtgaacacattttatgttgcagtcacagtatgagcttcagattgtcttttaaaaatacttttccttcttccatcctaaaacaaaaatcacatttaatgagcacattaaattaattaatctagagaaagattcagtcacctgtttaacccaaccaattggggtttgggagatagtctgtggttgccattgccatgagtttgagacaaatgttagttttctgaacagctgttatgttctcagggaaaattatctgccaaatgcaaaggttcttataaaagtcaagtcaacccccaaactcccctcccacagtgcgggagggcaggctttgggggaaggggtaagctactctgagatggtagcaggctctgggccatggtaaagccttcgaagaagctccaaatcttcaggaagctgacctgaagatgaatgcgtggggaacatggatttttgaggtgtaggagtagggggtatgtggaagccagtgacagagctgagcgtcacatccagggtatcttagagcaaaacaggtagctcacatggacccaggaacacgccagcagagaggtgtctgaaggcagcgctcaggtcgcagaagcatgaggatctggctgtcaccagccccgtagccagggctgtgaggaccagggcagccgctgtcccctgcctagcctggcagcctgggatgaaggaggacaccaggctggtgtctgcagagaagactgtcccttgaagccctgccataggagccaccctggcttttatgacctcacaggaggtgtgggtcactgttctctgtggggcctgggtccagctggaggcccaagccaggctcctagggcagagggcaaacggcccctccaggagggagccgggagattacgcagctccatgtaggtccacgtttaggttgggaggatctaccatgaagaaggtcaagaagaaaaggtcagaggccagacgccaccgagactccacctcccagcatgctagctccaattccacctctcagcagcc

SEQ ID NO: 25658 - DNA, 2300 bp, Homo sapien
ctggctcatggcagatccaggagatgctcggacagagatgttcttcctcttgtggagactcctaggcctcttggaatggaaaggtcagtgctgtggtttaaagtgagggttctggagtcagaatagagtgggtttcccttctcagggctaccagcgtctgctcaggagcaacctgtttgactcctatgagcctcagtttccccatctataaaatggagataatatggaagaacttttataggattatcacgtgtgaaaattaagacacctgatctgaatgctaggtacacagtaaatgcttagtgataatgttagtttgctatcaccattattgttagtagtataaaccagcccacctcctgaactccacttgaattccctctacacaatccaatgcttatacagacactgtttggctcccaagaagacagggaaccacttttcctgacagccattccattttcagacagagctaattgttgggaagttttttatgttgagccgaaggctttctgtcactaatgtcttccatgggtaagattgctaatttagcaaataaaaatataggatgcccatgcaatactggggacacacatactaaaaatattatttgttgtttactaaaattaaaatttaactgagagtcttgtattttgtctggctatcctatccatgggcctgtatttgtctgttttcacactgctgataaagacatatctgagactaggcaatttacaaaagaaagaggtttgtggaacttacagttccacgtggctggggaggcctcacaatcatggtggaaggtgaaaggcacatctcacatggcggcagacaagagaagagagtttgtgcagggaaactcccttttttaaaaccattagatctcatgaaacttattcactatcacgagaacaccacggaaaagaccctcccccgtgattcaatcacttcccactgggtccttcctacaacacctgggaattcaagaagagatttgggtggggacacagccaaaccacatcagacccttagatctctgaggacaataaggaacaagtctattcacatcttccacttgacagacagacatcctccaattccttcaattgactgtcatacactaaatggtctccctgatccttctcatcctccatcaacccagactatcttccttggactagtttgtcaggcatcttttacagcccaaaaggatagcttgatgaggacagaataaagcagtatcatcacctcccttattctaaaccatatacttctataaatgcatccttggtttttattttttagcagttgcatggcactgctgattcctagtgagcaagtattactatggaaccaagttaaatgtttatatgtatgtgtggctgtcttcagtgagactcaggatgatgagaaatgacaaaacccaggaatcctggtctcttgggtagaaacaaaaacaaaaaccttcccactctacagcacagctccaggatacacgttaaccatgcatcactatcctacaagaaccagcctttgggatgacccagaactccatcagcaggaaggctggaactgctgaagctagaagacagcccacctgctttcctggattgaggggctgccttcacgttagcatctggagataaaaggcagcaagaggagcggcggatttcgggtgctggaagggcttggaatgctggctgccgggaggtggtttcaaggctggaatgctgtggtgtggattcagggctaggctgctgtggtgtggattcaggactaggctgctgtggtgtggattcagggctaggctgctgagaggtggaattggagctagcatgctgggaggtggagtctcggtggcgtctggcctctgaccttttcttcttgaccttcttcatggtagatcctcccaacctaaacgtggacctacatggagctgcgtaatctcccggctccctcctggaggggccgtttgccctctgccctaggagcctggcttgggcctccagctggacccaggccccacagagaacagtgacccacacctcctgtgaggtcataaaagccagggtggctcctatggcagggcttcaagggacagtcttctctgcagacaccagcctggtgtcctccttcatcccaggctgccaggctaggcaggggacagcggctgccctggtcctcacagccctggctacggggctggtgacagccagatcctcatgcttctgcgacctgagcgctgccttcagacacctctctgctggcgtgttcctgggtccatgtgagctacctgtttt

SEQ ID NO: 25659 - DNA, 2300 bp, Homo sapien
acaccagggactgttgtggcgtagggggagggaggagggatagcattaggagatatacctaatgctaaatgacgagttaatgggtgcagcacactaacatggcatatgtatacatatgtaacaaacccgcacgttgtgcacatgtaccctaaaacttaaagtattaaaaaaaaaaaaaaaaaagagtagctgcatctggcaaacccgggagatctttgcactctccagctcccagctttctctccctgcccagctgggcagcccttcaagccctccagccccttcctcttaagtagataatgaagaaagtggctgtattgtgtgtctcctggagtattggcgttggttggggggcggagggtcccagcaaggagacctgtcacctgtgatgctgccaatgtcacattcacctgccagcctggcctgcctgggcgagcgcgcctgccctaaccctcctcccttagggtgcaatccatttttttgttgaggctgtgattgttctgatttttgtttcaacccctttgctgaccaggcctccaatagaaagaagggaattcacacacattttctataccctaatgagtgcatgcattttttttttttttagatgaagtctctctttgttgcccaggctggagtgcaatgatgcgatctctgctcactgcaacctctgcctcccagtctcaagcaattcttctgcctcagcctcccaagtagctaggactacaggcgtctgccaccacacccagctaatttttgtttttttggtagagacggggtttcgccatattgaccaggctagtctcgaactcctgacctcaagtgatccacccactttggcctcccaaagtgctgggattacaggcatgaactaccacgccctgtccctcctaagctttttgtagacacattgctgttgcctgagcctgaagagccttttctcctccctcctcctcacctggccaatcccatttgtgcattcagaactggacttcctcctccgggaagcctcccttgaccttccctgctcccacttgcaagttcactggcgaaatcccagaaccctttatccctttgctctctgagctcttaccacatgatttcgttcccttgtgaacatgattttgttcccttgtgggtttaaacaccatctgcagtcccatttcctgataccctgcctggcatgcagacagagtgaatgaatcctcccttccttttaaataaacactaatacttttgagattttaacactttgcaagggaattgttctctatgttaagcgctttcctacttttataaaaacatactgaacaaaattaaacctctcgcaaatgactaaaggtcgtgagtggaattataacttatagcccactgatttctttgcagcttttgcagtgggcagaactattatcttcacaccaaatggattcatgtcactaagatttcgctagtggttggatctgtttttttaaagttttccaatttctttcctcaccgtctgatgataattcttattctaggttgcttgccttttggcagtgcccttttacccagttcgtggtacctaatccagctgcctttgggttgaaaaactaaggatacagtctctttacctttgggtgcgggttaagagtaaattggtcctgaataaagattatgaacaaggattttccttgttttggttgcctgaagtcttttaaaaataaataaataaataaaataaacaacctagttcctgttgactttatagattactaaaaaatgtatctattcctgccaagaaatagtttgaactaaaatcagagggaacgtgcagctctttgagtattttgtttggtgctatgtaattgtaattaatttcatgtcattttcattgctttatttcctcaacatggtacctacatcacagggcttttgtaagaattaaatgagataacatagataaaagtaaagcaatcatttttaaagttcggttttaaaaacccacccacttttgcaaatcagactctgtgtttttaatcagacagttgaaactagggcagttgaccgttggggcacttgatttgctaaacgaaatctctcagtcttgtgaagtgggaaccatgtgaccctctgactcaggttttgtgttcttcctagtggaaggagcctgggagaggccaggcctccccggactgctagcctgcttttcctggggtccctggagccggaggaagaaccaggatgttgctgcctgcagaagctcagctcagggtgagtgctccccgacctcctgcatcctgagggccaggtgcatggaa

SEQ ID NO: 25660 - DNA, 2300 bp, Homo sapien
catgaaattctgatttctggcttctcttagaaaaaacatgtcttccaacagtcaccctgcattcttggcaggaactgagtagcagttgctctgtttagcagttgctctctttagatggggcactcactttttttttttttctttttagacggagtctcactctgtcgccaggctggagtgcaatggtgtgatcttggctcactgcaacctccacctcctgggttcaagcgattcttctgcctcagccttctgagtagctgggactacgagtgcccgccaccacacctggctaatttttgtttttagtagagacggggtttcatcatgttggccaggctttggtctcgaactcctgacctcaggtgatccgcccacctcggcctcccaaagtgctgggattacaggtgtaagccaccgcgcccggccaggaattcactcttcatcactgtccccaccaccccctagtgcctccttgacactgttagttgccattcaccatcctgtggagcttgtattttctttcgctggtcctgctttactcattttcattacctgttggcatttgtttgtgactcctctaggggtttggggaatacaactgtcttcatgtgagggcttggtagaagtgcctctgtagagccaggtgcagtgactcacatctttaatcccagcattttgggaggccgaggcgggcggatcatgaggtcaggagatcgagaccatcctagctaacatggtgaaaccctgtctctactaaaaatacaaaaattagccgggtgtggtggcatacacctgtagtcccagctacttgggagactgagcaggagaatcgcttgaacccaggaggcggaggttgcagtgagccgagatcgcgccattgccctacagcctgggtggcagagggacactccatctcaaaaaaaaaaaaaaagaagtacctctgtagaatgacaccccaagtaatctgtttactttgcatgcacatcttctcgagccctgcctttcaatctgagccacaggctcttcaaaaatgttcaataattatatttaatatattttaaacaaccacagtttaagaattctaatttaaacaaaaaaagtcacagatacaacaaaatgtgttatcaagcacatttaattcactggcaaccacaagacattgattgtgcccctaggttacgtagaaggccgtagaaatgaactcgccatcgctgtgcgattgaagagtttagcttgatagtgcaaggccggtggctgaaaaaaatgctaccgtttgccctattccttgtcaagactttctcagtactgactcttgaaataaattgacttcttgaagctagcataagactgcaaatggccattgcaactgccatttcaaatttctgaagatgtattagaaacgaagaacccactgccgtcgggggaaagaggacctgggcagatagaaggaaagaatggaagacattttttctcccttggaaaggctttcgccatataactactgcacattttaatatattgacaacactggacatttttccaaaagtaagtaaaaaccttcattgttcaactttataataagccaatgattacttgtggattcattatgataataaagcacttctatggggattttcttttttttatgataggttttgctttagaaaacaattgaaagccacttttctgggaaaaaaaacaaaaaacaaaaaaaaacgctgtttgcggcagccccaattccctaagcattatctggtgggagatgtgttgcagcgagacctcccaccagtaggtggcactgcgcgcaatgctcgcacctcccctcaacaccctttctctcagcaatggcgggtgatggtgggggtcctctctttgcagggctggccattctaatgcctgacctcaggtgcagaccagtgttccgttgcgcgggactcctgacctcgaggaggtttagagaaaacaatggtgttctctgtgtacccttccgcgagggctggggagtataccgccgcgcagaagacgcaggccaggggagaattcgcgccgggcggcaggcggggtggcgggcagcccctgggcgggcggggtcctggcgagaagcgagccggcggcctgaggaggcgactgactgagcagcgcacccggggagcaaggaggcgcggtgaactgagcggcccctgagctgacagatacactgcgcagctggaacggcgagcgagccgacgggcgagtgaggggcgcagccatgatcacctcggccggtgagtgcggcccgtagccagcgcctggagggagga

SEQ ID NO: 25661 - DNA, 2300 bp, Homo sapien
acttgttactcaaatctggagtaggcagggaaacatgtttattaaaattgtctcacatgaatttatcactcaacattcttttgtactatctacatctaccaccatgtacaaatgttattttcactaaagaagggggagaggcaaagttttgtgtgtgtgtatacgtctgtgcgtgtgtgtgcgtgtatgtgtgtaaagagtaaaaagatatggagtggggacttagaggctactttctacttaaagtgcttagggttttagagcacaggtttagttatttgctgagactcaactatccttttatataattatttatttattattattttgcttttttcttgattctcagctatgcttcccataacttgagattgccaaataagtagctgttctaactagttacgttccttagacattaaacagacttaaaaaagcaaaaataaaaaaaatcagagtaccaatcttactttttataagttgaggcaaaaaatgagtgaatgtgagtgaaaggattaatacaggcaaaatacaacaatgactgcatttttataatatacttaatatttaaaaaattttatctataaacaaatcaataaaggcttatttcatacaagtcttttcactggatataaaatggtgctgctattttcaatctgacattacttgttttgcagatccctacctgccttcataagcacagatgtcaaagtgtaactcacaactaagcagtatttaaaaataatttcttttcctcttttttttttaatcttggagacaagatctcattctgtcaccccaagctggagcgcagtggtgtgatctcagctcactgcagcctcgacctcccccaggttcatgcaatcctcctgcctcaggtctcccctgacccctaaccctcaacccctccgccgccgcccagtagctgggactacgggtgtgaaccaccacccttggctaatttatgtggttttttttgtagagatggggttttgccatgttgcccaagctggtctcttctagactcaagcaatccacctgtcttggtctaccaaagtgctggaattacaggaatgagccaccgcaccttgccttaaaatattttcatattcctgaatagaaattctggtacattaaaaaacatctgatttctcttgaatattatttcatctagaattcttcacaagtattttttctaatatagtaaattttgagtttttaaaaaagcagcaaatactgaataaaatctgaagtgctcagcagagctaaaatgaactaagtattttccaataacattcaacatgagcaaaggaatacaaatttgaaacaagaaaagggcacaaatgtcatcactgatttataagtaattaattttaaaatatgcatctataatgatcttttaaaaggaaaccttgagaatgctgaggttctaatactaagctagtcttatggttacagaaaacttaaatagcataactattaagatttaaacaccaattttctgaaataaggcaaaaacgtattttcattacttgtattttctccaacgtaaagtctatggggaaaaaaagctgtgaaccactcctaaacccagagatcatctgtttaaaaataagcagtaaaaaagtttctgctaaaacctatgtatacatgtagaattcaggcctttctgtgctcttctatataaggttgcaaccagagcaaattaatggtgttccacagcaaaggcacaaaagctagataagaatcttgtttcactgctagaaatcagaactgtagaaatcactataggcttttaaaacggcagaatcttcaaagaatgaaacctctaaaatagctagattatatcttattttttctcaaatgtgaaaaacagctcaggcttaaccccaaacaaaactatctgaagctaaaatgatcaagtttattacagtccccccaaatattaaagagagctcttaaaaatataacttgaataagggccatgaactggttcaacatgcttaacagtggttttatgaattacaatgaatgctgctactctctaaaaatgaatgtatcaaagaggaaataacctccttggcatgcttgcagctatacaacgtatttgtttcactgctttcaaccgcctgtgctggaggctcagaataagtcaatgggaggaggatttcagtcacagcagcaagcaagtctagtgaacagataagatgacatgctcagcaaaataacaacgaaaccagaggtaagcatttaataaacacatatggaattaatctaaaggtttttttttttaatcttcaaga

SEQ ID NO: 25662 - DNA, 2300 bp, Homo sapien
atgaccataatcccggcagtcaggcaaatgcactcaggagggaaagcaaagcaggtggggtgttcacggcagctcagagcccagggtccagagacacggagacctgggtttagtcctggtctcctcagtggtgtaaactttgaggagtttcttaatcccgtatgcctcatgttgttcatcttgccaaagacaaaacagacagctctaatctcagctaatcaaccatgagacaaagaatgagaagctgaaaagtctgtccttggccttgccggcagactcaggcagaagggaaaaggtctgcatttgtccttgtcacaggtaaacaagggggtcatccgtgcatcatatgggaggcatgagaaagacaggactgtgggtctgatgaagtcatatgtggaagggtagttctttctgataagctacttcccagaacacaaaagtgtggaggattttagaaaacaaaaggtttgggggtgcgtgggtgagatttcttaactgtggctgttttctaagagcacacagctcaggttaattacaacattgtcaatcagtaaaatgctgaaaatattattcatctcatagatgtggtgtgagaattaaaaacttttttttttttgagacagagtctcactctgttgcccaggctggagtacagtggcgtgatctcggctcactgaaacctccatcttccgggttcaaggattctcctgcctcagcttcccgagtggctgggactacaggcacatgccaatacgcccagctaatttttgtatttttagtagagacaggtttcaccatgttggccaggctggtctgaaacttgtgaccttaggtgatccatctgccttggcctcccaagtgctgggattacaggtgtgagccaccgtgccgggcctggtgtgagaactaaagaaaacaatctatatgattcacttagcacaatgctgggcacacatataggctgcacgttttgcaaacaaaaatacagaacaatataacatcctacatgcacaataaaatgaagcagtttttgggatttacttacactaaaacattatctaaaatttacatttaactgtgtgttctatattttgtctggcatctcccggcatacagttgtgttgacgataaatattatggccatggattgaagatttattttcaatccatattacctggacagaagatagggctctcttctactaaatacagctttttttcttttggaagacaatccactggcagggttggggactggggaagtggtggccacagcccatcttagggcttcttcaaaggcgagctgacctaccttctccgtgccccattccctgtctctggccctggtagcctcctccttcttggaagcatggaggtggaaacactgaggtggcaacgagagactcccacggaatctcaacgcctggaggggagggattttctatccatggccatctcttcaccctccagcacaaagttgggtgactagcaagtgctcattcagtgctgatgaacttcagttcaaaagcatcaggtgcaaagagagggaagacgtgtgctcctgatttatttttaatagcccacatttgacatggaaaacaaaaagtttctctgaaatccttggaaaccgctgcagtggggcgggaccctggtccccggagctttaatgcacatcttgggcgtcacttttggttctaaggtggccccaggtccctcctttaagatgggaataaccatgcctgactctttccccacggacaccacactgtcctagtttgtgttctctacgcgaccacgagctccttgagacaaggggttgagcctgctccggctcatcccgagagccggcgcagcgactggcgcaacgaaagggaaatgaacgaatgaatgaacgaacgaaagtggagtggtggagaggaccacagaagacgcggtcatccagcgcgtgaaccttcaccactgctgggctgtggaccctcacttccgccgccaggaagtttcggggtcgcccaccttccctcccaggctgctccgcgtcggcggcgccccgcgcgattggctgcgccgcccccacgtgacgccggggtggcggcggcggttgcccgggtgacggctgcggaggtggcggccgggctgggatagcgcgagtgtccgcggccgagcagcaggtaagcgcgtccccggatgcagccgggccaccctccgcccgccgtcctggtgctgggaggagcagcggtgcgtttggagggccgaggctctgcggacctcttgttccgaggaaaaacccgacgcgcccgctc

SEQ ID NO: 25663 - DNA, 2300 bp, Homo sapien
gcagtgagctatgatcatgtcactgcactctagcctgggcaacagagggaaactctgtctcaggaaaaaaaaaaaaaaaaaaaaaggacatcagtggtgtcagtcccctcctccatactctctctgagcctcctgttactgtcagcctaatgtccaagccacttaccagctctgtaaggcccacctgacctggccccggccccccattgcctgctgctgtctgcctcacccctagctacatcccaataccccaagactgcagagctcttcagcctgaggcctgtgcactaacaaagccatcttccccagatccaggtgctcaatctttgctgaaatgtcacattcccagtgaggccatcaaccactctatctaaaataaccccatacccgtctccttcaggttctgtccctttccttgcgctgttttcttcatgtctggaatcaatttccactccgtccatgtttttgagcctgtactgtgtgccaggcactggtctaggcacaggggaacacctgtcaggtgctgttgagaaaaatcaagcagtacaaagggctgagaagtgatgggccgacctcttagaaagggtggtcagggcaagactctctgaggaggtgacagttaggcagagacctgaatgagacgtatctgaaggaagggcagtgagccagagttcacgagggcaggcgtgtgctttgggtgttcagtgggtgtccacaggaaccacacagtggccagtgtggctcaggtttacagaacaaatgggagtgtgtcagaggccaagttgtctagggctttgggagttgagcctaaggagcctggccttcatctggagggcgctggaaccacaggagggtcccaagcaggaggggaatgctcacttgttaaaagtgtagaaattggattgaagtggagagaaaggaggtggggaggcagtggcagaaaaatgtaaggttacagactcagaagagatctgactgagtgtggtggctcacgcctataatcccagcattttgggaggccaaggcgggaggattgcattacccaggagtttggcagcttagtaagaccctgtctccctgtctctacttaaaaaaaaaaaaaaaaaaattacctgggtatggtggcatgcacctatagttctagccactggggaggctgaggagggaggatcccttgaacccaggagttttagcttgcagtgagctatgattgcaccattgcactccatcctgggcaacggagtgagatcccatctcaaaaaaaaaattcgatgagttctgacacattctgaattttatagatgaagaaaggctctgcacttcagtgagttgtctcagatcaggtgccagtgaatggcatggttaacattagagcccagaccttttcattcctctggggttacgggcaactgctttgggctgagcctggggtgtgggccatggggaatgactgctttgggtacaccttgagggagggctagtagaaagagtaggaagagtttcttttgactttagccattgtatttcctagtgccgctgaacaaatgaccataaactgagtggtgtcaagcaacaaagatttaatatcttctagttctggaggtcagaagtctgaaatggctttcactgagctgaagtcaaggtgtctgcagtgctggatcatttctggatgcagtgggaggatctattccttgccttatgcagtttttagaggctccttaccctccttgtcttatgccactttatcccctttaaagcctgcagtggctgttgagtctttctcacatctcatcatgctggcactgaccctcttgcctccgtctgcccccctccctctgctgtgactgccttgggcccacctgggtaatccaggatcatcccccaatttaaaggtcagctgatgagcaaccttaattccatctgcaccttaattcccccttgccgtgtaacctcacgtattcacaggttctggggattggcgcatggatgtctttgggggccattattctgctcaccacaaccacctttttgtagtttcataggtggttgaaatgaaagctgttgtcttgtatttttgccttctagagatttttgctgtgagaattaattaccagtaacagttcaatatgggggacattctggctcatgaatctgaattacttggactagtgaaagaggtaggtatattatacaaagcagaggtcacagagaaacagatcttgaaaacttgtgttttaaaatgcaacaaactatttagtgccttgtaatgtttcttctattgttatgttggagctattttt

SEQ ID NO: 25664 - DNA, 2300 bp, Homo sapien
tctggggattggcgcatggatgtctttgggggccattattctgctcaccacaaccacctttttgtagtttcataggtggttgaaatgaaagctgttgtcttgtatttttgccttctagagatttttgctgtgagaattaattaccagtaacagttcaatatgggggacattctggctcatgaatctgaattacttggactagtgaaagaggtaggtatattatacaaagcagaggtcacagagaaacagatcttgaaaacttgtgttttaaaatgcaacaaactatttagtgccttgtaatgtttcttctattgttatgttggagctatttttctattatataatattccatgtatttacattttggttttataactaaacaaatcttaaagccacttaaaaagtcccttgaaagaaaattataaaagcaatacacgtccacggtaaaagattcaagcactacagaagtataaaaaggaaatttccctcccagacttttttctatgtatagtaaaaatatattcacatgcctgtagtttgttttacagaatgggatgatacattgttctgtagcttgctttttatctgccaacaataatatagcatgaacatctgcctatgatcggccctagacatttgaatgccatagagtatttcattgagtggctgcatcataatttttttaactcattgtctggtaatggcctaggtttcctacgctaaaagctttgacaagtagggcccaggccttaaactttctggtgctaaagaaatggttcgcgcttgctgctgcttaactgtgtgagtaaccacctgcaggttgcgagagccacgggcctggagcagggatgaggcacccaccgtgcaactgcagatttggaatttggtggtgtgatggcgaatatattcttttttaaaaaatttacatttaaaaatctttttagagacaaggtcttgttctgccgcctaggctggagtgcagtggcatcatcatggttcactgtagccttgaactcctgggctcaagcaatctgcctgcctcagcctcctgggtagctgagactacagacgtgcaccaccatgctcagctaggttttattctaatttttgtagagataggatctcactctgttgtccaagctggtcttgaactcttggcttcaagcaatcctcctgcctcagcctcccaaagttgtgggattgcaggcatgagccactgcaccctacctatataacacattttcttttaaaaatttatttatttgagatggggtctcgctttgttgcccaggctggtctcaaagtcctaggctcaagcgatcctcctacctcagcctcccaaagtgttgggattacaggcatgagccatgccacctggcctataccattttttcttttttttttctttttttttgagatggagtctcactctgtcgcccaggcaggagtacagtggtgctttctctgctcactgcaacctccacctcctgggctcaagcgattctcctgcctcagcctcccgagtagctgggactacaggcacgcgccactgcgcctggctaatttttgtattttcagtagagacggggtttcaccttgctggccaggctggtctcgaattcctgacctcgtgatccacccgccttggcctcccaaagtgctgggattacaggcttgagtcacggctcctggccggtagttctatttttatttttttgaggaacctccatacagttttctataatggccgtaccaatttacagtctcaccaagagtgcacaagtgtttccttttctccacatccttgccaagactttttatctttcgtcttttttgtaatagccattctgacaggtgtgaggtaattaggtctctgtggttttgatttgcatttctctgattgttagtgatgttaagcaccttttcatgtatctgttggtctttttaatgtcttctttggataaatatctattcagatcctttggctgttttttaattggattatttgtttgttttgctgttgaattgaattatttattttttatagtatttagattttgctgaatttgaagacaccttgaaaacattttcaaaagaatgcaaaataaaaggaaaaccattgtgtaaaacagtaggcggatctttcagagactccaaatcattgacaattcaggtaacattttgcttatttttcatccctgtagataattcaggatgctcccaacttgtggaaaatgctgctgttggatagtgctagaatagtttttgagcacttgctcagagttactttagatggcaca

SEQ ID NO: 25665 - DNA, 2300 bp, Homo sapien
attctttccatttcaaagaccttaaatgttttgtgtgttctttatagtgcccagattagatattgcaaaggtgtgggaaaccagggttggtgtgcaggaatcgcaggctcaggagcttgaatcctgtgggatctctatttttctatcctttaccactgaaaaggagtatatgggagatctgtggtgttgagtgggttgtgagaattttgggtgttgaaatttacaacgaggtatgtagtctgatgtcttctccacagaaggatcttgtcgctgcatttgacaacggagaccagaaggtgttcttcgatctgtgggaggagcacatttcaagttccatccgagatggggactcctttgcccagaagctggaattctatctccacatccattttgccatctatcttttgaagtactctgtggggagaccggtgggtttacctggtgatgcgggtgggtctgagtggtgtgttaaggaacagtgtttgctgtcattgtccacatgggcatggatttcatatgtggctgtgctgtcataatgcttacgaggtacaggcatcctctctcctggtgagtgattttctactgtattcccagcagtttatattctaatttctatggagatttaataatttctgtaatcaaagctatattcctaaatacctcaagtttttgaaacctcatcaaaataaagtttatttggcaacttagtatgtaggcgtgtatgtctaagagaacatatatttcagctgcatattagaccctatattagaacataaatttatttacttatttattgtagagaaagggtcttgctatgttgcccaggctggtcttgaactcctgggctcaaacagtcgtctcaccttggcctcccaaagtgctgggattacaggcgtgagccactgtgtctggccagaacacacatttaaacttaggtagtggaaaagagtacgtctctttgtggaaagcccttttgagtgataggttgaatttagcatctgtagtcctttcccagatggggctggagatgggaagagaggagaaggctgaaatgtgaagctgctgcggtggctgagctttgagtgcagagtaaatgacagaagggcagcagaggcaagctggcatttgaccccgtgcattaatgactgccctatggaccaaggtgaacacatgagaatgtcagaacaccaacggtggggacagtggtggagggagcagcaggaccatacattgtggtagccgttgttggaaggctcttcctcaggttatcactcttgcagggaagatcacaggagattttcattttctgtttgtatttctgtttaagtctgggggtcaaaagagggctcatggtataggtcaactgagatgtgtttgtaagaacaggcttagtctatgtacgagactgtgaaggccatgattagtagagccagtgtgggagcaaagccccacattcacctcctctggttttctcattgagggccaagaggagatagaagccccgagaggggaactgacttgcctgggatccacatggagtagtgacacagagcgagcccaggccttagcacaagaaaggaaaggagtgacttggaagcttttgtttccaacaccataaagaaatgcctgttaatctttagaaaccgctcctgctggaggcatggtaatgcagacagatacttatttatatctgaaaagtagaagcaatgtgtctaggtaataatggggaagctagttaaataaatgtgatagacaacatgaggttttgtcctgccattaaaaatgtttatgaagaattttaaggacatgagaaaatggcaataataaagttaaaaagcagcatattgaactgtatatatagttgtctgatcttcctgacatagtctcattaagggggaaatttagggtggatggtagaattctagagacaatgcacctgccaggttagataggggatgccagcgacacgactgggacagaaggagcctcagagagaggatggggtgagcagatagactgggcattgatctggagacctcaaacaagtgttttcccttcttctaggacaaagaggagctggatgaaaagatttcctacttcaaaacctacctggagaccaaaggggcagccttgagccagaccacagagtttcttcctttctatgcccttccttttgttcccaaccctatggtgcacccctcatttaaagaactcttccaggtaaatgtcagcttttaactcttgtgtcagatcctgggtgacattgtggttttaccttctgtatgctgggggcttctgaa

SEQ ID NO: 25666 - DNA, 2300 bp, Homo sapien
caggagaatcgcttgaacccaggaggcagaagttgcagtgagccgagattgcaccactgcactccagcctaggtgacagagcgagactccatctcaaaaaaaaaaaagaggcctttaggaaggtggggagacccaagtgaacccatagacaaaagttcagccaggtaggctgagcgtggtggttcacacctgtaatcccagcactttgagaggccgaggcaggcagatcacttgaggtcaggagttcgagaccagccttaccaacatggtgaaaccccgtctctactaaaaatgcaaaattagccaggcgtggtggcgcatgcctgtagtcccagctactcaggaggctgaggcaggagaatcgcttgaacctgggaggcggaggttgtagtgagccgagattgcgccattgcactccagcctgggcgacagagcgaaactccttctcaaaaaaaaaaaaaaaaaaagttccgccaggtagtcaaggccagattgtccaaagattaacaatctcttatcgtactctaggcatatagtcaacaaaaagaacttagaagcaattacagaaaccctcccctaaccttgtaagttctctttatgtggcctctccctttcccctcctaaatcctgccccactattaaggtggcttccccagggtcctggggtcagataatgaaagcaaatgccactgtaagaaacttcatcattttcccacttttattcattcactgcagaaaaactgatgttgccaactgcagtgtggaaggaggcaatgtggtcctcattctatccagcctcctccattaccataacaacccacatcccatagtaagcaggagagaggaaggccaggaagcctgggatggggcagaggtggtagggaaagctcttcggctgtttctgtggactcctgacatcattcacctgccagaggtaccaagcactgctggaatccggggccaggtttgtcactgagtctctctccatgcccttccctgacacccagcagtccacatccctgcaagtcacatgcgtgaatcccttctgcacacgagcagaaagtgaagagtgagtctcaagagagctgcttggccaaggccagaagcccccaggtggcctttcttctagctcagggttcacagtctggctgtacagggcggtcacctggggagatgtttaaatctttaagactgtaccccacacaaattaaatcagaacctctcagagaggggatttcaagctcccagttggggtctcatgtgcagccaagggcagagcctcactgcctgggtcgcagaaacgagggtgtccaaggggctcccgatcaaaaggaggcagctgaggagagcagccagggagctttgaaacctttgtcctttttaggctgggtgcccatttgccttgaatatctcttctttgggttgtatggaacagctataattcatcccaaattcaggtgggcaaaaattagaactttattttttgcagtaacttcatttctgactctcagccctcattctggcatattgaaaaaaataaaaataagacctgaacctcagtgctgcctgaggttgctctcctgccttctctgggtaggccacggtgtgggggcggaggattgttgcacatccgcgccatagtcatcagctgtgcccagccctcccaggccaggagttctctgcattcagcctgagaatcttcttcaaggccacctgtgtgttttagtccactgagatacatctgtctccttgtcttccctccttcctggcagccaagaagcagggtgcaggccccctttactctctggcccaaaaaacatctttttctcttttataagccttgcccttggaccagcctgctagagtgggataaggggacaatttacacttttgtaagggatgtctctggaagaaattgtgttgggcagagctaaaccttctaaccctgggcattctggaaggcttgggaaatacctacttagttcagtaagttactgtttaaataaagagggcctaaagtatttatctttctatctcaagcacctaagttattctgtatccataggacagcggcaggagcccgccactttgaaacaaaattttacagtgattgaacattcagatggaagaccagacacacaagtacctcgggacatccatcaccagcatcaaatcaaagtgaaacccaggaggagagcctccatcctgtcttcatcctcaagtggaaattaatagcagagtacaaattgttgctagtgtatcagttcttaagatgtgtgaaatggcattgccaccatctt

SEQ ID NO: 25667 - DNA, 2300 bp, Homo sapien
ggctgcatggatgtgtggagagggtgggatgagactcataaaagcagagtggtaacaggagcctgtaactgtacccacaagtaagcaacaatgtcacataggcaaaaggtagaatatggaaaatatttgggggaatagtgttatgagtgatacaaaaattttattttttgagacagggtcacactttgttgcccaagctggagggccctggcgtgaacaaagctcactgcagccttgacctcccaggcacaagtgatcttcctgcctagcctcccaagtagctgggattacaggcacataccaccatgccccgctaattttttgtatttttagtagagatgggttttcaccatgccggccaggctggtcgcgaactcctgaccttgtgatctgcccactttggcctcccaaagtgctgggattacaggcatgagccaccgcgcccggcctatttttctaattattaaagtgatatgttatcaatgtaaaaaaaggcatatagaaacaaatcaaaccaaaagaatcccacagtctcctcccaagtcctacttcccagaactatacttccatctaaggggtgctaacaactgggcccaggatatgtcctcactgaattctcacagctgttccttagacattttacaggcagggaaactgaggctcccaaggtgtcagggaactcccgtgcaatcaccatctggagagcggtggggctggacccaaggctccatggcatggggattcttgcccatgggtgcctgcatttccccaccttatgcccatcgtctccttcctcctgtgctttcttttttttctttttttttattttatttttttgagacagagtctcactctgtcacccaggctggagtgcagtggcgtgatcttgtcccactgcagcctctgcctcccaggttcaagcaattctcctgtctcagcctcctgactagctgggactacaggcatctgccaccatgcctgggtaatttttgtatttttagtagagacgggggtctcaccatattggtcaggctggtctcgaactcctgacctcaggtgatccgcccgcctcggcctcccaaagtgttggattacaggcgtgagccaccatgctcagccagtttctttttttttttttttgagacagaattttgctcttgtcgcccaggctggagtgcaacagtgccgtcttggctcactgcaacctcctcccaggttcaagcggttctcctgcctcagcctcctgaggagctggaattacaggtgcccgccaccgcgcccggctaatttttgaatttttagtagtgacggggcttcaccatgttggccaggctggtctctaactcctgacttcaggtgatttgtccgccttggcctctcagagtgctgggattataggcgggagccaccacacccggcccctcctgtggtttctaatgctgtagtagctgggactccaggttgcacgttttgttctagggaatgtgcatcagccttcacctgcaagccccgggccccctgcactccagagatgctggactggaacccacccaaggcaaaggcgtcagttctggcccctctgttctcttcgtgtggcccccagcaggccagccgccccggctccacagcgtcctccacaaggggcctgccgagtaagtcagcctgggccccactggcgtgggagcctggccacccgccaacctgcagggaagggcattttgctgctatatttggccccgtgctcctgtgtgtaccaggccaggccagaagggcagaaggcctgcttcccttccccacacaaccaggccccagcaggtggcttcctttcctccagggaccggttctgcatgaatcttccttcctattaaattccctttggcctcagtgactcaaactcaagctgaggagtgagacctccaggcaggtcactgagagagaagcccctccccacttccctctgtggagctcacagagttggccctgagctggccctgctgccccggggttggccctgaaactcggacctgccctggtgggaggtggtccagcccctggttcagccactgtgtccctgcctggcccagcctcggtcaggccacccccaggtcaaacagaagcgggtgtctgctcgcaggctggatggaggggccgccagaagggcctgaagatgggatgggcccaagggcccccactctctccctggggcctctctctcaccctctcacctgaggctcactgtaaggaccacttctttgtctttctctgtccccttccagcctctgccaattgatagcccctcc

SEQ ID NO: 25668 - DNA, 2300 bp, Homo sapien
ctgaccagattccactggcaaacactccgctgaccttgggcagctccctctgctcccacctcctctggcccttgtgcttctggggctttgtggagtagctggacatcaatgataacactaacagtagccggcctgccaccaagttctttacataggggatgcctatgtctgtgcttcattggcgtcatctcacaaggccctgagctggcaggaaattgaggtctcaaggggaaaagccacctgcccccagtgacaaccaggaagtgcaagactctgacccaacgcccatgcctgccatccccaaacatgggctcaaaacccccttcccagggacggctgtgtccacccctcagcaggaggaggagaccccacagcaccgggtgagaggtcagtgctgaagccagggaggcagctctcagcagggcacctgtgtggagccagggaagccagggccacacttgcagggtgaagtggggaactcggaaggctgggcagtggagcaaaatgcttggtgccctgcgggaaccggtggccaaggctacactgggatgaagggagccgtggagctgcagaatctgcgggtggccctcagtggcaggcagccaggccaacaggggctttgggctgcaggtcagcccctcccctgctctggaacttttggagggccattacaaaggacatcagccccaagatactcctctgaaattctgcctgaaaggcccttcacattccctaattggcacttacaacattccagaacattctatggtaccttaagtttctcctccccctccaaagggcccttgaaccttaaggatagggcagaaggggctcctcaccctggcctcgagggcttaagatccagctgaggactcctagcctccctgtgtgctgggcaggaaagtagctccatgtcactgctgtccctgggaaaggaaaaaaggttgaggaagggctcagagccagccttcagaccaggcaggaagggttcagagccagccttcaggccatgcaggcctcctggatgtgcttactaactctgggctcgctgttctctgagctggctgggagttcccctctgcacccccgtttcctcccctgtaaggtgggaataatagcgtatgtctctaggattaagtgagccagtcatgcatgggccgagaaccaggtttggcatattgtagctgctcagtggacgttagctgttatgattggaccacaacgtgcttccgtttcaattctgtgggccttttggaggtcctgctggatgctaagcaccgaaacctcaacccggaacaagaccagaacaacctgagcaacaacaggaccagcgatggctctccctgctggaggattctggaagtcacctggctggaccaagccctctccgtgttctctgtcagcccactccccagagccgctaggcctgatgtgcacaagcagactaataaaggcttgaggacaaaaagggttttgagtgataagtgaaaaaagaaaggagatagggctgggccaacaggccttcccttggtggtggggagccctcagaggtgggaggaaccccagaggtgaagagagggacatggtgggggcacaaaaaaagcttccagagccacaggcctgggcgagtcctgacatggagcccagtctcatacggcctctttccctagtggctggctttgctcctggccctaggtagcccaacagctgggcaaggggtccgtctggtcaggggaaaggtgcaggggcagaaggtagcagagggagaaaaggacaccctgtctgcctctggccccaaagacaagtccgaatggggccagagggaaatggctgggccttggggtgccccagggtcttggaggggaccgggtgttcaggtttcgcacaagtacaggagggaccggcgaccgccctccccccgccccgggaggctccgccagggacaggcgtccccgggattggaggtgacccccgtgggttccgaagccccgcctcggccatgcactgtctactaggcgcgcttggggagcctaggggccgtctcggagaaatggggtggtccccgccaggcggcggcggggcgggccctgggcgccgaaggggttaaggcacctgggccaccgcccctgccggcccctcctcccgcggccgggaagaggaaagtcgcggcgggggcgcggcccggtctccgtccccacccgcccgccgtcccgccggcccgagccgtggcgcccagagctgcgagccgctcgcccctccgccgctccggcccgggccgccatgtcgctgtggtgagtggg

SEQ ID NO: 25669 - DNA, 2300 bp, Homo sapien
ctttccctacgaatggagcggacccggcaggtggagcgcccgcagcccagggcctcgccgccttcccggtgcaccccccgacctcccccgtcccggcctcggtgggcggcttccctggaacccctagggctggcagggccggatccggagccctccgtttcctccccggagagctggaccttgggtcacaccccccagcctgcacctaaggtgcccctgtcttcctccaaccacatgccccagcaacctggggaccctatggggaaaatgtcgctctatggggctcagcctgcattcaccctggggcctggacctgcaaccggaccagccctcagggcaacccaggcgtctccacgggctgcctgtctctcctggcaccctgctcctcccccttggaggtcagcgccatctctctgctaggctggccctggaaggccactctgctgtccccagagctctcagcccccaggtctccactggggagggtggggcaggtgtcctggcagcccccggagggtgagatgaagagaggaggtccttcaggacaggggctcaggccccagggcttgggacgaccagcactcctggcagagagctctaatttctgcttccgaaatgggtgtggaccggggttggggtgggggggtctctgggcaagaagggtccctcaagggctggagctgcaaatgtgccccctcccagggagtagagctgtagcctcatgtcttctaatggggtgttatgagctggggatgttaaggtaggggtgaggggcagtgccatgctagaggtgctcactgcatccttgggcctccatcaaccatgagggctgctctttgttgggtgagacagactggagaagggggaggagggccagtcttcctcaggtcccaagctcgagccactctccaatgtgccccacatgtgatggagctcccgggcggcacagaggatcagagggtgccctctcaatgactctggctctgagtcacctaatgataccgatacctactgctgtgggtaggtacaccgcagggaaatgaaaggcattggggttccaggcgtggggaacagggcagaggtttccacctgaggccctcctgttaaggtgacagcattcccctaactgtgcacccgctgcctggtactttatatagcactccaatcctgtgttttagccccatttgggggaagaagaaatcgtggctcagagtggttgtaaaccactcattcagcttgtaagcgtcagggcctgattccacagtgctccttgaggagagggcagggtgggagaaagaaagggcagggtgggagaggaagcgggaccctaccctgacagcttagggactccgggactgagcctgtgcccaggtccacttgcccgtctgggaccacccagcctcccaaggggggcgccaggagagccctgggctcatcttttctctctcctctgtactgtccgctctcccccacaggaagaaaaccgtctaccggagtctgtgcctggccctggccctgctcgtggccgtgacggtgttccaacgcagtctcacccctggtcagtttctgcaggagcctccgccacccaccctggagccacagaaggcccagaagccaaatggacagctggtgaaccccaacaacttctggaagaacccgaaagatgtggctgcgcccacgcccatggcctctcaggggccccaggcctgggacgtgaccaccactaactgctcagccaatatcaacttgacccaccagccctggttccaggtcctggagccgcagttccggcagtttctcttctaccgccactgccgctacttccccatgctgctgaaccacccggagaagtgcaggggcgatgtctacctgctggtggttgtcaagtcggtcatcacgcagcacgaccgccgcgaggccatccgccagacctggggccgcgagcggcagtccgcgggtgggggccgaggcgccgtgcgcaccctcttcctgctgggcacggcctccaagcaggaggagcgcacgcactaccagcagctgctggcctacgaagaccgcctctacggcgacatcctgcagtggggctttctcgacaccttcttcaacctgaccctcaaggagatccacttcctcaagtggctggacatctactgcccccacgtccccttcattttcaaaggcgacgatgacgtcttcgtcaaccccaccaacctgctagaatttctggctgaccggcagccacaggaaaacctgttcgtgggcgatgtcctgcagcacgctcggcccattcgcaggaaaga

SEQ ID NO: 25670 - DNA, 2300 bp, Homo sapien
aggtacccccacgtggccgcgccgcctctttaaggggcggggttgtctcgctgggaaaggcataagcttcatgagaaaatcaaggtagtcatttttttaagtgccttaatgatcttcaccgttaatttggattcagatgagggtggtagaataaagtaccgggatttgtagtattaaaacacggttgtgcttaactaaggtaacgggaggagaaatcatttcctcaggttgactttttaccttagggcaggttttctgttggtaaagcctgggaggaaaaatgtgggcggttgagagtagtccctcttgcattgccatcaggagtagtttctatgttagttgtggtgtttggcactatgagaaatggatctgaggacggagatgatggcgtatgaacactaatggcaaaatatgaatggcctgaaatgtcgaggtggaggtgtaatgatctatttgtgtccattttaggcaggtaaaaatcaaggtgaccccaagaaaatggctcctcctccaaaggaggtagaagaagatagtgaagatgaggaaatgtcagaagatgaagaagatgatagcagtggagaagaggtaattttatccaacttaatgcagaattatgttaaaactacaaaatggagagttaagacatgaaattggatatctgtggcaaaaataagattttattcaggtatgtcttattgtagtggttgagtgtttcacaagctcttcattgacatgtcaagatgtcatttggctaagtatttgaatgtgagtgtaagacgagatctgggaatttcttttacatgttcctctgcagggcttggagtgtgatttgttgtgttaaatcattacatttttccagtttcaacatgttagcctcacccccacatgtagagctgggcattgtattcagagctgaggataaccttaccagattcctttcctagcctccaattaaaattaattggtctccattccattatatataaactttgtaatactactcactgtgttttatagttatctctggtgtagactgagggctgccacctctctttgtgttaccattgaccctctttagcactcctggccttttatttgctcactataaagacagctgagcactgaattgtgctcaggtttctcgttgagaactgaatgaaagttttactcttccacacattgcctgataaaactacgggattttaatgtagctaaatgatgacttttatcaaactaccatgcacactctttgatgtgtgatagttttgtaaggaatatttatatttagcctattcattttttgtctcaggtcctaagaattgagcttcactgggcttggtaccgccacccactgtaggagccccaaatgatttaataagttaatgcttggagcctcctatgtgtaaggttctgaataatttacacatagcaattcatgatccttaaacatgtaaggatgatactattaccattttcagatgagaaagttggggcttgggaaagtatgaggtgtaagaattcagagggtctggttcagaggtatttttaagtgttcaaaagagttccttatgtctgggtattcaccttatgataggggctctgacttaagacaacataacagaagcctggagtttaacatgctaatgtgtctagtgcatgtggtcttgaaccagaggcattgccagagtctaacatctcattgggaccatggttatctttttgggtgtggggctggacttactggtttggttttcatttattctcaaggtcgtcatacctcagaagaaaggcaagaaggctgctgcaacctcagcaaagaaggtggtcgtttccccaacaaaaaaggttgcagttgccacaccagccaagaaagcagctgtcactccaggcaaaaaggcagcagcaacacctgccaagaagacagttacaccagccaaagcagttaccacacctggcaagaagggagccacaccaggcaaagcattggtagcaactcctggtaagaagggtgctgccatcccagccaagggggcaaagaatggcaagaatgccaagaaggaagacagtgatgaagaggaggatgatgacagtgaggaggatgaggaggatgacgaggacgaggatgaggatgaagatgaaattgaaccagcagcgatgaaagcagcagctgctgcccctgcctcagaggatgaggacgatgaggatgacgaagatgatgaggatgacgatgacgatgaggaagatggtaaggagttgtcttggtagttactgggcttctgattacaaggtatcttgagatt

SEQ ID NO: 25671 - DNA, 2300 bp, Homo sapien
ccacaaagctaaccgtggaagtcactggcggcctccttcgccctgccgccggggaaccctgccggtggctctcgacctgctcccgggccatctggtgacactgacttcgcagccaccaccttaattggcgcattcgacccaaataataaccagggaacctgtgggcggtcaaaggcccggctctgcggtcggccctcccaggcccctctccctgccctgtgaggccagaaagttacttctccgaggccgttccccatgtcgagaaatatctcccgcttgaggttctgtggggtaggggaggttcgtgcatttctcacagaaaacctcgcacagacccgcgactgcctttattaacagctctcaggagactgcctgcagccggggggtgcctccggccccatgctcgcgggcaagcagggataagctgtgcctccaaaagggccaacgggaactccgcggtccctgaacttccggtgctggcggactcctcgctccagggccaccaggagccgcggcgtgagtgcgtgccgggaccgagcgcggggtctctgaggaactccaaggctgcccaagcctacggacccagccacattggcgaaccggagaccgcccgattccaccacccccgcgctcccctcacagccggcgccaaaaacgccagtcccacgacgcaggccgggacccgcgcgcccacggcccaatcagcgcggaccttgcacaaagcgagccccgcccccacggcgccgttgccagcccctccccctcccgtggccgcctcggcccgcctactccccgccccgcgccgttcacggttagaggctcgcgattggctcatggggacggccgcgagctttggttggtcggcgcggagtcacgagggcgccgtcgtcgcctttccacaggcgattactgggcaggctcagtctttcgcctcagtctcgagctctcgctggccttcgggtgtacgtgctccgggatcttcagcacccgcggccgccatcgccgtcgcttggcttcttctggactcatctgcgccacttgtccgcttcacactccgccgccatcatggtgaagctcgcgaaggtaaacggccttgagcgcgagcgcagacgtgtaggcctgctttccgaggggcgagcgcggcgccgcggggaggagggcctgcgcgcagtcccgggcgcgttctagggcgccatgctgcgggaagtctcgcgcgattagtggggaggtctcgcggcttctggctacttggtggcgaggtgaagagcttctgcaggtgctgggggcggcgaacgcggcgggaaagacagagtcactgagcgcggggagggggcgctgggcctcggggtggagagatgagaccaaacttttgcgacgcgtacgagctgggactcgactcctgacgcacgtgcccgggagcgcggcctgccacgtgggccgcgccgcgtgggtcctggaatctccagagggaccgggtgccttgggccgggaaatggcggtatcggccctagtcggagtcccggctgcgctcggatgtctccgccccggcctggcaagccgacacgtggtgggccccggaaggtggctctgccgcgtgccttttgcgctgtgtttcgggcacgtggtggcctaccaggtacccccacgtggccgcgccgcctctttaaggggcggggttgtctcgctgggaaaggcataagcttcatgagaaaatcaaggtagtcatttttttaagtgccttaatgatcttcaccgttaatttggattcagatgagggtggtagaataaagtaccgggatttgtagtattaaaacacggttgtgcttaactaaggtaacgggaggagaaatcatttcctcaggttgactttttaccttagggcaggttttctgttggtaaagcctgggaggaaaaatgtgggcggttgagagtagtccctcttgcattgccatcaggagtagtttctatgttagttgtggtgtttggcactatgagaaatggatctgaggacggagatgatggcgtatgaacactaatggcaaaatatgaatggcctgaaatgtcgaggtggaggtgtaatgatctatttgtgtccattttaggcaggtaaaaatcaaggtgaccccaagaaaatggctcctcctccaaaggaggtagaagaagatagtgaagatgaggaaatgtcagaagatgaagaagatgatagcagtggagaagaggtaattttatccaacttaatgcagaattatgttaaaactacaaaatggagagttaagacatgaaattggatatctgtggca

SEQ ID NO: 25672 - DNA, 2300 bp, Homo sapien
atcttttgaattttgcactatgtgtatactttacaattcaataaatactcatgttttcaaaagaaaacaaaaaagcatttagaaacaaacaggccagacgtggtggctcacctttgggaggctgaggagggaggattgatatagctggggatgtcaaggctgcagtgagccatgatcctgccactgcactccagcctgggtgacagagtgagattctgtctcaaaaaaaagaaactgggatgacacagcagtgtcttcacttatatcctacgcctccactgctagctatgcgaccctggacaagttaatttacctctatgtcccagtttctgtaaaacagtggtaactttttggaaaggttattttgaagagtaagttaattaatatgtaaagagctggaagagcgcctggcactgaatcagcattatgaagtgttagatattgctattttgctgccccagaccaactccaaagcaacgccacttgagccatgccggctctccctgctgctgcttctacctaaatacttcattcatttaacaaataattttattttctttcttttttttttttttgagatggggtttcgctcttgttcctcaggctggagttcaatgacgcgatctcggctcactgcaacctccgcctcctgggctcaagcgatcctctcacctcagcctcccgagtagctgggactccaggcgagcgccaccatgcccgctaattattttttgtgtggagacagggtcgcattatattacccaggccggtctcaagttcctggactcaagcgatcctcctgcatcagcctcccaaagtactgggattacaggcatgagccatcgcacccggccttaacaaatgcttttctttctgagacggagtctcgctctgtcgcccaggctggagtgcagtgggcgatctcggctcactgcaacctccgcctccccggttcatgcgcctcggcctcccaaaatgctgggattgcggatctgagccaccgcgcccggcctgaggtgatttttaacaagtacagccgtagctgcagatatcctggttctgtaggaacaatgaggtatggatggatccatagctggacctatggatgggatggatccccggcaggccctggacggagggaaatgctctggtttgctaagcccggcatcgagtgagacccacccacaaagctaaccgtggaagtcactggcggcctccttcgccctgccgccggggaaccctgccggtggctctcgacctgctcccgggccatctggtgacactgacttcgcagccaccaccttaattggcgcattcgacccaaataataaccagggaacctgtgggcggtcaaaggcccggctctgcggtcggccctcccaggcccctctccctgccctgtgaggccagaaagttacttctccgaggccgttccccatgtcgagaaatatctcccgcttgaggttctgtggggtaggggaggttcgtgcatttctcacagaaaacctcgcacagacccgcgactgcctttattaacagctctcaggagactgcctgcagccggggggtgcctccggccccatgctcgcgggcaagcagggataagctgtgcctccaaaagggccaacgggaactccgcggtccctgaacttccggtgctggcggactcctcgctccagggccaccaggagccgcggcgtgagtgcgtgccgggaccgagcgcggggtctctgaggaactccaaggctgcccaagcctacggacccagccacattggcgaaccggagaccgcccgattccaccacccccgcgctcccctcacagccggcgccaaaaacgccagtcccacgacgcaggccgggacccgcgcgcccacggcccaatcagcgcggaccttgcacaaagcgagccccgcccccacggcgccgttgccagcccctccccctcccgtggccgcctcggcccgcctactccccgccccgcgccgttcacggttagaggctcgcgattggctcatggggacggccgcgagctttggttggtcggcgcggagtcacgagggcgccgtcgtcgcctttccacaggcgattactgggcaggctcagtctttcgcctcagtctcgagctctcgctggccttcgggtgtacgtgctccgggatcttcagcacccgcggccgccatcgccgtcgcttggcttcttctggactcatctgcgccacttgtccgcttcacactccgccgccatcatggtgaagctcgcgaaggtaaacggccttgagcgcgagcgcagacgtgtagg

SEQ ID NO: 25673 - DNA, 2300 bp, Homo sapien
accaacggcaaaatattgtgcagtttttctcccctttagtcatagagcatatagtcaaaacactgtttctaaagctacataggtcactgctcccctaggatgcccgagtgcacgttattcatttgtaaaacagcaagttcacttgtttctgttcgtattccattttgggccatctctaccacccttctccaattccttgttgatttaaatttttttttctatgaaacacaaatagttctataagtcagaattatacaaagatgtaccgttgactcttgaacaatgcaggagttagaggtgccaaccccctgtgtagttgaaaatccacatataacttttgattccccaaaaacataagtactgataggctgctgttgactgggaaccttaccaataacaggaacagttgattaacacatattttgtatgttatatgtattacatactgtatcttacaatacagaaaatgttattaagaaaggccgggcacagtggctcatgcctgtaatcccaacactttgcgaggctgaggtgggcagatcacctgaggtcaggagttcaagaccagcctgggcaacatggcgaaaccctgtttctactaacaatacaaagaaaaaaaaaattagccagccatggtggtgggtgcctgtagtcccagctactcaggagtctgaggcagagagaattgcttgaacccaggaggtggaagttgcagtgagccaagatcatgccactgcactccagcctgggcaacagagcagactccatctcaaaaaaaaaaaaagaaaatcataagaaaaaatttactattcattacgtgtaagtgaattattataaaggttttcatcctcatcttcacattgagtaggctgaggaagaggaggaggaggggttgatcatgctgcctcaggggtggtcaaggcacagacatggacccacagttcaaacctgtgttgttcaagggtgagttggactcagagaagtgttacctctcctgtcccttctcccctctcccacctttcacaagagggaatcccaagtagctgggattacaggtgcgtgccaccatgcccggataattttttttttttttttttgtatttttagtagagatgaggtttcgccatgttggccaggctggtctggaactcctgacctcaggtgatccacccgcctcggcctcccaaagtgctgggattacaggcgtaagccaccgcgcctagccatgattctgttatttctaagggcaggggaaatcgtaaacattttgataatcaattttaatacaaggatagaggctataaaatctaggcagaaaagcatccctctcttacggaaggtctttcatatggtctgtatatcaagaatccccacagataccctgcaaagtcgatcctattcttccattttacagatgagggaagcctgagcctcaaagaggtgaggtaacttcccagggtcgcacagctgggaagtcgcagagcaggcgcagaccacctgattgctcttgccccaccccccacccccacgtgcttttgagtccacactgcagccgcctctgctccaccaccttctgtcacccacagcgcccccacgctgggtccgcgggcccccacgtccagaccgcaggaagggacactgggagggcgggaacctgcgcacccgctgaaaagacacagcctgggaaaccgcaccccagaggcagcctccgcggccagcccaggggcagaggggctccgggtctcagcgtctgcgggtggcaggtggcgtcaggtctgcacgacggatgctgggaggcctgcagacgccccgaggagccacggcttcctgagcacactcgagaggcccgcgccccgggcaaactgcatggactgtgctctgcaggcgccgcggcctttccccgttcgctctcgaggcccctgcggcccccgtcctaccctgccccagctcctccagcaaaggtccccgaacccgaggcttctgtgccgccttgacaatggcagccccctcctctgccaccgcggggaagtcccggaactcctagactttgttctcttcttttcccgccggggctgctagggaagcactcttagggccggcctccagccttgggttcccgcccgggcctcgccgcgcgccttccgctctccacggggcctgcagcccgggacctgctgcccgccacccgctacccagggcttcctgccggccgccagcgccacctgaccctccgacgagagcccagcactgcccaacccaggccttctgtagggtcccctcctctccacgtatggccccat

SEQ ID NO: 25674 - DNA, 2300 bp, Homo sapien
gttgtatttattttattaattttaataactttcttattaatgtagaaatgcttttaaaagtaccctgaccagactcaactcatgagtcttgtgacaattaagtgtagcttaggaatgatgtttgtggatagcataaaagtttccagtttactcattagtggcccaagcagttgattacaaatgcaatattctggctttcacccacagaacctatcaaagaaacacctgataaacaaaagaaggaaatggccaatcagaaagagtcccctggagccaaaaagcagaaattagaaggtaacaggccgggcacggtggcttacgcctgtaattccagcactttgggaggccgaggcgggcggatcacgaggtcaggagatcaagaccatcctggctaacacagtgaaaccctgtctctactaaaagtacaaaaaattagccgggcgtggtggcgggtgcctgtagcctcagctactcgggaggctgaggcaggggaatggcgtgaacccaggaggtggagcttgcagtgagccgagattgcgccactgcactccagcctgggcaacagtgccagactctgtctcaaaaaaaaaaaaagaaaaagaaaaagaaaagaaattagaaggtagcgtgttggccgtggtttaaggcacaggagatgcatggagaatgtcacattggcaaaaacttagtctccattagcccaaatgagcaacaatgggatttgctacagaagcttggtgttacaattttcagtggattttcttttagtgctactttttctgaactgagttctttttttttttttttacctttttgtgtagcaactgaaccacgtgtagcattccaactgtttgttggaaacctgaatttcagcaaaactgctgctgaactaaaagttggcctcagtgaattttttgctaaaaatgatcttgaagttgttggtgtcaaagttggcttgtccaggtaaataccaatcaactaagaaggtttttaagagcatatcagcccagcacttactattcctggagaatttagatgttccagtagctttgtagtacttcatgatggttcataggctgctgtcttctcaggtccttttgttacctgctcttcaccctttggtgggattttacctcagtcactcgcagtttaaaatgaatatgtaaaatccttcagtggctcatgtttagtaaatctgttatattaaactttgctaccccattttcccaaccaaaatattaaaataatcccaagatcttccaagtcttagagacagggtcttgctattttactcaggctggtctcaaactcctgggctcaagtgatccttccacctcagcttcccaaagtgctgggattacaggtgtgagccactgtgccctgcctatttcttaaaaattaaaaaaaaaaatttttttttttgagacagtctccgtctgtcgctcaggctagagtgcagtggtgcgatctcactgtggcctgcctgtttcttaaaaattccaaaaaaaaatttttttgagacagtctccctctgtcgctagagtgcagtggcgcgatctcagcttactgtagtctctaccttccaggttcaagcaattctcctgcctcagcctcccgagtagctaagattacaagcgcctgccaccatgcccagctaatttttgtatttttagtagagacggggttttgccatgttgcgcagactggtcctgaactcctggtctcaagtgatccgtcagtctcagcctcccagagtgctgggattacaggtgtgaacccctgcaccgagccaaaaataaatacataaataaataactttttttgaaacagggtctcactccgttgcccaggctggagtgcagtggtgtgatcatggctcactgcaacctctgccacctggactcaaacaatcctcccacctcagcctcctgaatagctgggactacaggcacacatcaccatgccttttttgtacatgaggtttcgccatgttgcccaggctgatctcaaactcctgagctcaagtaatcctcccacctcagcctcccaaagtgccgggattacaggtgtgaaccattgcgcccagccaaaatttgtaatttcaagccacactttctatagctcttggttaaattttgtcagttgttaagcagaaaaccaatagagatgtcaataggcaaactctgcactgattctcagtccttgctctagaacgaggtctcttgacttcagcattactgacattctgggctggacaatttttttttggagacagggcctctggctctttcatccaggct

SEQ ID NO: 25675 - DNA, 2300 bp, Homo sapien
ttgcccttttaccagtttctccacaatccccaaacactcgtaatttctgtcactctgacagataaagtatcttattaagttgcatttccctaatggttgtatagttgagcatgtcttcattctttgccactcaaatttctcctgaaaatggcttttcatatccttcagccatttttgtttttttcttgatttgtatttcattcatattacaatattaaatttgttttgtatatgttacaaatatttctaatttgttccttatgttttaaactggtttatagaaactcctgcatccagcagttgtaaattgtaatgtggtcaaatctgtcatcatttcgttggtaggggagaaaatattttcctctcccatcttaagggttatggctgacacccctataacaaggttaatgagagaaaggcataacaaatttaaagtcttatgtgacacaggaaccttaagaaacgaagaccccatgacctaaagaaaactgtatttttatgctaagtctgatgaaagaagtagatagttgtgcagaaacatgattggacaaaaggggcatcatctaatggtcatacataggggtgggaggagacttcggcatggcccgtttgctcagattctttcttgcgtctctgcatgacacttctcctccccaggtatggcacaagactcctctggaatgagggtcttacaacctacttcacatgaggtaggccagtgaattcctttatgaccctgctttatgggagggagcagattacttacagagaccttgcttctgtggttttctcaactgccaaggtgccatattttggcacatttatggattttgcttgtgacttatcctgtccttgttattgattttaataatacttcctggcagggagtggtgattcaatttgctaatactttatttgaaccctgcatctgttcttaaatgaaatgggcttttgccttttcttcagttgttcttgatcagatatatataatattttcttaaaatatttgggctaatctcataaagttagctaggtaacaagagtttggtgaggtaccaaatctaaaacaggtaggcagattgttttttctattctcattctttcccagtttgggtctttctgaagctaggataaggccagggctccttactcaagatcacccttccctatcccctaaaaacacacacaatatccccaaagtgtcactgttcaagttccaacatggggctaactccgaggagcttgatcctcctactggggctactggtgttaatggccatgaggccttgtgagagcacatgttcatgacagtccaactcaaaaaactacgagagtattaagtgatggagaattaaaccttaactaccgagcctcaacttctttaaatgaaaaatgaaacttttaccatctaagtcacacgtgtgttttgagacgtccatgataaaattttgaaaaagcacccagtacgctgggtggcacaaacacgcagcgggcgagggcccctacagcagcgacagccttaacggagagaccctcagctgtcgtctcagtgcctccttcacggctggaaacggcgaggacgctaacatagccctcactgggcgggacgcgacttaaacggtttaacgaccccgagcgctggggtccgtaacggcgccgacacacgcgcccttacggactggtcgcttttaacgagtgctattcactttccgactgcccctccgccatggagcgtcgcaccgcgtgaccgtcaccaactcctcgaactctggggcacctcggccttctcccgcgccaacctggcgcgaagacctgggacaccgcgcgcacctggaccagcgaacccaaaaccccgcctcccgcgctagaccgcagcaaaatgtccgctccacgcgcaggcgcagcacgtgcggccccccctccaccccggctcaagactcacgcccccaggctcccgcaccgcccgcccctcccagggtcgcggctcaggattggttcaggggttgcgcgggctctgattgggcgaggcggagtcaccagggcgccgtatctttacgtggccgtcttccccgcgcgccttggatctggggcaatagctgagagggcgtcaccagcgtgtcggcgcctgcggttttcttcgggctgtccccaggcgtcgtgcccgcgtccgtcacgcgcggtggcttgcaggggcgcaccgcgacagccttaaaggaaaacctgttagggacaagggctgctgtgggcagcgagggttatagactcatgtgtgttctgaattctggtgggggtagtgatgg

SEQ ID NO: 25676 - DNA, 2300 bp, Homo sapien
gtggtggccttgagctcaggcccggaggccagggcccctagggccctctgcacagtgcggaagtgagggccacagccattgtggccactgagcctctcctttttgggggctgctctttagcctttgatggctgctaatgttatgtgaatgatgcaacccgctgtaggaattcctgactggcaagagtcattctgcctctgcaaggctaggtgggtccttccccatcccctccagggctgtgtgaaccaaagggtccacggggactttcggactgctcagagtctgtgcagagtggtatgtgtgtgcgcgtgtgtgtggtgtggtatgtgcagagtgatgtgtgcatgcatgtgtgtgtatgtgtgtgtacatgcatgtgcgtgtgtgtgtgtgttccagtgaagggctggggtccaaatgctcctcacttgctaagagcagcctgtgatgccacagtggtctctgatgctgagtgatgtcatccctccttgcccgtctgttgtgctggcagccctgttactgaggatttctcctggactagctcatcaggggctgagtagttaattcccagggcaccacagaatcctttctcccaaggccctgaggaccacgtgcccctgcacttcccacaaccgtcccctgcctgggactctgtttacatgtggagttcctgggaaggccggcctggtgcaggctccttgagggcctaactcccatccccaagcccagacagtgacttatggaattggggggcagtggggaggaggagggtgcaggaaagcggggggaaggaggagcctccagttgccactaaatggtgacaatcccaccccacatttcttgagtgttggccatgtgccagcccctgtgctgaatcttgacgctcagtgtctcatgtcaccttcacaatagtggcgatggtggttagcccattctacaggaaggggaactgaggcacacagagcttctgagctcacggtggcctctcggggtcctgtggctttgtaacctctcctggtgctcctcagtgtgattctggggcatggggctctccagagggcgtttgtcaaacatgaggatttctgggccttgcccaggctaaggagacaaaactctgggcaaaggccccggaaccagcattttactctgtgtgatccgtcatttctagggtccctagaagtttctgatgaaacagcttccagctaaggagctgattgcaggactagggagtgggagcaggtgaggcactgggatttgcatgtgggcagtgtgggggagcaggaggctgtggctgggcattcttaacccttccctaaattccctccatccttgtctatacccccacccttggtacagtgatgggggcagaagaacatttgaacggataagggggacagtatttggggctgaggacaatggtgaggagagggtggcccagggaggcaggtgaggagtggggaggtccacccccaggctagactttggtgtgctctttttcagaaggcagtgggggggccccaaggaagggtttcgagggggtgatggtcgttggtggctgtgggaggatggactggagggagaatagggggctcttgcccagtcctgcagggccgagcgcctggactcagggactggaggccccgaagggagcagcgggtgagaggggctgcggaggctgcaatcatgggccttgggacagaagaagaggcctggagcctgggaggatgaaccgcaccggggcatgtcgacttcaaggggctggtgggccgtccctgtccttggaggtgggtctgaatggggggcaggaggagctggaggccgcagggacaccgtgacggcgttaagctaaactcagcacgctggagggcgggaatcacatgtgagccccaggtctctcgggctcctcctctgcggctctctgaggctcagttttctcatctgtaaaacgggttgttgtgagggttccgtcagataacgctgcttgtggaggtgtcgcctccacgctgcttgtggaggtgtcgcctccaacggccgcgtcctccgccagtgcgggagggggcgccgcccgggctgcggggactgcactgccccctggcggcgttcccggccggacaggcggggcgtcggggcgcgggctggggccgctgtcagtcagtccactggctcccgcgccgcgtctgtgtccgtcgctcggagggtggaagccggggtctcgcgggccgcgggccgcatggtaggtgcgcaggcgccggcgtgggctagggcgcggcagctgggccggggctcggtgcgggcagggt

SEQ ID NO: 25677 - DNA, 2300 bp, Homo sapien
ggatagaggacaagggcagagagtttcagggaggggaattttccatacactcatgaccatgctgctgatggtgcagcccagcactggcagcagctgtcacctgctggtgtggtggaaccggttctaatgggaggcctctgtctgcatctgccagcatcattaccatgccagtcattagatatatcttttttcttttttaaggcacaggatctcgctccgtcacccgggctgggatgcaatgatgtgatcacagctcactgcagcctggaactcctgagctcaagaaatcctcctcctgggcctcagcctccccagtagctggggctacaggtgcacaccaccatgcccagctaatttttgttttattttttgtagagacagggtcatactacgttgcccaggctggtcttgaactcctgggctcaagcgatcctcccaccttggccttttaaagttctgggattacaggcatgagccaccatgcccagtccctcattcaacgtttttaatatccctcctgggtatgagagagtgctggaaagcttagtattgaagccagacagggttcaaatcccagattcagctcttattaatagtgtggctttgagtaagtcgcttattctctgtgaggctcagcatgcctgtgtgtaaactgagtatactagtagaaccgtacctacccagaggtgatgggtgatgagaaggatgctatgcgcccttttctgcccataagcagtcactaaatgttagctgataacccctggagaagcacagacacgaccgactgagccttcctctccaaacatcttcttaatgtaggcattttttttttttttttttgagatagagtttcgcccttgttgcccaggctggagtgcgatggtgcgatctcggctcaccacaacctccgcctcccggggttcaagcgatactcctgcctcagcctcccgagcagctgggattacaggcatgtgccaccacgcccagctaattttgtatttttagtagagacggggtttctccatgttggtcaggctggtctcaaactcctgacctcagatgatctgcccgcctcagcctcccaaagtgctgggatcacaggcatgagccaccgtgcccagctaagcacaagtaggtgtatctggggttatccttctccaagaaacactcagaggtctgcagaccttttgttattctctgcccttctagtccagatgagcaaggagaagatagagatttttgccctacatcaaaagggttaaacccacagccacaaatggagctgcccaggcccttggcttttgcttatacctactcaccactgctgggaaactgattccctgcaggaacactgactaaattgggggtggttatttgttgttgtttgttgttgttgttgttttgtttgtttatttgttttgaaacggagtacgcttttgcccaggctggagtgcaatggtgcgatctcggctcactgcaacctccactccctgggttcgagcaattcttctgcctcagcttccccagtagctgggattacaggtgcacgccaatacgcccggctactttttgcatttttagtagagacagggtttcaccatgttggccaggctggtctcgaactcctgacctcaggtgatccccccacctcagcctcccagagtgctgggattacaggagtgagccaccatgcccagcctaaattggggtcttgaggcaccagtgtagacagagaggtgccaggaggggtcccttataaacactgttctaaatcaacatctgcatcccttctcatttgtcagagtcacagctgtcactcctcctgtgtccctgtggttgtacttgcccctgtgcacacgcctccagccctttcaagaacatttgtcattttttccctatgtacctgcaaagttggcaacaaactgtcccatagacttagcccacttggaaggctgctccagaagctcaagacccttgctctatgggtacctgtgacatcaccagtggccacagtcccttgtgacctcaccacttggacaactcagcccagctgggttgcagccactccctccaaccgccacaagcagcaaagggcatagatgaccacaggagagccctagggggaggccggctccaccagcagccccatacatggcactcccagggtaccccctgggcaacgtggatgacagcaggtctaaggacagcccagcaggagagccccaaggtcaggtcccactcacagcagatgtcttggcagtgagcagctctgtcgcatccactgactggcaggatataga

SEQ ID NO: 25678 - DNA, 2300 bp, Homo sapien
aagggcggccccaggtctgcgcggcggtgaagacagactggcagtgggagggagggaacccgacaaagagttgagacgcgtagtcctcgggaacagcactgtggaagtcccccggattgaggcgcgcccgtccagtggagaatgccacctccagccactggggcgcctgggggcagggcggagacacagcgggcgtcccttcgccgctgcataggagggcgaccgctgggcagcgggtgttggcgcggtatccccgccctgcccagcatctgccccacgtttcttcaggctaaactaccgggatcccgggcttcttcctaaagtaaaactcgctccggaaaggccaacagtccagcggccagacgggcacctgggaacgcgggcctaacgcgtactggagacggagtggcgcccggcactgcgcgcctcctccccgccgggagactgcgtgctaagctcagcaaagccccgctgtggagacggagccatgtcgcccattacctaatgaaactgagaagggagactcagtctctcttctagccccgagcgcaagctctgctggacttggcatcgtccgccctccacgatcccacactccgggttttccccattcccagctcggctgcaaccgagagacagacggaagaaactgccaatggaaggacgcaaagcgtcaactttgtgttcgcccgccactctcggccaatgtgcgctcgtgtctccggagtcccgccttccgtgtcgggcgcccccttttggcagcacagggacgaaccctacgtctcgccatcttgtgtgtggcacaggtaaatttctggactatctttccacctattctggtcctttttcccacacaaccgatttcttagttcgacagctaagtgcggtggcgataaggccagcgtagcctgttgttctcggatcgcccacgtgagctagatcgctacgtcacgccacgcttgccgagcccggcgccatcttgagtgtggcgttttgatgctcccctttctcggggctccgcatggttctctaaatggtcccccaaatttcaggtagtccccaaagattagcccaactggctccagagacgatgatttttcccgaggaactctgtaatgttcatgtgcccatcgcagtccagcagtggggtgggagaagggtagactcgatggcccggcaggcccctggaggaggctgccctgaggctgtcgcgacggcagtgaccgctcgggacagaccctaactagaaacctagaatgaggggaccgctatgccgtgcggggcccgcgggctgtcccactcgagggctggagccggcatcgcgcatcgagtccgcttgatacatgaatccgtgtgtgcttgggacggtgcccgcttgtcgactgacttggccgacggacgccggacctgatggtgggcaatcgaggtcgcctgcccacaggactaggggtgccctgccctgggagggcgcgagggcatggcagagggacggggcggcccaggtgcccgggtctcggcctcgtgacctcgttgctcgtcgtggggctgccgtccacttgcactgggacaatccttggtccaaggcgcccaggcgcggggggcgggcacctccgcgggcactgcgctgggcaccgcccggggcgagcgcggcccagcaccccgccttcccctcccccgcgctggcagccgtcgtgtgcccgccgccccctcttccctccccctccttccgagcagccgcggggagggcgggagagggagggaagggggttgggcgggcagctttgccgcgctttggctttctgcgtcagcagccccagcaaaacagctgcgggagcgcgcgtccggaacgcgctcgcgcacccctcccccgcgccctcggccctgctgagacccggcaaactccggccttgaatgacagtgcgatcggcgactgcgcagcgcgggacgcgccggggcactgccgctttaagcacgcttgtccattgttcggaatcgagccaatgagcgagcgcccgctccctgcgctcagccaatagcggccgggcatgggaagccgagcgccgcccactaatctatattaaagcttctggcgccgcgtgagtcccccactggctgctctgaaaagccatctttgcattgttcctcatccgcctccttgctcgccgcagccgcctccgccgcgcgcctcctccgccgccgcggactccggcagctttatcgccagagtccctgaactctcgctttctttttaatcccctgcatcggatcaccggcgtgccccaccatgtcagacgcagccg

SEQ ID NO: 25679 - DNA, 2300 bp, Homo sapien
tgcgcccggcgggccgacgacccccagccaggctcttctcctcccgccgccactcataccggccacagacgagtttcgagggccgtgagccggcctccgcgcctagccctcggcccccgagggcgcccggcccactccccgacgggcatcacgtctgcccgcggcggttcccgccccctcccccgcaccacacaaagagtgggctgcctgagggcaccgcgccgggggcgggccgtttccccgcgagagggagcaacagcgggcttgagacagtccagctgctgcgcgccaaacaccgcccgagcggcggcgcgcggaccccgagggggcgggcggcgtccagcctcaccttggtggtgatttcggagctggtgtctacggctgcgtctgacatggtggggcacgccggtgatccgatgcaggggattaaaaagaaagcgagagttcagggactctggcgataaagctgccggagtccgcggcggcggaggaggcgcgcggcggaggcggctgcggcgagcaaggaggcggatgaggaacaatgcaaagatggcttttcagagcagccagtgggggactcacgcggcgccagaagctttaatatagattagtgggcggcgctcggcttcccatgcccggccgctattggctgagcgcagggagcgggcgctcgctcattggctcgattccgaacaatggacaagcgtgcttaaagcggcagtgccccggcgcgtcccgcgctgcgcagtcgccgatcgcactgtcattcaaggccggagtttgccgggtctcagcagggccgagggcgcgggggaggggtgcgcgagcgcgttccggacgcgcgctcccgcagctgttttgctggggctgctgacgcagaaagccaaagcgcggcaaagctgcccgcccaacccccttccctccctctcccgccctccccgcggctgctcggaaggagggggagggaagagggggcggcgggcacacgacggctgccagcgcgggggaggggaaggcggggtgctgggccgcgctcgccccgggcggtgcccagcgcagtgcccgcggaggtgcccgccccccgcgcctgggcgccttggaccaaggattgtcccagtgcaagtggacggcagccccacgacgagcaacgaggtcacgaggccgagacccgggcacctgggccgccccgtccctctgccatgccctcgcgccctcccagggcagggcacccctagtcctgtgggcaggcgacctcgattgcccaccatcaggtccggcgtccgtcggccaagtcagtcgacaagcgggcaccgtcccaagcacacacggattcatgtatcaagcggactcgatgcgcgatgccggctccagccctcgagtgggacagcccgcgggccccgcacggcatagcggtcccctcattctaggtttctagttagggtctgtcccgagcggtcactgccgtcgcgacagcctcagggcagcctcctccaggggcctgccgggccatcgagtctacccttctcccaccccactgctggactgcgatgggcacatgaacattacagagttcctcgggaaaaatcatcgtctctggagccagttgggctaatctttggggactacctgaaatttgggggaccatttagagaaccatgcggagccccgagaaaggggagcatcaaaacgccacactcaagatggcgccgggctcggcaagcgtggcgtgacgtagcgatctagctcacgtgggcgatccgagaacaacaggctacgctggccttatcgccaccgcacttagctgtcgaactaagaaatcggttgtgtgggaaaaaggaccagaataggtggaaagatagtccagaaatttacctgtgccacacacaagatggcgagacgtagggttcgtccctgtgctgccaaaagggggcgcccgacacggaaggcgggactccggagacacgagcgcacattggccgagagtggcgggcgaacacaaagttgacgctttgcgtccttccattggcagtttcttccgtctgtctctcggttgcagccgagctgggaatggggaaaacccggagtgtgggatcgtggagggcggacgatgccaagtccagcagagcttgcgctcggggctagaagagagactgagtctcccttctcagtttcattaggtaatgggcgacatggctccgtctccacagcggggctttgctgagcttagcacgcagtctcccggcggggaggaggcgcgcagtgccgggcgccactccgtctccagtacgcgttaggcccgc

SEQ ID NO: 25680 - DNA, 2300 bp, Homo sapien
gaggggaccgctatgccgtgcggggcccgcgggctgtcccactcgagggctggagccggcatcgcgcatcgagtccgcttgatacatgaatccgtgtgtgcttgggacggtgcccgcttgtcgactgacttggccgacggacgccggacctgatggtgggcaatcgaggtcgcctgcccacaggactaggggtgccctgccctgggagggcgcgagggcatggcagagggacggggcggcccaggtgcccgggtctcggcctcgtgacctcgttgctcgtcgtggggctgccgtccacttgcactgggacaatccttggtccaaggcgcccaggcgcggggggcgggcacctccgcgggcactgcgctgggcaccgcccggggcgagcgcggcccagcaccccgccttcccctcccccgcgctggcagccgtcgtgtgcccgccgccccctcttccctccccctccttccgagcagccgcggggagggcgggagagggagggaagggggttgggcgggcagctttgccgcgctttggctttctgcgtcagcagccccagcaaaacagctgcgggagcgcgcgtccggaacgcgctcgcgcacccctcccccgcgccctcggccctgctgagacccggcaaactccggccttgaatgacagtgcgatcggcgactgcgcagcgcgggacgcgccggggcactgccgctttaagcacgcttgtccattgttcggaatcgagccaatgagcgagcgcccgctccctgcgctcagccaatagcggccgggcatgggaagccgagcgccgcccactaatctatattaaagcttctggcgccgcgtgagtcccccactggctgctctgaaaagccatctttgcattgttcctcatccgcctccttgctcgccgcagccgcctccgccgcgcgcctcctccgccgccgcggactccggcagctttatcgccagagtccctgaactctcgctttctttttaatcccctgcatcggatcaccggcgtgccccaccatgtcagacgcagccgtagacaccagctccgaaatcaccaccaaggtgaggctggacgccgcccgccccctcggggtccgcgcgccgccgctcgggcggtgtttggcgcgcagcagctggactgtctcaagcccgctgttgctccctctcgcggggaaacggcccgcccccggcgcggtgccctcaggcagcccactctttgtgtggtgcgggggagggggcgggaaccgccgcgggcagacgtgatgcccgtcggggagtgggccgggcgccctcgggggccgagggctaggcgcggaggccggctcacggccctcgaaactcgtctgtggccggtatgagtggcggcgggaggagaagagcctggctgggggtcgtcggcccgccgggcgcacggaaataactttgaaactcaagcgcgttgggaatcggaagtgctggggggcgcgtgttggggcgcgggccggccgcgggaagtggcggcgagcgcccgccggccgcgctgctctttgttcggcgccaggccggcggtttcgcgccctgcagcggacctgaggtggtttgtctagactaagtcccgataaggcggatggggcgacgggctggctggccgcgacgtcggccgtcccggcggaggtgtgacgggcttatccgctttgggcgctctgggaggcgggggtgggcgcccttcgaggtgagtgcgccgggagcggccgcccagcttcagtcatgcacccgcggtgccgggcttggctgaggaggcgagagcccacgcgccgcagggaggaaagagaaagtgaagcgcggcgctggggcgacgatgggcgccccccgcggctgcccgggagcaccgtgtgcgccgcagctcggggcgacgcgggccaacacggcggccgcgacaggccaatggtagggtcgaactgggggggcgcccgggccccgtggcgggttcactgccctcggctatgaggtcctgcgcggctggtgcggctccgctcctgttgtcggcgccgcctcggtcccactgcccgccctgggtagcgtctccgcccttggcgggagcggggcgctctcagactgactggctctttcttaatatttcggccctcgtccgcgcccgtcgtgcccctgcagggattggcgcgagtcaccttggcgtctccttaacccttgtgtccctggcgtcatctctgactctcccaggggcgacttcttggcagagcggagctcggggcccggatctccacaggggctctcagtgaccccttctggac

SEQ ID NO: 25681 - DNA, 2300 bp, Homo sapien
cagtccttgggagagggcatcagttgcccagaaggaaggtctgggaaatgaccactgactgtcacatctgactggggttccagcaacagagagggagaaaggtcttgttgcgggagtcaggtggagggtgactggcgttgcctaccttgggaccagggcccactgaagggtctttcctggacagaattcagcggcacgctttacagttcctctgtgtccaccagggggcgcccattccttgataatcttttaacctgggctccagtgggaggtcattcggggactttgggagtggtatcaaggtgactctgggccctgaggtatatcctcaggcagtggttaattgtgtgctaggctcaggactaggggtaagtgtgttctgctagaaccagcaaatgctgttccaggccaaacctttggtgggatgaggcagctcagacagcagaggcagtaagctctgctgatatgggtgtctcagggggaccctagcaaggcagccctgggccctggctcatgcctcatcctattgttcccattttgcagaggaggggattgaagcccacaaggttcagttacttgcctcatgctaacatgcctgccgtgtctgtgtgcggaccagggcacagcttctcccctttcaggggccttgcggtagtggtcccgagcaggactgcagcctgagggagctgggttagatctgctctcagctccaagcgctacctgccctgtgtggccttccttcacggccttcgcctgcactcctgccttagagacaccctcctgggcgccgagcttgggaacactgcagtactgagtcgccttgggcggcagaacagagaggagccagcgttttggctccagaccctccctttcttccctggatgagccaggatgcagatacccaggctgtgcagggggtgtggggtagatacaggtcagagggtccctcctaccaaggcctcaacctgcccccgatcctggtggcagctgcctggggacatgctgaacaagcggcctgagcagccccatgagagtgactaagctccagccagagaagggaaaggtccccccagaactctggtgcctggtgtgaaacacaaaggtcgggggggcatggaatggggtggacacggtgtcaaggggcaggtagagggaactggtctctcttgctctcttcaatgcacacatttccctccttcccagcatctccccttaacccaggccaggcctctgcagacacttcagtctgctcctgggagttttcctgcagataccactggatggcttcctcaggtcctacctgggcaacaggcccactagcagtgcctataccggcccctgcccctgcagctctcattggaggatcccagaaggttctaggtgagctctaatccttacctccacctctgagggcacgagctggtggcacttcctccagttggctatcctgacccactgctcacagcccgtgtatgaatatccaaacggcacagtaacttctccaactgtgttcaaggggcagggtgggcctgcccaactaacctaagggacctggagaccaaaggttggatgactgccaggctgcaccagtgccaaaccaaaaccccggcattctaagaggccggggggtaccacgtgccaccagcagggggagccacgtcatggagctaaacctgtgaggcctgcagaggcagccaccacttggacgctcatcctgggaggcttggcaagttccctcttggcctataccaccagcaccctgcgctccacataatggcagtcccgtgtggcccgtttccagtgtctaggactgcaaacccccacccccagggcaccagggtccccatgtggcacccagtgatgaagtcctcctccccagttaaggcttcttggggcaatcactgactgccccagtgagcagcccccccagccaactgcagctcagtccctgcccacccaccagactctgctgcccatcacaggacacatccaactgcctcccaaaatgtcaacccactgtccccaggatcctccccctcctatccttgtgccctggaaggtctgaagaaactgaaacagaaaaaccaggcttgagacagctttgttagaacaactcagcaaaataaaattcctgtttattgttggacaacattgtttcacacatacatcaaacaggccaaaaaaaataaacagcaacttcatagacaaaaaaggaaaaaaaaagaaaccttttatctttggcctttttaaccatctcatacaaaccaactacttatagtacagctaagtacatacacaaa

SEQ ID NO: 25682 - DNA, 2300 bp, Homo sapien
gaaaaattagctgggcgtggtggcgggtgcctgtagtcccagctactcggaaggctgaggcaggagaaagatgggaacctgggaggtggagcttgcagtgagccgagatcttgccactgcactccagcctgggcaacagagcgagactccatatcaaaaaaaaaaaaaaaaaatctacttttaaaactattaaaactttaaaaaattctattacaatttttttttttttttgaggtggagtctcgccctgtcacccagggtggagtgcagaggcgtgatctcggctcactgcaacctccggcacccagattcaagtgatctcctgcctcagcctcccgagtagctgggactacaagcgtgtgccgccatgcccagctgattttttgtatttttagtagagatggggtttcactgtgttagccaagatggtctcgatttcctgacctcgtgatccacccgacttggcttcccaaagtgctgggattacaggtgtgagccactgcgcccagcctcttacaaaatctatgttgcccaagctagtctcaaactcttggactcaagcaatcctcccgcctcagcttcccaagtagctaggattataggaaagtgtcaccacacctggctgttaaaaaaactattaaaaactttaaaaaggggctgggcacggtggctcatgcctgtaatcccagcactttgggaggttgaggcgggtggatcacccgaggttaggagttcgagaccagcttgaccaatatggtgaaaccctgtctctactaaaaatacaaaaaaaaaattaaccggtgtggtggtgtatgcctgtaatcccagctacttgggaggctgagacaggagagttgcttgaacctgggaggcggagctggcagtgagctgagatcacgccactgcactccagcctgggtgacagggcgagactctgtctcaaaaaaaaaaaaaaaaacttaaaaagtagagacaggcatggtggcacatgcctgtagtctcacctacttaggaggctgagctaggaagatcacttgagcccaggagttggagtccagcctgggcaacatggcaagaccctgttttttaaaaaaataaaataaacaaaacccaaaacaaaaacaaaaaaccttaaagtcaataacctcaatttttaacaaattcaatatggctttcataaaggaactgttgaaagagatgatccaatattacacaattatctgtgggactaactcttttttttttgaaatagagtcttggtctgctacccaggctggaatgcagtgacatgatcttggctcattgtaacctccacctcctgggttcaagcaattctcctatctcagcttcttgagtagctgggattacaggtgtgtgccattacgcccagctaactctttagaaggtactattactataacatttgagagactaacatctttcccacagacaatgggaggtaggaagttattgacagtgtttttggaaaaagcacaaacaaattgttcttggaacaggaaccaaagctattaatatggtaagccattctccaaaaaactgtaaccaagtagtatcctcgaaaacagaattattaataggactttgccagattctgttaaaggtgatctaaacaaaatacagagataccggaagtacggtagtcaggaatgggagcaaattaacatagattcggtatatatattaaatgccagtctccttccatgtcatcacattttatcttcattacacctctgtaagacagaattaatttctgtgtttagagatgaaagactaaggctcagagagataaagtatattagtgcccaagatgacacaggtagtcagggtgaatcaggaatttaaatctggtttaatctaaagttttatttttatttttagttttttattctttctactctatcatactgtctttttcatatgaaaaaggtcaggaacctggaaacctagatacccttggatactcttttactctatttctcaaccgagctctctgcccactgaatggcaccaggagtcccacctgcctggaatgcctgtttctagacacacttcataatttcctgagacctgctcactcacgttaagacgcttgctggcatcatctgggactcgggtgctgcctctatcaaggactgccaggtatttgtggagttagggatcacaaagccaaactcgaagaaccattctgaaggaagaaggaaaagccggggtgagcaggtgccccagtataaagtttaagggctctttgtctccctctctagagtgagcctcttcctacc

SEQ ID NO: 25683 - DNA, 2300 bp, Homo sapien
taatgtatgaaacaatacagaaactagaaaatataaatacttatgttagaaggcattttctgacagagaacatcagttaaccagcttcataagttgtaacctcaaaccagagaaattcacctaaaatatacagaattttattatattaatttttagtgtctgtaaaggttatgtcttatctctcttttttaatgctcctttttaaaacttatgtctttatctgtaagcctctttattcttctaagttacttttttcttttagtttgttttggtctgtctttcataataaatgctttcttaaatttctgttgatacttggctatcttctcatatttaaaaacagggcactcagaggctgaggcagacagatcacttgaggtcaggagttcgagaccagcctggccaacatggtgaaaccccatctctattaaaaatacaaaaataagctgggcttggtgacgtgctcctataattccagctactcaggaggctgaggcacaagaattgcttgaaccaaggagatgaaggttgtagtgagccgagattgtgccactgcattccagcctgtgtgacagagtgagactctgtttcaaaaaaaaaaaacagagggggccactacaaagcaatttgagagttctgtgcttgtgggtgaagtttatggactgtggcattcactatagagtgatcttcatgagttgtttccttggggtacatctgatatttgtttctttaggtattttatcttggttggtcagatcctgttggtaaattttaaattttgcactattcgttttctgtccctttcttgcagtctctaggtgtgtgcagtcttaggattctcatagataaaagtaacttctctaggtttctgcttcttcctttagatgtctttttgactctcctcacattcttatgtgcttccatggcaatgagcagtttgacaaactttttaaaaagtaaacaagagttggtgggagtaaacatgagacacctagaatacaaagtgggagtcactttcagtgccttatttttccttagtcatatttgatcagaaattggatgaaccttcgggatgctgagacagggaagatactctggcaaggaacagaagacctgtctgtccctggtgtggagcatgaaggtactttccaaccctttatctacacagggctgtgaccaatgccagactagcacctgagcataagagagctaagttaacacatacctaataggcgggtgagcccctgaagacacagcatgttaatccatgtgttgttgacagtttcagttactttctttttttttttttttttttttttttgagacacagtcttgctctatcacccaggctggatggaatgcagtggtgtgatcttggctcactgcaacctctgcttcccaggttccagcgattttcatgcctcagcctcccgagtagctgggactacaggcgtgcgccaccacatctggctaatttttgtattttgagtagagatggggtttcaccatgttggccatcctggtctcgaactccggacatcaagtgatctgcccgcctcagcctcccaaagtgctgggattacaggtgtgagccaccacgcccagccagttactttcttaacagttctttctctcacttcccaaaacccattttgtgctgatattttaccattagaacatacccaaagatagaaactaagatctcaactttttctccaaaagaaaatttgcatttttatctccctgaagtaaagaagaaggaaggggttaaaatcaccagaacagagtagagagaaggtacccatgcagcccccttcctgatgagagtagttagatgaggcccttagatgcacaaaacctggtgttccttgaagatctaatatctttcagatacgggtgaccaattagagacctctgctttcagccacacaaagtgtaatgcacttaccaaggcattatccaaaatgtaagaaagtgttctctaaatcagctgtaagaaagtgttctctaaatcagctgtaagaagctcccagaaatttgaagcatcatagtcctgtggttttcatttagaaaggcttcaacatttgtttttctcttaccagcccgtgttcccaagaaaatcctcaagtgcaaggcagtgtctcgagaacttaatttttcttcgacagaacaaatggaaaaattccgcctggaacaaaaagtttacttcaaagggcaatgcctagaaggtattctgctgcctacatgcctgaaatcagggcttagggcgaccaggacaaaaggcaacaatacccagtgaa

SEQ ID NO: 25684 - DNA, 2300 bp, Homo sapien
aaattggtacaatcattttgaaaaactggcaatgtctactatcactgatcatgtgcataccctccctacacactagcaattcctctcctagaaatgtgtgcaagtgtctacaaaaagaaacatgtaagaatgctcactacggctttgctaataatagtccaaaaaataacaacccaaatgcccgccaacagtggaaaagataaattgtggtataaacatacaacagaatactattcagcaattaaaaggctacacacaacatggatgaatttcacaaaaatactgataaagtaaaaaagccagacacatactgtacatactgtattattatatttaactggaattcaagaacagagaaaactgatctatggtgatacagtcagaagagtgattatctcaatatgtaaggatgtaatactgattgggagggagcactaagtgtgctagaaatgttctatatcttgatttgggtagtggcgacaggggtgtatacctatgtgaaaattgttcccatactgtatgttacacctcattaacaaaaaaaaaacttttttaacatggaaaaaaaattcaagttcaaatgccaccttgtccattaaagttttgccagctgcaatgaaccttttcatcagggcctccttagcattctgatgtcatttctttatgccattttatcacactccatcttgaatctcagtggagtctccttatttccctaaatatatgttcatcttcctggtggcagtgaccatgtccttcaccttttacccactcagtgcctgacaaataacaggctgaaaagatatttgttgaattacatggaagaaaaaattgggtgagttcccagatgggtgaaagtggggacaggcagaggaaggaaggccaagagaaggacagaggaggtttccaaggaaaccgtggctcacactgtaattttacctacttcctgaaatcacattaaatgtcaccttgagtggcaaaaaacaaaacaccaaatcctacctaggctgaaaataaataaatatcacactccctcactcgcaagaaatccaccaaataaatgctacctaattctgggtgtttcaacagtggataggaaaaccgttcaaggagaataattcacattgccatgctgctaaaaatatcacctccttagtgtggtgcaaagagtccagactgcaagtcagccgacttagggctgaattctaactctgcccgaacttgctgtgatctgtggccaatcccttcgcctctctgggcctcaatttcctcatacgtaacaacaggggatagattagcaaagtccctttatgttttgatattctgagtatacaatccatagctctcccggtgcaaaccaggaatacagcaaaaaaccctgaaatacatgtaaaaggcgcctcagaccaacaaacaagcacgatttgaagaagtcattttgttctctttcacggtttaatcagtgtttttgtttgttgtttgcagccttaccatgatttgcagatgtctgagttccatgtaaacagaagttaactctctgcgggctgtcatcttcttttgagggtgagaagggtcttcccgttgggtttcaagtctcgggattccgaaacgaccaactcagcgggcgggtttgtgaatttgcgcacactgcgcggcacactggagtctaagttacagaggaaccgagtgcaggggatgctgggatttgtagtccccgggcctctttgtggtgcgctgggatctgtggtcccccgagtgcgccgctggaatgctgggaaatgtagtctctgtcgcgtcgcacagtgcaactcagctgccgtctcagacggctagtgtgctcagtggctggagcaggtccctaaagcctctgcagatccgaagccaaccctccgctgggacaaactctaggcaacaacaccagatgaatattgtgtcctatgggacttcccggggagggcccttcccattgacgttaacagtccccctgcgaagccgctgcgcgctcctactggctggttgagatgccaatcgccaaggctggctttccattggttccaggagggcactgcgaggctagggggaaggagaagggatcagaagcgggagctgaggggagagagaggccggtcctggtctggccgctgcggctgctagcccgaggtctccaagccgggctgcggctccatcctcggctcctgggcaccgtctgcgaggctccgccgaccagagtgagaaagccgcgggcggcgaccgccgcatcatgtcagccaaggacgagcgggccagggagatcctgaggg

SEQ ID NO: 25685 - DNA, 2300 bp, Homo sapien
ttgccgggtgtggtggcacgcacctctagtcctagctacttgggaggtggaggtggtaggatcccttgagcccagaagttcaaggctgaggtgagctatgatagtgccactgcactccagccgcggtgacagagtaagactctgtctcttaagggaaaaaaaaaccaaaatactaaatccaaattgcagccatggagtctggacattgttctagaggaagtagaggcattgctggaatttctatgaagtcacactaaactcacttgtcttcctctcactctcatatttgtccctcctcttccatagccctgttcacttaacactagctctagacagctctggcctcccagcgcagaatcctgggtgttatgctccctccctctccttatattcaactggtcaccaagtcttatagattctatagtctaaatgtctccaacagtgtcccttctttttcatccccaattgccactacctttgtttttgtttgtatttttgagatgcagtctcagtctgttgcccaggctggaatgcagtggcgcaatttcggctcactgcaacctccacctcctgggttcaagcgattctcatgcctcagcctccagagtagctgagattagtagtgcatcaccatgcccagctaatttttgtatttttagtagagacagagttttgccatgtggcccaggccggtctcgaactcctgacctcaggtgatctgcccaccttggcctcccaaagtgctgggattacaggcgtgagccaccgcgcccggcaacacaatctcttatctagaataaatcggtcacctcaccggaggttttccctgcctccaattctctccacatccaatccactcctatagcacctagcatgatcactctaacaaggcaattattcatacctctccttagcttaaaaagcctaagtaattccccagtacctggcatgtggattccaagacctttgatgacctgactccagctctgtacccctcatttctcactcttgaaaaccctggggtcaaaccactctgggtttctttttgacatcagtatatgctgcacagtgcgagcctctgtgacaatgggcactaccccccttttttcccctttttgtctgtttttttcttccccaacctcttctgtgcttccaaagtgttgtcatatcttccccatagcatttaacacattggagcttttgagggtaagagctttgttttatcttcatataacttttcaggacataataggtgctaaagaaatgtttttgaataaatgaatgagttggttgatgctaggctcctttgcatttgtcctgtctcatttctgcattctaacgcacgataggcaaatagggctgtttttctctctcattttcaagacctgaaagactgtggtgtatacaggaatcagtttaagtgttcaattatgtggcatttcttagccatcttcccaggggagttggtaagcaccagatgcaactctatcaatgacattttggtcatagaaccattgttggcttaacccatctcttgcttattttaaaacattttctgaatagaggtcaagaacatcgtcttcggcctcagatagcctgggtttgacaaagatagcaagctttgtcactttctgacttttggacttagttaactcacctgaaaaatgggaacaataatacaagccacagttatgagaattcaacgagataatgcatgtacagcacctggcacatggtaaaacgctcaataagtggtagttagtaggcttaatgtatctcggtgcccaggggtagcgcagtagccatggggagctcctgagagagaaagcacagcctaaggggaggatttggggcccgggatggcgatggcgacggttgggctgcagtaccgtctaggccgcattcctctccttgggcccctagccaccccctccccgcctggttcccgggctgcagactcttccccgccccctcgctcccacttccccaccggaggtcgaaggctgtaaacgcggcgggtggaaccttgtgtgggcggaacgcgagtgcagcggtgggaggcttccgggggagctgcacgggcgacgggtcggcggagacagaaaagcgccggacgccggggtgatcatggacgcttgacaacctgcgggcaggcgccgggaggccgagccagcgactaagaggaccgagaggtggcgtggacaggtaggagctagcgagagggtgggccgagcggggccggcgctccaggctcggccagacgatccggcttagagcccgccgccaaggaagcccgcggc

SEQ ID NO: 25686 - DNA, 2300 bp, Homo sapien
ttttcccctttttgtctgtttttttcttccccaacctcttctgtgcttccaaagtgttgtcatatcttccccatagcatttaacacattggagcttttgagggtaagagctttgttttatcttcatataacttttcaggacataataggtgctaaagaaatgtttttgaataaatgaatgagttggttgatgctaggctcctttgcatttgtcctgtctcatttctgcattctaacgcacgataggcaaatagggctgtttttctctctcattttcaagacctgaaagactgtggtgtatacaggaatcagtttaagtgttcaattatgtggcatttcttagccatcttcccaggggagttggtaagcaccagatgcaactctatcaatgacattttggtcatagaaccattgttggcttaacccatctcttgcttattttaaaacattttctgaatagaggtcaagaacatcgtcttcggcctcagatagcctgggtttgacaaagatagcaagctttgtcactttctgacttttggacttagttaactcacctgaaaaatgggaacaataatacaagccacagttatgagaattcaacgagataatgcatgtacagcacctggcacatggtaaaacgctcaataagtggtagttagtaggcttaatgtatctcggtgcccaggggtagcgcagtagccatggggagctcctgagagagaaagcacagcctaaggggaggatttggggcccgggatggcgatggcgacggttgggctgcagtaccgtctaggccgcattcctctccttgggcccctagccaccccctccccgcctggttcccgggctgcagactcttccccgccccctcgctcccacttccccaccggaggtcgaaggctgtaaacgcggcgggtggaaccttgtgtgggcggaacgcgagtgcagcggtgggaggcttccgggggagctgcacgggcgacgggtcggcggagacagaaaagcgccggacgccggggtgatcatggacgcttgacaacctgcgggcaggcgccgggaggccgagccagcgactaagaggaccgagaggtggcgtggacaggtaggagctagcgagagggtgggccgagcggggccggcgctccaggctcggccagacgatccggcttagagcccgccgccaaggaagcccgcggccgtgcccgccccgcccccgccttggggagcgcgtcccgcggctcctcactccacgcctgcggccctgcttggagcataccgcccaccgtgaggtctgctgcagcttgcgaccctcagcttcagtgctgtggctgctttcgctctcccatccccaaaggctgctcgtttgcccctctccagtccatccaaatagcgccctcccctgacgggaatttatctccgctctgtgcctagcctctggccctcccactccagaagaaagcgactgtctccgtctctttacattctctgcgcccacaggctttgctccttaagccgagattttttgaagggacagaagtttctctccatttccctaccccctctccacccccacctcctaacattgggactctttgcagagatccccatctgtctcttcacacgggtcctcttggaagggccttttcgctccttccctctttaccgtcaccgaccctcctttcttccctactcctttccttcttcctcgtatcctctccccttctcttttccctttcccttccgtcctcaaactcgttgttccccagcacttcattgtttttcctgtgtctggccggaccttcttaggtaaccctaagtgaggcgacatacttgtttctctaatactgtgaaagggcaactaatctgtgtgcctgccaacacaaaacttagttcctcttgcaccaaactattcttcaaattgttctttgctgcactctactataccgtttttcgttcattttgtcacgctgctctaatatgtatcattcttggaggagaaatcttacctggaactcctgtacactcagcgtgtaattagattacacaattgagggaccctcctgtacttaatgtcttcggagcgctgatacaatattttcactgttttcccaaatctttttatcgttttcttgaggtttttttttttttacacattctgaagtcacgtttggttaaaatgtcgtatcaggaggaggccgaatacagggatttttccccatggtcttacacagcatgtatgttcttagtttgaatatatcgctacttttctttcaaaatgatgtctccctttatctgtgctta

SEQ ID NO: 25687 - DNA, 2300 bp, Homo sapien
tttatcgttttcttgaggtttttttttttttacacattctgaagtcacgtttggttaaaatgtcgtatcaggaggaggccgaatacagggatttttccccatggtcttacacagcatgtatgttcttagtttgaatatatcgctacttttctttcaaaatgatgtctccctttatctgtgcttacttgacttgattaaatgagacatctttcttgtctggttttttgttttccttatctgtctggctgtagattggattctgatgacacagtgggagctgtaactgattgcttttgcttacatccggtgcctctgtgtataggcagtatcctccatttcttaaccagaatgtataaacgaggtggatataaaacagctgctgagaaactcatgtgtttttctttaggtcctggtcaggtttaaggacttagaaggtgttgcctctggaggagggacaggtggaagtgaaatgacttttacaaagtgtgtttcaaacaccagaatttaggacaagatccttttaactccaggttgaactccacccatctcataaggtggtcattgcatctggactcaggaactgttttttttttttttttttttgagacagtctcgctctgttgcccaggctggagtgcagtggcacaatcttggctcactgcaacctccacctcctgggttcaagcaattcttgtgccacagcctcccaagtaactgggactacaggtatctgccaccagcctagctaatttttgtatttttagtagagatggggttttgccatgttgcccatactggtctcgaactcctcacctcaggtgatccacccgcctcagcctcccaaagtgctgggattacaggcatgagccactgcacttgtcctgttttttctttatcaacactataaaagtaaagtattctggtgtttgattcagcactgaataggcacagactttgcaaaggagaaggaagaatgactgacacaattttcttttggacagatttcaaggccagagaatggcaggggaacagaaaccctcaagtaatctcctggagcagtttattttactagccaaaggtaccagtggctcagccctcactgctctcataagccaggtcttagaggctcccggagtgtatgtctttggagaacttctggagctggccaacgtgcaggaggtaagaacggtttgcaaacaatttctctttattctaagactctgtaattctccaggtttccaaagaatttcagtgctgaagtattgtgaacctgtgaggtaccctattgtgagacagatgggaattggtggggcagagggagagattgagagaatatccttggctccttttatccagtatttttatcttaccttgggtaaaattagattgttgctaataataacctaaaagatagtaaaaaagtcaaattgatcctgataaattagaaaagtagtgctgtaagcatgggctgtttaataggagtagattcatgcattcttaaggaccagaaacctccagtgcaatatcgataaggaagattggtcagggacacacagcagaaacatactgctattgaacataagatggacatgaataggagtgtattgttcttgaggaaaagggcagtgttgtgctaaatgtgttagatgtgttagatatgacatgaaaagctaggacatagttcattttacttgtttgcttgcttgttattaaaaccttggatatccagttttggtcattgtgcctcaaaaatgagaagatccattgaacagaaggaacaaagagatgtaaagcaatctatacttctcaacctctactttccaatttgaacatttttatttatttatatttattcacttattgagaaaagtctgtaagcatctttattgttttgtggggtggaggctggtgctcaggagcttttggcggattggtggggcaggtccccttcctcttcatcctcacaggcttctggctatgcagactggtgctggctctgtggaagctgccatgcatagatctgggtgatggtacttcttgtggagcatgtgctggatgctgttgagagtggccccggagttcttggtggtggcgatttgcatataggaggtggtttgcttttgttgggcagtttatcaccttcatgaccaccacaacacctttgctgttggctccacacccacagtcagttttaacaggagtttcagtgaatcagttagttgtaaccaaaggagttgccggccttcagtttattggattcggtgctgtgtgtctgcctattcctcttgatggggaaactg

SEQ ID NO: 25688 - DNA, 2300 bp, Homo sapien
agaatcttgagaagatttgaactccttccaatgcttaatgctttgtatgtgtgtgtgagagaaaagcagttcgttgggcatgctgtatagaaagtaaaacattcctgagagagagaaattaaatttggggctttaataatcttgtttattttttcccgaagaaccagagttggtagagaccccaggggccaagtaatcaaatagtacagaataaacagccatggcatctttgacacatgctcacccgtcctctgtttgaacactacagtgattggtagacagtttggtctgtggtgaactttttttttcctcttcagcttgcggaaggagctaatgctgcttatttgcagttgttgaacctgtttgcctatgggacatacccagattacataggtgagttggtgaagatccttcaaaagacttgtgttaattatgttgctcagtttggaagaccatcaaggtttgagatataaagcatggggtagtggggagacttcttgacctggctgcctcccattttgctgtgcccggtgggtgacctcacaaagggaatgttccttctcaccttttatattctagtgggtcaaatggggcctgtgtgtgctcatccacaaatgtagcccttgtttgttttccagatgagattcttgaggactggtgtttgtagggctcttggagtgctgtgaagtgcagaatacccacctgtagaatgtttcaacattttaaatattatcaaaataataccagcatattgaagaaaatttggaaaatagactttttaaaagtcactcataggctgggcgcggtggctcatgcctgtaatcccagcactttgggaggccgaggcaggcagatcacttgaggtgaggagttttacaccagcctggccaacatggtgaaaccctgtctctactaaaaatacaaaaattagctcggcgtggtggtgggcgcctgtaatcccagccactccggaggctgaggcagcagaattgcttgaacctgggagatagagactgtagtaagctgagattgcaccgctgtactccagcctgggcaacagagcgagactctgtcaaacaaacaaataaataaataaatgtcactcatatgttgctcagacatttggatgctggacttttttgtgccccttatgtttgtgttttgtattacataggtacaactatgtatacagttttatgtcttgcttgtttcttcccacttacaaacatttatccatattttaagtctttttaatatttttaatatttcataatctacttagctcattttctgttgcagggcatttgggtcattttaaattataatctgaagtattaggttgaggtatttgtatgtccaaacactaacttaccttctacccaaagcatttttttctggctttcctacccttttttaatggtatgactgtagcctgatactcagggccttcgctgcgatatccctgacttcttctttctccctggtcacttctactttgtgctgctgtcagactggacagtttgccagttcctggtacaccacatttttttctgaccttccctttgttccagggaatgtgttctgtttttctgtccttgcttactaaagaggcagcattgcacagactctgttagcagactgcctgtagccagtctggctccacttctactagttgtgtgttcgttgacaaatgaagtaaccttatgcagctcaatttcctcgtctgtaaagtgggagtaacaatacaagcccattattccttacctacactcctcgaagttagatgtttcagaatttagaatttttgggactttaaaaaggtaatatgatgcgcatgcctttttatgtaacactcccagaggaatgtggaaacaagtgggataaaaagcctgtctccgtacaggttagaaattcccaccaggtgaatttcagcaccatgcttaagaaaaaatcagtttggatatagttttttggaatccagaattatcgttaaggaattgaggacacttggagtcttgcgggttgttgtgaagatgaactggatgtgtgtatgtacgtgtggatctatgcaatccacaagatgtaaagcttgctatttatgttagctgctgcagctgctgcccttgctgttattatcatttatggttattattgaaattttgcctctttctcaaggctcaactcaaactccatctcttccatgaattctttctttttatcttctgtactttccaaatgatactgttctctttccctctcccctcccctttcatctctttctcttacccctgtctcctccc

SEQ ID NO: 25689 - DNA, 2300 bp, Homo sapien
gcggtggctcatgcctgtaatcccagcactttgggaggccgaggcaggcagatcacttgaggtgaggagttttacaccagcctggccaacatggtgaaaccctgtctctactaaaaatacaaaaattagctcggcgtggtggtgggcgcctgtaatcccagccactccggaggctgaggcagcagaattgcttgaacctgggagatagagactgtagtaagctgagattgcaccgctgtactccagcctgggcaacagagcgagactctgtcaaacaaacaaataaataaataaatgtcactcatatgttgctcagacatttggatgctggacttttttgtgccccttatgtttgtgttttgtattacataggtacaactatgtatacagttttatgtcttgcttgtttcttcccacttacaaacatttatccatattttaagtctttttaatatttttaatatttcataatctacttagctcattttctgttgcagggcatttgggtcattttaaattataatctgaagtattaggttgaggtatttgtatgtccaaacactaacttaccttctacccaaagcatttttttctggctttcctacccttttttaatggtatgactgtagcctgatactcagggccttcgctgcgatatccctgacttcttctttctccctggtcacttctactttgtgctgctgtcagactggacagtttgccagttcctggtacaccacatttttttctgaccttccctttgttccagggaatgtgttctgtttttctgtccttgcttactaaagaggcagcattgcacagactctgttagcagactgcctgtagccagtctggctccacttctactagttgtgtgttcgttgacaaatgaagtaaccttatgcagctcaatttcctcgtctgtaaagtgggagtaacaatacaagcccattattccttacctacactcctcgaagttagatgtttcagaatttagaatttttgggactttaaaaaggtaatatgatgcgcatgcctttttatgtaacactcccagaggaatgtggaaacaagtgggataaaaagcctgtctccgtacaggttagaaattcccaccaggtgaatttcagcaccatgcttaagaaaaaatcagtttggatatagttttttggaatccagaattatcgttaaggaattgaggacacttggagtcttgcgggttgttgtgaagatgaactggatgtgtgtatgtacgtgtggatctatgcaatccacaagatgtaaagcttgctatttatgttagctgctgcagctgctgcccttgctgttattatcatttatggttattattgaaattttgcctctttctcaaggctcaactcaaactccatctcttccatgaattctttctttttatcttctgtactttccaaatgatactgttctctttccctctcccctcccctttcatctctttctcttacccctgtctcctccccatccctctcctcctctcttctagtagcttgtacctttcttctggtagttctgccttggatttgtagctatggaaacatctgattgtaagaccgaggacaagtccagggccatgaagttgcacacctccaggtggttggtggccctggagttgtgccatgcagcagccctggcaaagcccatcttgttcatccttgattcttctcagtacagagcattgcacacaacagatgctcgatgaagatatgtttaatttaattgaatgtcacaaggggcacaaatagtactccattaagataattgccacatcattttgcttgtttgctttttaggagactaaactctgtgtttgtagaaactgagtcttttcttctttggaagtacatagtcttccaaagaagacaggaatatttgtcaaatgaataagtgcaaagtcatgatagtgattcagtagtagatttggtttggggagttggtgagcttattccataaaagaaatcctaattttattttgtgtcttgatttttgtggtgggtgggactgagcagccaacaaggagagcctgccagaactgagcacagctcagcagaacaagctgaagcatcttaccatcgtgagcttggcatcaagaatgaaggtacggtactgagccttctcttgtcttcctccttaccccaagtcagctgtctcattgacatcaatgaaggaagtcccagctgcacataggagagtcacatcataaatgcataaaatttgcttgacagaggaaaagataaaatggtgtagaaaagtactccccattc

SEQ ID NO: 25690 - DNA, 2300 bp, Homo sapien
gctggcccctggaaaccagcccagtgcttgactctagagtcagtctgtgtggctctgcctgactctttaaacaggtataaagaaagcaagtgtcagagaagttccagatggtaacatccttctttgcacagcaggcaaaaagcagagggaactttcacagcccacctggatacccctccctatactgctttctagttcctcttcctttctcctcaaatgaaagagtggtgccactctatgggtgttagcacggagaggaattggggggctgcgtggaggtggtgactcaattcaccagaatccacagaaggtgccctgttgatgtctggatcttcctggagatcaggaaactttgctgccccaaactcagacctcaggtgttagctgtttcctaagcaaagtgacctgtgtagtggttgctccaatgttgtgagtcagggtatgagagtgggaaggggtagcctgagaaaggtgccgacagagcagaccatgatgcggccgccttagcagctctgggaccaggctcactaccacggagggaagagggaggcttggagggaacctggttctccaagcccctcttcactccagttgccttcctgcctcaggcacagcttcctctccctggaaaatctcgtctgggctactgtctccccagaatcgccttcacgcctggggacagccactgcactcctgcggcaacatttgttctctctccagcctgcgtcctgctcagcagcagccagtcatagattcctgctcttcaatcaattcgggggatctgggctctccgcctctgcggcccacaccgcagtgcccaaatgcccaccacactccttagtgtccaagggaccgagaagcccagtgcaaggagagcaagttcgtgagtggtagggatatgtggccatgtcccgagagccacggggacctctctacagtcaaaaacgggaagttgaccacctgtcacggctggcagaggctggactgggccgctggctaggaagctctctccccagcctgtgaaagtgcacaggatactggagcgggcttcccccagcagcggatcctcgcgtgggtgcaggcaaggtcaggtgcgcattgttcccacagagggagttcaccagcggagtcagaccccgggacgttctgtgtggccgaaaccggctgaacgtgaacctagagcagtaactggcgagcatacgatgccgcggagcacacgcatgagcatgaatatcttggttccgcgctcgcagtcccctcgttcccgccttgcgctcaaacactcaggctggcgacacccctgcactctccagtgtggaagacttgcgctcccccctgcggcccaggcgaaccccgctctccctgcgcctcccaccccagtcctccaaccccatcctctgcctccccaacctaacgacgtcgctgtggtctgcgctcccgccctgaccggcaggtgaaaggcggagctgcaatgccatcccgcggctgtcaggtgcccagggaagagtttggcgacaagcagggctgcgtggatttcgggcagcgccaactttatgcctgtatgactttgggcaagtgacttcattcctctgagcctgtctttgcacctgcaaagagggctacgtatcccttccaggtagagtgagtgcgatgaggacctagtgggtgcacagggcaccaggcgcaccgatgctcggcaggccagggcgcgcgctcgctgcaaatggagttcccctgtgcgctcagctctgcagctccaagtgcagcctggagcgagcccgccgagccgcgggatccctccggggtgggataagggaggggagcccccgcggccccctcccggccctcggcgcggccgcgtgcgtggtgtcattggcccgggcggcccggtgggcgggaggatgacatcagcggcaggttggattataaaggcgcgagcagagtcacgggctcagagcgcacccagccggcgccgcgcagcactgggaccctgctcgccctgcagcccagccagcctgctccgcatccccctgctggtctgcccgccgacctgcgcgccctcgctgccgcccgtgtgcgcccctcgaccccagcggcaccatgcatctctcccagctgctggcctgcgccctgctgctcacgctgctctccctccggccctccgaagccaagcccggggcgccgccgaaggtgggtgctgtcgtggggacgccgagcctgggagaggcgtgggaggctgggggcttggagaatgcggcgcgcaggacccaggagagagggaaggcaggcggctgtctcct

SEQ ID NO: 25691 - DNA, 2300 bp, Homo sapien
ttttatttttttattttttgagacggagtcttgctctgtctcccaggctggagtgcagtagcccgatctaggctcactgcaacctccacctcccaggttcaagcagttctcctgcctcagcctcccgagtagctgaggctacaggcccccaccaccatgcctggctaattttttgtatttttagtagagacaggttttcaccatgttggccaggctggtctcgaactcctgacctcaagtgatcagcccgccttggcctcccaaagtgctgggattatagtcatgagccactgcatccggccacagattttatttcaatcctttgttctcttcctcttctaggtcttccccttcctgtccccactggcccctctcctatccactgaatccctggatgcctgacaccctctgcctcctgtccttgctgggtttcctctaccctctacatttcaaagacaagttttgctgaaatcacagttttcctgagggttctagaaaggtctgtgtgaacattaaaaaacaaaggttccttgggttcatttagtctttaagcaaacatcgattgaggcctgtgtgtgtggcaggtactgcagatgcaaagttttccaccttcatggagctcatagttactaagggaaaccctgaattttcttagactactgcaacgcactggccgggtgcggtgactcacacctgtaatcccagcactttgggacaagatgggcggaagagtgagaccatcctggctaacacggtgaaaccccgtctctactaaaaatacaaaaattagccgagagtggtggcacgcgcctgtagtcccagctactcgggactgaggcaggagaactgcttgaacccaggaggcggaggttgcagtgagccgagatcgcaccattgcactccagcctgggcgacagagcgatagtccgtctcaaaaaaaaaaaaaaaaaaaaaaagagaaatataggcacaatttaatgcatctcttttcctttttcaatatggagcatacggtggttcaagcatctgtccacattgtattcccgaagtttgatccctaccctgccctgccctcccgtctttccttccctctctctttttttttttctggagtgcaatggtgcgatctcggctcactgcaacctccgcctccggggttaaagcgattcaccagcctcagcctcctgagtagctgggattacaggcatgtgccaccacgtctggctaatttattatttttaatagggacggggtttctccatgttgatcaggctggtctcgaactcccgacctcaggtgatccgcccgcctcggcctcccaaagggaagtttgatttttctatggtcaccaatggacacttgatctccatagcttgagaatggcggccatcccctcactggcattctttcctcttgtgctctcccgaacgttctggctgctctttggatttccttttcctttgctcacatctacaatattggtgtttcctaggtcccgtacttaacgattgtttcctctcaacacgcttccctgggcgggctgaactgtcgggggctttctcggctgcgcttcctctctcacctgaaaccctcttcccaaccctttatactaggtcgacgtctccaacatcagctgctccccacccgtgtctgggtgggccccttgggcaggctcccctagtctcctttccttcgatcatccccacgtgcaggacgtcatctgcttgctctgccatcagcctcacatcctgagggcagggaccatgcgggggttgtccatctctgtatccccagtgccagcactgcacctcgccccaagcagttgtccaataaatgagcagtgagtaaatgaaagaatgagcaaagccttgtaacaggaaaggggccggcggcgtctgccgtgcaagacctggcccagtggagcagagcctggaggttcaggagccgggtctggaaggctccttccggtggaagaggggcccggagccagccggcgcctggcacaaggcgtctcagaggccgcccactgggagccaaccgttgcagccagttgtccccgcgagcgaggccggagaaggcgcggcggcccctggcctggccatttcgcccttgtcgcagctgaaccgccgactacgagctcctgcaccgcgcacacaccccgcgcgcttcgctctcggcctcgcccggccaccgtcgctctctagaacgccgcgcccgtgacccggaagagcattctccttagcaactgcgggactgcggcggcgccggcctccggggagaaacggtgaggccctcactcg

SEQ ID NO: 25692 - DNA, 2300 bp, Homo sapien
ctagaaaagtggcaatcttttagtaatttctattttcaaaaagtctgtgtgtctataaatagcaaagaatactgaactcattattcagattatgttccatgcgtgttgttgtgctgatttaaaactcaagtctcatctgtgtatattttattcatgttttcttagccactctttcctttttgttattgttaaaaatcaccatcagggagtttcagtctcttgttggtctctttaaataataattgtaaaaaggtataatatctccagttttaaaaatacacagatgtttgaggaaagagttgattgctgcctcctgtttctaggtgtgtctgctgtggctggtccacatgacattggtgcttcgccaggtgacaaaaagtcaaagaacaggtccacacgagggaagaaaaagagcatatttgaaacttacatgtccaaggaggatgtttcagaaggcttgaagagaggaacactcatccaggtgcttaaaatctactggaaggctattctctgaatatgtagaatccaaaacaatctattaaactgtttcctgttctgtgctatatgctttcagagagacgatgatgtaacaggtgcagggctgttatgatggcataacagagatgatgaggtaacagattcttcttagaactacagtacatttagaggtaataagcaccacaagacaggaacaggaaaagtgctctgagatttgagaggagggaaccactatttcccattaggattgtctagagatgctttattggaagtgacatgtttgagccaggccatggattggtgcagtttgagtaagtgaagataagagagagctttacaaatgtagggaccagtgtgagctactacaatagaagtgagaaattgggtttggatatatgaaacattgaatagttcagtttttctggagcatgtggatgctgaacgacggagaaaaatggatgaggttggaaaggaagcagtaaacaacaatagacagtatttgttgagtgctttatactttacaaactatgtttacaagctagttcagtggtttggctgaacaaatgtttatggagcatccattgtgagccaggaacagttatggttagaataagtgtgcagcatgggtgcctttgacatggaggtagacaagattgccttgctgtacttcagcttgcagcccagtggtgggaggcagtcatgtgaacagatgatttggggataaaatggcaagtgctcagataaaagggtgaccagggtatatggcaaaatattggggggaaatggggaaactgtgtaggctgaggttctggagaggcttcctggagttggtgaccctcgtggtaggtattgagggtctagtttgggcctatcagatgagtgatatgtgtgtgggaggtatggagaggcagtggcgctaacgaaaacatgaacttgtgaaacaacatggagtatggcagcttaggcctccttgggcataaactatcaggcaggtagtaggctggggagggaggcagggccacatattctgtgaattaagtctatttcataatactttcattagtatagaaatattgccatgtgctacctggctcacttgaaaatgctgtgttccattttctcttattctgagagcccagcttctgtatttgtgtttttggctgaagatctaaccaatttacagatgctgtcatcttctcttcctttttgtcccctccctccctccctccctctctccctccctccctccctcccttccttccttccttcacctttctttacctttctgtatttatctgtggtcaagtgcacacgtgcacaagaaagaagaaagaaaactatcttttaaaaaatgagttggtttttctgattcttggagtactcttggtggttttaatttattatttatttatttattttttgagaaagtctcactctgttgcccaggctggagtgcagtacaatcttggctcactgcagcctctgcctcctggattcaagcgattcttgtgcctcagcctcccaagtagctaggattacagaaggtaaaaattagtcatgccatcatgcctggctaatttttgtatttttagtagagatggggtttcaccatgttggccaggctggtcttcaactcctgacctcaagtgatcctcctgccttagcctcccaaagtgctgggattacaggcatgagccaccacacccagccctattggtgtttcttttttttaaagctttccctggatttatttgacaaggcctctcttaggagagatgaagctgcatttggatgttagtcca

SEQ ID NO: 25693 - DNA, 2300 bp, Homo sapien
atgcaagggaggagtcaggcctttcaatatcacacttaagacccacacataaaatatttagttttgcctacataatgctcatctctacagttgaaaggttttagtacctctggggacataattatgattcctctgaattggaatctgagactacaagaaccctgactgatattaaaaggcagaaaatatgctatgtactttccttcccaaaaaaaacttatgtgcaactcaagccaactgagaggttactcagaagtaataattcaagaatggcaacaacaatataaagaagttaataatatattattttgaggcacagaaaattgccaatatgaccatttattaacatataaaacacagtttcttctgattctacctaatagtattaaaagttacataaaataactaaccatccattaattagatagcatacatagcttctgggagaagtataaaaatgagatataccacatagagtttattagagaactacactaatacgaaaagaaacaaattcttctatgtggtgggagtctcagtgtttgtgaggctgacctagaacacagtgaccatactattctcaccttgaagttaagagtgagtgaagttggaatgctatcctccaggatacaatacggacctaaatgattgtcttatgcctaaaatagaaaaggggctaaaaacttagacaaaaagcattttataatgtccagttttttaaatataatactaaagtccaggaagaactcactatttaaagattccagggagggagagtagaaggaaccatccaaacattctattaaaaaaaaaacccacatttaaaaggaaaaaaaggagcaagaaaaagaaatggcagaaggacaaaacaatctctataagcatataaccacagaaatgaccaaagatactctcaagaactcccaaaaatataagctttataaaacaagagcttgaagcaaagatgcaagtgcataaggaataagtaagtcatgaaaggaaacaaaaactaggtttttagacctcaggaaataagtagaaaagaacgataaaactatcacagaaagtgaaagtcatactggaaatacctaatgaagaactgacactatttgaaagccataaggatcatagagtaaaatcttgagaaaagtgaggaaaatgaaactgggcaagtagagtttaaaaagataacaaagaaaacagacagatgtgaaaggcagaccaaggagttccaggcatccttgaaatacagagctagagatgaggaatagaaaacattttctaagattctttggaatagaaaactttttttttttttttagatggagtctcactctgtcgcccaggctggagtgcaggggcgcgatctcagctcactgcaagctccgcctcccgggttcacaccattctcctgcctcggcctcccgagtagctgggactacaggcacccgccacaacacctggctaattttttgtatttttagtagagacggggtttcaccatgttagccaggatagtctcaatctcctgacctcgtgatctgcccgcctcggcctcccaaagtgctgggattacaggcgtgagccaccacgcctggccagaaaacattttctattcctcatctctagatccttccttcggcataactgaaggaaggagctagagatgaagaaaagaaaacattttccaagatcattaagaaaacttttctgaaataaagaaaatttaggtttacagaaaggtaagtctcagaaaagaaaattacagaaaatcaccaatgaaatatattctagtggagttactggatttcaaagataaagatttctaaatacaagaactcagggaatatagttctcataagccctttctgaaaaactgcaaagtgatgaactgaggtgtaccaagagatggagaaattcctccacaaagactggcgctgagcactagatccatgaatggagtggtgggagggtgaggaggagggaggacaaaaggaagcaagtgaagtgatggacctgatattagttgttaaaacagtcctgtcataccagttattggacctttagaaaattaaggaggggggaggagccaagatggctgaataggaacagctccggtctacagctcccagcgtgagcgacgcagaagacgggtgatttctgcatttccatctgaggtaccgggttcatctcactagggagtgccagacagtgggcgcaggccagtgtgtgtgctcaccgtgcgcgagccgaagcagggcgaggcattgcctcacctgggaagcgcaaggggtcaggga

SEQ ID NO: 25694 - DNA, 2300 bp, Homo sapien
cacctttctgtccccaaactccactggggacccaccttccagccaccccagggtgccaccgccagagccaggggtcagccccaccttcattcactcctactcatagcctacctgttcactctgcccccatctgctacttgcagcatcagaaggacatgagggcaccaaacagcccctgcagctgtcctcaaacatcatggccaaggctgcacctgggaagtggactttctgtggtgctagctccctcctcagtgcccttgacctttgtctgggtccctgcttaatgtggcctaactagttgggccagagctccacaggtgctgtcctgactcccagccccaggagggagggagaggctgagacggcaagggaagcagagactcagccacaccaagggccctggcaaggtgggcctctcctccatagcctcaccaggcttcacgttcaaggtcaccaagagtgcacttgttcactgtcgagggcagaggtgactcctgggactgtgctgggggtccagggagagcaggtagcggagttgccagggaagcagcttgcctgaggtctgtggtcttggcaggggcttccacagcggccccaccctctccctgtcccctccctcctgtccttgtcctcgtgtttactgaaaaccatgagaagggatgtggagagcgcctgcaggaactgagagcaggagcctggctcagccctgagaggcccccagatattcaattcctaaacccatagagggtggggcatgggcacagaggagtaaccaggggccacctcacacagccctgctctttcaccctgcccgcctggtggcctccttagcctgcagcctcagtgctgcccgctatggggtcatgctgcctcctgctggccacactgcaaaatgcagcccagggtcgggcctaaggctacacttgtccctcttccggcaagcctgcagctgggctggaggggaaagcaggcaccacagaattgcctggatgctcctgcccaggaggattgtccgactgcatggggagaaaagtccagaaccgtgcctggcacatagtagtttttatggagtgagagggcaaaagtacgcatgattgtgtgcatctgaagtatttccgtgctgatggcctgaccagtatcagattatttttcaagcaggaattttgattcctcttgggttcacaatatcttattatgaaatccgaataagaacagtctaatggcaccagacagtgatacaggtgagcctagaacagtcagtgttcatgtgggggactgcagcctgcttttcagggaggcttcaaaagaattgaggaacacagattgatggcagggatgaaaatcacagggcatattgaggagacccccagctggccatgtggggggcaggtggggcaacaggagaacagtgcctgcgtcctgagggctttcaatgcatcaggcagagggcctgccagtgcagaacctgttttctctgcgtccatgacagccctgagcaggtgccattgtgacccctgtcctgcatttgagacagaggatggggagggctctgtgatttgttcagaatcccacggcaagaaagttgtggagctgagagtcaaacctgggcttgggagacttgtagtgggttaagggcttgaacacagggtttttggcaggaagtggtgggcacaagcacagattagggctgggaggtggggtggcacatcacaggccgttactgccacccagagggcaacatggatgctcctccttttacctgctgggtgtcctgtgtggtagaagggcaggctgaagcttgatccttgtggtcacacatcccagctgtcacctgccttactgtgtgccatgagccagcccaaaaaagtccccactagtccccaggggaggcgctaggggtgctgggctggcttccctcctctccaggtggtgcctgccctcctggggcatttcccagcccttcttcctctgcatctcaggctccctggggaggcagatatgctctcaggacatcctggcagagcacagccacacgtctgccctggcaggcccaccctgggtggaggaggggctctatatgccagggctctctctctcggtggctggctttctttccacgagcatggccagatgacgaggctcacccgcagcactactcacacctccaggaagggaagttgatggcagggttctggctgcagccaggcctgcgggagcttcctccctgatctctctcactcaaggggaaagctcagggctgggcatgaaggctggggaaaggcagggaaggcagagtcccc

SEQ ID NO: 25695 - DNA, 2300 bp, Homo sapien
cccccgacttaacccagggcccagcaggggctggaagggaagtggagttagggagcggagcaggtcaccatcagctgcgccctggattccagggcccgtgtgcacagagtaacgggagccggctgtctgtctggccaagggcacaggagggtgagtgtgtacagcagccagggagcaagggagccagagagacatacaggcgtgaccttggacctctgcgaggaacccgttcactcgctcccaggcagtagcactggccctgacacccagccctgaaagctcggggactgcaggacaaacagcttcaggggctgtggccccagctgggacgggctatgcgctggtccctagagactctcggtatctccccctgccccagtcctgcctcctgcccagcacaagggcctttggaactcagccctctgtgtctcagcccccgggagggtcaggtgtcagagacgagaagggccgaggctggcaggccggaaactgcctcccttgactgctgtggggtggagtattggcgagcacagaggtgcccgggtgaagcgtggcttcagctgggcgggatcagtgccagaggggatgaggacggccccgaccaaaggtgggcctaggctggagaggaagctccaagagcctgaggcccgtattgcacagggcaggggatcgcatcctgggctttctctccctcctcccactctggccagatgggaggatggacgttgcctccttgaacaaagacccacaggctccttggcttctgcttgtgtctccagcagacagcgtctgcagcccctggtccaacaaaaccgcaggcggcctcctcctcttcctcctcctcattgtcctcctcgaccaccaccacctcctccttccaccacctcctccttctcctcctccgctgtcgcctcctcctcctcctcctcctcctcctcctcctcctcctcctccgctgtcgcctcctcctcctcctcctcctcctcctccgctgtcgcctcctcctcctcctctgcctccacctctgccatcgccacctcctcctcctcctcccccaccccccgccgctacctttctttcttcttccttcttcctgggcgagagtagcagccccggccccatgctggggaagggtaggccagagactcttccctcctggtggtgctcagcagtgactcagcagggactggacttcggaggctcagctcgtgccccctaccctgacagcatcctgggggttcctggctccctggtcctcagcagggtgggcttgtccaggccattctcagtgctgccaccttgagggcatctgggaggcccaggcaggccagatttgtctcctggaaaggacatgggtacccctgggctctgcccagcctcctggcctccccctggggccccttgtgcagcaagggccctggccccagtcctccctggcgtcactcagcaaccagcagcccattaggtctgtccacacatcgctgccgacggtgaggctgtgggtggtgccagccttccaggcctggctgggcagctctgggcttgtcaggctctgacccatcccgtcccgcagatggcactgtacttctgctcggggctgctgcaggacccagcgcagttccggcactacgcgctcaatgtgcccctgtacacacacttcacctcgcccatccgccgctttgccgacgtcctggtgcaccgcctcctggctgccgcgttaggtgaggggtgcagtcggggtcagggcagacctgggccagctcagggctgcccacccccacagtgggtgctcagtggcccaagaccattctgccgtgacagcggaggtccaagggtcgggcgacccaagtgcaggggagcctggcctggaaactctccctacgggccggtgctgcagaagctgcatggagcccacagccagccctggacacagccgggaggagggcgctgacctcgaagggccgctttctgctgccctgggagctgggtgcttggggtcctaatctgtcggcgggggtgcagcgccatgcagcccatcccccagccatagctcttcccagccccccaggctcccactctcatgcctcaccccctcttcccaggctatagggagcgactagacatggcgcccgataccctgcagaaacaggcggaccactgtaacgaccgccgcatggcgtccaagcgcgtgcaggagctcagtaccagtctcttctttgctgttctggtcaaggtgagccctccagcctggtgcccctcacctccctctggctcccgaccctcctgggcacctgctcacc

SEQ ID NO: 25696 - DNA, 2300 bp, Homo sapien
tcgtcttggtccttctgtttcctgggaaggaagggctggtcctgtagggccccatctagatcccttagcaccctctaccacctgatgcccttggggataccaagctctgtgcagtccagaccatgttccagctcagtgcccaccttacaggcatgcgccaccatgcctggctaattttgtattttttagtagagatggggattatccatgttggtaaggctggtcttgaactcccgacctcaggtgatccacctgtcttggcctcccaaagtggccgggcagggctgaattcgccccctcaccagctactgccaaccacggatgaatggcttctgcctgcctcctgccctccagatcttaccagggcatttcactgggaaatatggcaacagcccttgccactcaggggacagcatggcaggggctgggaacgaatgttgttgccaaacgacaagacccagctgggcccagtggctcacacttgtgatcccagtggtctgagaggctgaggcaggaggatcacttgaagccaggagtttgagagcagcctgggcaacacagtgagactctacaaaacaaaacaaaaaaaattagccaggcatggtggctggtgccaataagcccagctactggggaggctgaggctaaggctgaggcagtgagccatgatcatgccaccgcagtccagcctggtgacaaatgagaccctgcctcaaaaaaaaaaaaaaaaaaaaaagaggaaggtgagcgcagtggctcatgtctgtaaatccagacactttgggaggctgaggtggaggttcgagaccagcctgggcaacatagcaaaaccatgtctttacacaaaataaaaaatgagtcaggtgtggtggcacatgccattggtgccagctacgtgagaggctgaggtgggaagattgcttgagcctgggaggtccgaagctgcagggagccgtaactcaggcatcacactccaacctggctgacagaatgggaccctgtctccaaaaccaaaagattccagctcgaaaaataattgtggggtggcggcaaaagctcctgactggccttgactttagagtgaatcaatgaattaattaagggcctgcctgttagtgagtctcctctgaaatttagcccagaaatttcctaactcagcaagatgaagcaggaggtagaaggaactaagggggcaataagcaggaggaaggaatgtccccatgagggtgacatcttccctgagagccccaggacgaccagcaggaagccaggcggggggcaggcaggaggactccagaaagctcggcctgaggggaggcccgtgggggtggtggggagtggtgcggggaaggcagaggctgagcagcaggtgaggtcccctgggttttgggggccaagcctggggctcggggcgagcaagcatgagtggagaaggggctgctgtggttgggctggggtggactccccacctgcgtcgtccaaacattagtgtgagtgcacccacacaaacacatacacaatcacacacaacatgtgagcaatgggcaggactggtccggccccactcagtgctgtcaccattggccccacagctgcccacagccctagagctctgggcccagattcctgccagccccacctgtccaggccaaggtaagatgatggagcaagggggtgccagggcagcaaagccccccacgtgcccctttcccacagggcccaggctcctggcatcaggaggctgaacccaggccctggcccagactgtgtgcttccagcctcccctcctctcgacaccagaacacagcctggccccagcttctgggaaatatagaaaaaaatgggtgaatgatccagtgacagggtgtcttgttccacacaagacacagtgagcaggggttgggggaggggctcctggctgcgggaggcacaccacactcacccaaatggcatctgtactcaataccgcacccttccctgggggacacctggtcccaacctgagctgcctttctcaggaccccagccccagcccggcccagcccagccacaccctgccactcccttcagccagtgtggcttcaggtcaagaggctgggcagggtcaaggtggcaacgaggggagaagccgggacacagttctccctgatttaaacccgggcagcctggagtgcagctcatactccatgcccagaattcctgcctcgccactgtcctgctgccctccagacatgctggggccctgcatgctgctgctgctgctgctgctgggcctgaggctacagctctccctgggcatca

SEQ ID NO: 25697 - DNA, 2300 bp, Homo sapien
tccaatctccacacagcagccaaagccaacactttaaacatgattaactctgtctgtcttcaacttgaatctccctcactaccctccttttctatcagaagcaacagagagacaagtaaattgcccaaggccacacagcaggacatggcagagacaggattcagaatctactagttttgacagtccacatgtctcacccacccactatcccattttgggtgatcccagaaaagggtcagccactgccctaacacagggtaatctcagacaaggacagaggatttctcctccaatcaccacttcccttcctttatcagcctaactcccagttatccctaattctcagctcaaaccacacttcctctattttttttttttttttttttgagacagagtcttgctctgtcggccaagctggagtgcagtggcgcgatcttggctcactgcaagctccacctccgggttcacaccattctcctgcctcagcctcccgagtagctgggaccacaggtgcctgccaccacgcccggctaattttttgtatttttagtagagacagggtttcaccgtgttagccaggatggtctcgatctcctgaccttgtgatccacccgcctcggcctcccaaagtgctgggattacaggcgtgaaccactgtgcccggccttcaaaccacattttctaggaaaggccttcctaggccccttgtcctattccagcaactccccacaatttgatggccagcactttgtacatctctaaaaacattcctcttccactagattgtgccctccacaagggcagaggtctgttttgcccacgattgtggcacatgtcacacacccttgagcactctggttcctctccaaatccatttctcctgaatgtgggcccagattggtggctcaagtctggaaccctagcagtgttgaaggatcgcctgagcccaggagtgcaagaccagcacgggtaacagaaagagatcctgactctacacaaatttttgaaaattagcttcacataatggaagatacacgggaggctgatgtgggaggatcgcttgagcctaggaggtgtggcgtgaatgcaccactgcactccaacttgggtgacagagccagcccctgtctcaaaaaaataaataaataataataataaaacagaaagaaaaaaatgatggcaaggtatctgaactgcagaaatactttttaactcagcctgaggctatcaaaacatctgatccccatgtgaaaggctacagttctgggcatgctcagggcccaccgaaaacagagtccgcccaggcaccctctgcctgtgcaagggaacaggtgtcacaatcaagtgcacaagctgctctggaagacccagcccaggcctgtctggccgagggcactggactctcccccactgcgtcgtccaaacattagtgcgagtgcacccacacaaacacatacacaatcaaacacaacatgtaagcaatgggcaggactggcccggccccactcagtgttgtcaccattggccccacagatgcccacagccctggagctctgggcctagattcctgccagccccacctgtccaggccaaggccagatgttggagcaagggggtgccagagcggcaaagccccccatgtgcccctttcccaccgggcccaggctcctggcatcagaaagctgaacccagtatctggcccgggctgtgtgcttccagcctcccctcctctcgacaccagaacagagcctggcccccagctcccaggaaatacagaaaaaaaaaatggtggatgaacgagtgacagggtgtctagttccacacaagacacagtgagcaggggttgggggaggggcccctggcggcaggatgcacactgcactatacccaaaatcccacccttccctgggggacacctggtcccaccctaagctgcctttctcaggaccccagccccagcccagcccagccacaccctgccactcccttcagccagtgtggcttcaggtcaagaggctgggcggggtcaaggtggtaacaaggggaggggccaggacacagttttccctgatttaaacccaggcagcctggagtgcagctcatactccatacctgggatttccgcctcgccgctctccgactgcttccagacatgcaggggccctgggtgctgctcctgctgggcctgaggctacagctctccctgggcatcatcccaggtaatgaggctcccccagctgcccctacacacacacacacacacagggcaccccccagcccaggctgacctgatctttgct

SEQ ID NO: 25698 - DNA, 2300 bp, Homo sapien
tttttccatgttgcccaggctggtctcaaactcctgcgctcaagtgaatctcccgcctcagcctcctaaagtgctaggattgcaggggtgagccactacgtagggcctcttgtattatttcccttttttttttttttgagacagagtctcactctgccacccaggctggagtgcagtggcatgatctcagctcactgcaacctccacctcccaggttcaagtgattcttctgcctcagcctcccaagtagctgggactacaggtgcatgccaccacacccagctaattttttgtatttttagtagagatggggtttcactgtgttagccaggatggccttgatctcctgacctcatgatccacccacctcggcctcccaaagtgctgggattacaggcatgagccaccgcacccagcttgtattatttcttacaactacttgtgaatctatagttctgtcaaaaattccaacttaaacatgaaactcagggtggctataaagcctcctgactcaccttgactttggaatcaatcaatcaattaattgaggagacccattagtgagtctcctctgactttcagccaagaatgttcctaactcagcaagatgaagcaggaggtagaggaaactaagggggcaacaagcagggggcaagaaggacctatgagagcgacatcttccctgagagccccaggacgaccaccgggaagccaggagggcgcaggcaggaggacccgggaaagctcggcctgagggaggccctaggcgtggtggggagtggggcagggcaggcagaggctgggcagcaggtgaggtcccctgggttctgagggccaagcctggggtttgaggtaaacaggctcgagtggagaaggggctgctgtggttgggctggggtgggtggagctggaggagccttttcttcttgaaccagtttttgaattgtgctacaaaacacggtacatcaagtttacctccttcaccattttcaagtgtacagggcggcagtgttgagtacacgcacagtgttgtgcagctgatctccagaacattctcatcctgcaaccttgaagctctgtccctattaaactccaactctaaccctaaccccaaccctaacccattgcctcctccctcagcctcaggcaacctccattccacttctgtctctatgtatttgactcccctcgggacctcagagaagtgtgttcgtgcgtatttgttcttttgcactggtatatttcactgagcataatgtcctaaggttcatccatgttgtagcaggtgtcagggtcgcctttgttttcaaggctgcgtgatactccattgtatgtgtgcaccctgtttggtttctccatttctcttttgctggacacttgggtagcttccagctcttggctgctgtggataatgctgctgggaacatgggtgtgcagttatctgttcgagtccctagttcgcattcctttggctacacactcagagtgggatgtctggactgaagcaatacttttgaactcagcctgaggttaccaaactctctgaactccttatcagaggctacacttctgggtgttccccggggcccatggaaaacagactcaccccaggctccatctacctgtgcaagggaacaggggtcaacctcaagtgcacaggctgctctggaagacccagcccaggtctggctgacccagagcactggccccttcccagcctgcgtcctcaggacataggtgtgggcacccatatacaccaagtgggttctagggcagccaggccacccagtgtgcctcctttcacactcctctggggctcgtgacattacgagccctaacccgggccctggcctaggctgtgtgtttccagtctcacctctcttcacaccttgaatgaggtgaatgaaggagtggcaacgcgtctcccacaagacactgtgagccacacccagtcccttcccttcagcaagcttggcttcaggtcacaggactgggcggggtcaagatggacaccaggggtgtggggagggacgtggagcatttacagccaggggcaaagtcctcccctgatttaaacccaggcagcctgcgctgcagccggttcctggtgtccccacttcgcctccctcctgctgcccccaagacatgcaggggccctgggtgctgctgctgctgggcctgaggctacagctctccctgggcgtcatcccaggtaatgaggctccccaagctgttccacacacagggcaccccctcagccaggctgacctgatctctactctccccctggccagctgagg

SEQ ID NO: 25699 - DNA, 2300 bp, Homo sapien
aagctacaggccagaccactggtgcctactcccctacagtgccagcttcccttacagagaaggtgccggagagtcaaggaggtgggcctctgacttctctttattggcagtctgtgtggggtggccaggactgaggggtcagagggcccaattccaagtcaactcctgtaggccctggttgctgctctcagcccggggctgggggatgcgatgtgaaaagaaaaggtgaggtggagccaggcaggtcgcccggcagggagtcgggaggcccatgagcagaccaatagcagctgagtctgggagagggtggctggaaggggggtcccagagctgacccgggagggaggaggaagggatgagggagggcaaaaggagggaggagagactgagggcctgggggctgccccccaccccacccccgggactggagcagaagagtccctagggaagcgtgtttgcctctgtgcctttctgtcggaagaggctctctgagacaatatccatttttacatttcttggaaatttcatggcattcatttcggggaaaataaaagctgtccttgctggagaaatgataccaatcagggcctgaaaaggctggaaaattatcctcctggagacgggaacattgagggaaaaatgcagattaaaagcacaaagagccactttgccacctccctgccctcccctccccccttcatggaatcgccacattataagtaattccatttttcctctttagaattaataggacccaagaaggatgcatggggcagaggacaaccctggggtggccagagatggaggcagggtatccggagtgggggcttagagatggagagatgaagaggcagggagaggcaagacaggggcagaggccggcactcagggccagggctcaggagctgggcagatgcacagaccctgaggaggagaacaggatgatgggtaggttatcagagtccctaccttgttgtgatttttattagatggtgctccatggctctcacacattgtttaagccaatcctacgggctggagccggcagacctgggagggctggtgctttgtggggtctcctgctagagacaccagaggcagggtagggcagagaaagcagagactccagaaacagtatcagtcttccaaggagccccaagttctctgtgtcccattagggccaggctgtctggccaaggcaggcaggcaggtagaagagggctttgcctccaggcagtggggaggccccacatttaaaaagccagtttacctggaagaaggcaggcggtgagtaaattcagagtccctgcacccagcctgccctcccatcagtccacataccagggtcttgaggctcagggcctgtctgaggcctagggctgctggccagagggggcaggctccagccttccctggctccagcagggagacttcgctcattcttctcttggccttttcttcctacctgggccagggactccctgagccgtggtgccagggccacccaaggctggggaggatggggaagggggcggcaagccctcttcttgcaggagtccccgctgagctcccttcaccaggggctaggtgaagggagcgaggccaaccagaagccctagtggagagcccatccagggcaggggttccaaggaggacaaaaaagccggttagtgaaggtgcgctctgcgccagggactgtgccggcagacacaggcactactgacaccgcccccagcccttcggaggagtcctcggctcctcatctccagctccagcccctttccagccggctggtgggcggctgggagtggggacactggatcggaggggacccttcacgggagtactcgctgccctcactcgtctcggaacgcggctggacccggagtccccgaccgcagcccgcgcacgacccccgggagcctgtctccgcggccgccgacccacgtccgcgctgccgccccactgccaggtggcccgagagatgcaggaggaaggaggggcgcgcggggcgggcggaggagggtggagccgccggcgcgccccctccctcgggccggcaggcgggcggcgcggcgggctcggcgcggcggcagaggaggcggcgggcgctgggagacaccggacgcccgctcggctgcgctgcggctcaggcccccgctcgggcccgacccgctcggtcaccgccggctcgggcgcgcacctgccgggtaagtggcgcccgagtccctgccgctgaggccaccaccgcggccacttccgtcgccgccgccgccactgcgcggagcctcccggctttg

SEQ ID NO: 25700 - DNA, 2300 bp, Homo sapien
cgcctgtgcgcgcctggcgcaccagcagtgcctgcagcgccggcggcgatgcggtcagttctgttcacccggacccggacggggggcagaggggagggggcctggccagcctctgaccgccgctccgactcctgtccggtccgcagagctgcgctcgctggcgcacacgctgctgggcctgctgcggaacgcgcaggagctgctcgggcctcgtccgggactgcggcgcctggcccccgccctggctctccccgctccagcgctcagggagtctcctctgcaccccgcccgggagctgcggcttcactcaggtaccccgcgccctccagcccagcccagccctggcccggccccacccgcgcggcacagccactttctccgccgaggcggtaccctaaccctgtgcctccccaggatcgcgggctgcaggcactcggttcccgaagcggaggccggagccgcgcggagaagccaacggtaatgacgccccctgccgaccttcaggaggggataggctgagggcctggacgaggtcggaagcgcttctactgcagctccggaaagggcttaccccatggggcaacagggtggactcgttctcccctccccgccatagagcgtatgactcttttggagtacttgtggttttagctctcatcagtgtcaaacagagatgctttgcctggtgttactgcttaacttctccgagcctcagtttccccacctatagcataagaggataagtgtgtcccctgggaggccatcctgaggtgctggtgggagtgccacccccagttccataccgcaaccgttcattattcccggggcctctcctcttcctccaggctgccctgggctggagcccctgcgacagaagttggctgccctgcagggggcccatgcctggatcctgcaggtcccctcggagcacctggccatgaactttcatgaggtaggtccccaggcttccagactccttcacgatggcctgggaaggctgagacccagcccagggaagatgcagagggcccagcccagataccctcccagcagcctggggtcgcctctgccccagctctgggggtaggtagagggtccgaggggaagggagtggggcctgcggagtgtgagccaggccactgggggtggtggtggggagagtgagtagaggggtgggtgggagtgtccacatgagcgggaaatgagcagggtttccaggtctaggtgagagtttctggggcccagggggagagggggtgacctctggggtttcaactcaggagtgagtttctgggcccctgatccccactcctccatctgtaggtcctggcagatctgggctccaagacactgaccgggcttttcagagcctgggtgcgggcaggcttggggggccggcatgtggccttcagcggcctggtgggcctggagccggccacactggctcgcagcctcccccggctgctggtgcaggccctgcaggccttccgcgtggctgccctggcagaaggggagcccgagggaccctggatggatgtagggcaggggcccgggctggagaggaaggggcaccacccactcaaccctcaggtaccccccgccaggcaaccctgagccatgtctgggcccccagcccctggggaggacctactgctcccaggggctgagaggggttcgggagcataatgacaaactgtcgctgccccagtggctgggtgtgtgtgggtgggatggggtgggggtcctgggccccccgtgtcttcccaggtttacaatcagagaatcacagctgctttaataaatgttatttataatacacggaaacaactctggagctttcttgggatgggacctggtgggtggacattcagtctcaggggtggggcccaggcagggctgcctctggaagcagttggcaagggtaacagatgctggaaaggggctgtaaggcccctatctgagcctatctcctgcctcctgagaagcagcagcagctggcctgcctgttgccccgcccccgtgcatggctgcccagcgctggccccagtgcccagcgtctccgcccagcacccccccggccctccctccccaccccccgcctccgagctgcggggagtcccagcctgggatctttgcctcatgtccttgggctcctgccctggctggcccgtcccccaccgccatgaggtgtcagattgtgtttccggctgcctcttcccgttgaccccctcctcccccaacacctgtcccctctcccgcccaccctcattccacagccctgtagacaggaggggcagatg

SEQ ID NO: 25701 - DNA, 2300 bp, Homo sapien
agtaataatagggaggcggaggtgatcatgttggctcggctgtctaacaaagctatcagggacccaggcattttgccatctgcccagccctgcctccatggcaagttggcttctgtcctcagacctgttggccccagtttgtgagctgacagccacagctgcacacttagcacctatgttcaggcagaaaagggccagccatttctgacccctttcatcaagaagcaaaacttttccataggccgggcacagtggctcacgcctgtaatcacagcactttgggaggctgaggcggctggatcacctaaggtcaagagttcaagaccagcctgacgaacatggtgaaaccccctctctactaaaaatacaaaaattagatgggcttggtggcgcccgcctgtaatcccagctactcaggcggctgaggcaagagaatcgcttgaacccaggaggcagaggttgcagtgagccgagatcaagtcattgtactccagccttggcgacaagagtgaaactccaactcaaagaaaaaaaaaaaaacaacttttccataaagctccagtagacatcccgcaggtcaaaacatcacatggctagcctatctgaagggagactaggaaatgagtatcttgctctaccagccattataacagagggtggcaaaggagaagtagtgttagacaattctacagatgattttctctgaatgggtcctgtccctgcacacgtaacccctgcaagaaacttccattcctcattgatgatttacccttcggagaacaccaagaaggcttctaggccatctctcccagagcagagaaagggagaaaacaggagggtggagggtaggggatgcagggacaggtggtccactgtttggcagtgcttcctgatcatggaggccattgaatttggtaaaatgtgggcatggaggagagtaaagaggtggagagaaactggtctgcaaaagaggataagaaaactgcatctagggggaccagagggcaaaatggaaaggcaaggctctcagaagtgagaaggaaacgagggctttgtaaattccaggaaaagtgggccacacagagagaagctcagtgggggggatgcccagggagggggaagctcaggaagggggaagctcagggaggaggaagctcagagaggaggaagctcagggaaagggaagcccagtgagggggaagcttagggagggagaagctcagggagggggaagctctgggaggaggaagctcagggaaagggaagcccagtgagggggaaggtcagcgagggggaagttcagggagagggatgctgagtgagggggatgccgagtgagggggaggccgagtgagggggatgcccagtgagggggatgcccagtggcaggccaagatgggtggatcacttgagttcaggagttccaagactggcctggccaacatggtgaaaccccgtctctactaaaaatacaaaaaagaaaaaagaagaagaagaagaaaaattagccaggcgtgttggcgcatgccagtagtcccagctactcagaaggctgaagtagaagaatcaaggtggaggttgtagtgagccaagatcgcaccactgcactccagcaaaaaacaaacaaacaaacaaacacaaaaaccctcacatgcctacccaacagccttcacacccacccaaatcctgactccctggagggagtaggaggcagtccacctcagccctctctggagccgctgtcaggttcctcggcgacctgccttccctaccacacccagctggccctggctgtccttgccccccatgtggaacatggaggtgaggctgggacaactgagcccgagttggggctggaaggtggatgtctcttttggggcagacggggcccctgtctcccctctccagcccaggtaacctgagcccagcattgtgtccatcctggaacagctgacaacgctgtggtcagacagctggtggggctgggccaggctggccgggctggctgggctggctggggtgggagtgtaggctgttatatgacacccagagcccatctctctctgccccagaccttggagctgttgtcccacccctgtcactgcagagagctgaggcaccatgcatgggggccaggggccgctgctcctcctgctgctgctggctgtctgcctgggtgggacacaaaggaatctcagcctggggagtcccagagctggggtccacagcctcaggggatggagggtctgaggggtattggggcctgccctggacccagttccctgagtccccacttcaca

SEQ ID NO: 25702 - DNA, 2300 bp, Homo sapien
cagttacatcttcaggctctacttctaattctagttcttttgctatttccaccacatctgcacttacttcctccactgaagtcttgaacccctcatagtcatcaatgagggtgggaatcaacttcttccaaactcctgttaatgttgacaatttgacctcctcccatgaatcacgaatgtttttaatggcatctaaaatggtgaatcctttccagaaggttttcaatttgctttgcccagatccatcagagacatcactatccatggcagctagagccttatgaaatgtatttctcaaataataagacttgaaggtcgaaattaccccttgatccatgggctgcagaatggatgttgtgttagcaggcatgaaaataacattaatctcctcgtatatctccatcagagctcttggatgactaggggcattgtcaatgagcagtaatattttgaaaggaatcttcttttctgagcagtaggtctcaacagtgggtttaaaatattcagtaaaccacgctgtaaacagatgtgctgtcatccgggctttgctgttccatttatatagcacgggtagagtagatttagtataattcttaagggccctaggattttcagaatggtaaataagcattggcttcaacttaaagtcaccagctgcattagcccctaacaagagagtcagcctgtcctttgaagctttgaagccaggcactgacttctcctctctagctatgaaagttctagatggcatcttcttccaatagaaggctgtttcatctacattgaaaatctgttgtttagtgtagccaccttcgtcaatgatcttagctaaagcttctggataacttgctgcagcttctacatcagcacttgctgcttcaccttgtgcttttatgttatggaaatggcttctttccttaaacctcatgaaccaacctctgctagcttcaaacttttcttctgcagcttccacacctctctcagctttcatagagttgaagagagttagggctttgttctggattaggctttggcttaagggaatgttgcggctggtctgatcttctatccagaccactaaaaccttctccatatcagcaataaggctgtttcgctttcttatcattcgtgtgttcattggagtagcacttttaacttccttcaagaacttttcctttgcatttacaacttggctaactgtttgccgcaggaggcctagccttcggcctatctcggcttttgacataccttcctcactcagtttaatcatttctagtttttgatttaaagtgagagatgtgcgactcttcctttcacttgagcacttagaggccattgcagagtcattaattcgcctaatctcaatattgttgtgtctcagggaatagggaggcccaagaagagggagagagatggggaacggtctgtgggtggagcggtcagaacacacacaacattaagttccacgtcttataaaagacgctgtatgtggcaccccaaaacaatgacaatagcaacatcaaagatcactgatcatagatcaccataacagacacagaaatcatgaaaaagttttaaatattttgagaattaccaaaatgtaacacagagacaccaagtgagcacatgctgttggaaaaatggcgctgatacaattgctggactcagggctgccacaaaccctccatttgttttcagaatgccctatctgcgaagcgtaataaaacgaggtatgccatagtacagtggcgccgcgaccgacaaaggaaagcctccgggaggtcaaaagagataccagagagtgcgtcccgcactggaggaagaggaaggtttttaccaagcagcgagtccagagcccgcgccgtcaacgacgcggtgctgccttttttccgagccgctgcgggagggggccaggacacgctcccttaggagagcgggcgggtcacaaggacctggacagaggcagaactgaggccagcagccagctccgccgctgagtccagccctctgcgcagccgccctgagctggcgtcccgagatagccgcttccaaaccgggcctgcgcgccgacgttccgctgcgccccgcgcaaaaccggaagtacccgggcccaaggctgagggacccggtggagcggaagtcactccctgaggcagtggcgacagcggcggcgagaggatgaacaacaagttcgacgcgtgagtggctcgtggccgcccccggggccccttccccgaacagttcccccgcgcccgcccccgctggggctggggcggcgcaaaccctgcggcaccggcttc

SEQ ID NO: 25703 - DNA, 2300 bp, Homo sapien
aaaaaagagggcaagtttaatttttctcaagaggtgcttgaaccaaggttacacaacaaacctgggatagcccttcctttgtgtcgggaattagttaacctcagagtctcactttcctcatctgtaaaaggagacaacaagatccccttcacagaattgttagagtagaaataacatatgaggctgggggtggtggctcatgcctgtaatcccagcactttaggaggcaaggtgggtggatctcttgagcccgagttcgagatcggcctgggcaacatggcgaaaccccgtctctacaaaaaatacaaaaaaattagcaaggtagggtggcacatgcctgtagtccggctactctggaggctgagatgggaggattgctggtgcccgggaggttgagtgggcagtgagctgtgatgacaccactgcactccagccagggtgacacagcgagaccctgtctcaaaaaatatatatatatatgaaaaatacctagcaagatccctgtggaagtccattattaccattcttactgcagactcccaaatgatttgggtaggcttgagctagatgacccataagatgtcttcttaggatgacatttgatttgttcaaatcagtggaggaaggggtataagggttccagaaagctccactgaggcaggatttggatctggagctagttgttgcagggtttacaatagagatgaaatggggcggcagcgggggagaggttcgtagagggacaggctcagttaaacagcaggatagagaagaggtcgggcaaagactttctcaagtagcagagacctctcagcaaccagaaaacattcctgaggacctacctgcctggagtgttggaaatccagtattccctgaatttgcacagtactctctgtattggaaacaccccaatttcccatcaaaagcaccaggtcacaacctaaactaatagtaattccactttacgtttatatcgcaatagttagcaatgttcacaagcatctttaagcatcgctgagtgtgatctgacccttatcacaccccggcgtggcagcagggtcctagccactaatgtggtttgagcaacaatggcttagaggctgggtaacttttctacagtcaaacagatggtaagtggtgaatctgggactagaaatccaggttttcggatgaagagacagtcgatttactagactactagaagagaggaaggaacatattctacctcaagatacaatccttggagggggataagtaaagatacttctgcattttctctctgtacctccaaactgtttgatgctgaaactagaaaccggagcgggcaggagagggcaacaagtatacttaggtcttggcgagtgtgttggaagacgggaacgggaaggggaggagaaagaaagtaggaagagtctcaggaagataattcctaagccagccttccaccgcgtcgagggcagcaaccacattacctcattgcatcctccaaactctacgacaaagggtgttaccgtccccactctgcagatgagaaaactgaggctcagaggggagagggagtgtgtggggaaagctggattcagaggcagcgctgccagactgcggaaacacccaaaccgccgaggtccccacccctccacgtcgcaggcaatccgcatccaccagggcggggcgtccgaaaatctccccctaccgggcggcacagccacccctcccccgggcccagctcttcgccctcggttcggacggccctggggtctccgggactccggtatccattgctccccagccccctcctccccgccagtccaggccaggtccggccgcagccggatcccagcagggaagccggtgccgcagggtttgcgccgccccagccccagcgggggcgggcgcgggggaactgttcggggaaggggccccgggggcggccacgagccactcacgcgtcgaacttgttgttcatcctctcgccgccgctgtcgccactgcctcagggagtgacttccgctccaccgggtccctcagccttgggcccgggtacttccggttttgcgcggggcgcagcggaacgtcggcgcgcaggcccggtttggaagcggctatctcgggacgccagctcagggcggctgcgcagagggctggactcagcggcggagctggctgctggcctcagttctgcctctgtccaggtccttgtgacccgcccgctctcctaagggagcgtgtcctggccccctcccgcagcggctcggaaaaaaggcagcaccgcgtcgttgacggcgcgggctctggactcg

SEQ ID NO: 25704 - DNA, 2300 bp, Homo sapien
gaggcaggtgaatcgcttgaacctgggaggcagaggttgcagtgagccgagatcgcaccactgcacttcagcctgggcaacaagagcaaaactccgtcttaaaaaaaaaattgtattacctactcatgcaaagtttctctctctctctctctctttctttctctctctctctctctgtctctctctctctctcagacaggtcttactctaccacccaggctagagtgcagtggcatgatcatggctcactgcagcctccacctcccgggcccaagtgatcccaaatagctgggactacaggtgcatactaccacacctggctagttgttttttattttatttttattttttattttatctttttttgtacacaaggttttgccatgttgcccaagctggtctcaaactcctgggctcaagtgatgcgtctgcctctgcctcccaaagtgctgggattacaggtgtgagccaccgcgcccagccccagagtttcttgttgatggagactattaagaattttgaactttttctttcttgaggagagctcgatggaataagaacattaaaaaaaaaaaaaaacaaaaacaaaaccagctgggtgtggtggctcatgcctgtaatcccagcacttcgggaggccgaggtgggaggatcgtctgaggctaggagttcacaaccagcctagccaacatggagaaaccctgtctctactaaaaatacaaaaaattagccaggtgcagtggtgggcgcctgtaatcccagctactcaggaggctgaggcaggggaatcacttgaacccaggaggcagggactgcagtgagccgagatcatgccattgcactccagcctgggaaacaagaatgaaactccatctcaaaaaaaaaaaaagtttttaaaatataaaattaaaaaaagtttaattacacaaaatttttgaccttatttctctgaaatgtgtcacataaagtggtcaaaacagatgtgacaacaaagccaaccttctagtcaccaccaccaggtcaggaagtgtagcgccccgtgatctatttgcagggttgccattgtatatgtaaaacccgtattctctgtaccaagtcaagttgttcagtaggaatgttaaagatttttatacttttctttaaaaaacgtattttcctttataactttttaaaaataacattttaacccaggtcccccgcatgccctgcactcgcatgccaaaggctggtccctgggtctcagacaaccatagtccagcggggtcactgacctgccccagtcatcagcccatggtgggtcagagcagcgtcgttctcaagtggggacagacccgtgtttacaagattctcaacgcctggctgatgtaacagcggcatcagccttccttggggagaatgacgactgtatttgtttttaccctcttgttaaaaatgctgatttaattttcaagcttcttttccttctttcctttcttttttcctccccctctccctccttcttcttcgtttatttttagagccagggtctcactctgtcgcccaggctggagtgcagtggcctgaccatggctcgttgcagcctcgacctcccgggctcaagccatcctcctacttcagcctcctgagtagctgggactacagacgagcgccactatgcctggctgattttttaaaagtttttgtagagacagtctaactatgttgcccagtctggtctcgaactcctgggctcaaaagatcctgccaccaacacctaagtgttgggattgcggatgtgagtctccgcgccaggtttcttctcttttcttgtgcgtttcacgcaaaaaaacccgagtccctgaagctacgctgctttcctgcctctagggaaaacgggagttttttctgctcgtttgctctctctcttttttgtttgcttatttgtttttagtatttttagcatgttttggaaacatttcgttccaatgagtgtttgaaaagcagctcccccgccccacgctccgggcgggcgcctcccactccctgaccccggggagggtgggcaccactcccagacgcgggggacgcgtgggtgtcgctcgggggcgctcgcctcccccacccagcctgtcccgggccgcgagcgcttccagtcgggttacttctgggggacaagaaaggcaccgtctgaacggtcgagacgctttttcccgctacggttttccccggagctgacaggggcagcaaggtcggagttgatccgagggtccctgcctggtcccggggggacggtcagcctcccgcccggagccgcggggaga

SEQ ID NO: 25705 - DNA, 2300 bp, Homo sapien
tgcttagtttctctttttgttaagccaccttcctctctgcgttgtccccgttctcagatggctcatccttggtggtggtggtatggccacaacagcttaaattaataacataagaatgttaaaaacactaaagaaaatgtaacacaccaatttgttttctattggattaccttccagattttactcatggcagcagcagtcttgtgaggctgtgaagagtgagcacttggaggcaggcttcctgggttcaaaccccagccccaccacttgctccctggaaggttccttgggcagcttatttaaaagctctgtgccatcagttttcccttctgtcaaatgggaaagcacaggacctgccatgtggggttattgtggggattaaattaattcatgtatgtgatgcatttagctccatgtttcagcctatggtgaaggccaggtggattttagcccctaatttttagattatcacatatccataatttgggtaaatgtgcacatttggctgggtgtggtggctcacacctgtaatcgcagcactttgggaggctgaggcaggcggatcatgaggtcaggagttcgaggccagcctgatcaacgtggtgaaaccccgtctctactaaaaatacaaaaattagccaggcatggtgccacacgcctgtaatccagctactcaggaggctgaggcaggagaatcgcttgaacctgggaggtggaggttgcagtgagccgagatcacgccattgcactctagcctgggcaacagagtgcgactccgtctcaaaaaaataaaaaaagtacacattttgtgttgtccttttttgtttaataattcactttgctgagtccactttatcttttgaacctgatttagcccacagtttgagctgtggagtggtgacctggcctcttggtgagttccgggtccccgtgggactgtgtgctttgcccttccgggttctgcggaaggaactcgttagctcctctgctgctgggtgaggtcgtttgtttcttagagctgcctgaatgaaatgccacaaagtgggtagcataaaacaacagaagtatatcctctcatagttctggaaatcagaagtctgacaagtctgaaaccaacgtgtcagccgggctgtgctgcccttgaggcgccagcgaagactccttctgtgcctgtttcctggcttctggtggttgccagaattcttggtatttcttgtggtatgggcgcatcaccgtaatctctgccaccctgagcacctggtgctctccctgtgtgtgtttctgtgtcttcacatggccttccttttttttttttttttttgagatggagtctcactccattgcccaggctggagtgcagtggtgcgatcttggctcgctgcaagctccacctcttgggttcatgccattctcttgcctcagcctcccgagtagctaggactacaggcgcgcaccaccatgcccaggtaatttttgtatttttagtagagatggggtttcaccatgttggccaggctggtcttgaacccctgacctcaaatgatccacccgcctcagcctcccaaaacgctgggattacaggcgtgagccaccgcgcctggcttaagaatttcacttttaagcagtttctagattcatgttctgatgtcgccttagttcgttgggccccttgcagtatataacctgattagaccagtacaaagtacaccctgtctttttgtttggggctagaaagattcatacagatactgggagacatgctttgatcgtttaaatttgattttcctatttaaaagtatttggcttagggatttcttacattttcaaggcttaaaaaaactggatccttcccagcctctgagtttgttgggtgcttggagtggtgtcctttgtgagtccttaggacctaacaaatgaggctggctcctaaatggtgtgttgtagaagaaagagtgttttctaatgagtgtgggaagccagaggcaccatcagcccggccagagaaagttccctctccatttccaagcctgttactggatagcctgagccaagagaatagtggcctgattttaaaagaatgagaaggcccagaagaaactgactctacagcgtgtatccgtggctgtaacgtgagctggtggagcagtcaaggttagacaggaaattttaattaccctggacttatctggaggcctctttcaaagggaggcaatgagggcagccacttaaaggcaggaccccaatgcaacatcttaaaatgcagccgcaaggtttttgcagcatactaaaagcttgtgttt

SEQ ID NO: 25706 - DNA, 2300 bp, Homo sapien
taagggtataaaagtcaagggaagaaagtgtttcagaaggccgggagcggtggctcatgtctgtaatcccagcactttgggaggccgaggtgggcggatcacctgaggtcgggagttcaagaccagcctgatcaatatggagaaaccccgtctctactaaaaatacaaaattagccgggcgtggtggcatatgcctgtaatctcagttacttgggagggtgaggcaggagaatcgcttgaacctgggaggcggaggttgcggtgagcggagatcacgccattgcactccagcctgggcaacaagagcgaaactgtctcaaaaataaataaataaataaataaagtgtttcagaaagtaggaagaggccaatcatattgaagacagggaaacacgaagtcaagatgaggactgaaagactccagttatcaacctgtaggatggggtgttcttagggcaagcaataggcagataggaaaggacagaagccacatcggtgtggttgatgattgcatgccaggtgtggaaatggagaaagtgcatataaacaattctttggtgcagcttggctttgaaagggaacagggtcgcaggagggagaattggtgtttttgattgtttgtttgtttatttgtttttttcgagacggattttcactcttgttgcccaggctggcgtgcagtggcgcgatcttggctcaccgcaatctcagcatcccgggttcaagcgattctcctgcctcagctacccaagtagctgggattacaggcatgcgccaccacgctcggctaattttgtatttttagtagagacggggtttctccatgttggtcaggctggtctcaaactcccaacctcaggtgatccgccgcctcggcctcccaaagtgctgggattacaggcgtgagccactgcccggccgagaattggaggtttttgtttttgttttagacggagtcttgctctgtcgccaggctggagtgcagtggcgcgatatcggctcactgcaacgtctgcctccccagttcaagcgattctcctgcctcagcctcccgactagctgcgactgcaggtgcgtgccaccacgcccggctacatttttttttgtatttttagtagagacgggatttcaccgtgttagccaggatggtctggtctcgatctcctgacctcgtgatccgcccacctccgcctcccaaagtgctgagattacaggtgtgagccactgcgcccggcatgagaattggagtttttaacattccattttaagatgggagacacaagtaatctttaaagctgacaggaaggatcctgtaggaaggaagaagttggagacacaggcaagaatgggatgcctaaggatagagttgctagatttagcaaacacaggacgcccaattaaatttgaatttcagaaaaacaacgaacaatttttcagtgtgtgccccaaatattgctgggtgtcttgtattttatctgtcaattccaaaatagttcatctctaggtaaaagggttatagccccagatgtcctaggaaggaatcagagctctcaagtcctttccagctgtcccagtacaacactctgaaatgaattcccagttctaccagaactgttaacaagtagagaaactgctttgaatttcagcttttgcggctttcccattcgctctaggatggcaactgcgaagaaaaatgccggactaaaagctgtggaaaagttctaatttggaaaaccagcccgcaagtgatgcagaggcttttgaactgcaaaagagctctgggcgtacaggacagtgagtcacacggtgcctggtccgggcccaaccctggacaccaacaccactcaactcaagggcaggtacccggctgctgccaaggggtcagcgggagcctgcgcactgccacggccccgccctcttccaacctttcatccgggtctcgggcaggggcgtgtctgggcagaggggcgggtggtggcggaaaggaaggatgtcgtgggagactggagagtggggagggaagcgggaaggggcgggggcggagcagggggcgtggcggagcgggagcgcggtcacgtgacgtgcgtggcgacgtgtcggccatcttgtgttgttgaggctgaggactgactggggttctgagactccctgtcccggaccgcaggtaaccagccgttccgtgtcgctcccctgcccggctctgctccgcgccccggccccgccgccgcgtcccgggccgcctgtgtctccggtccgcgttcgcgcccctgctcctcctgcccgagctggcccggccgcatg

SEQ ID NO: 25707 - DNA, 2300 bp, Homo sapien
agagcaaagtaaataagccacagtggtgcatgcctatagtttcagccactggggaggctgaggtgggaggattgcttgagctgaggagttcaagtccagcctgggtaacagtgagaccctgtctcaaaaatataaaagttaaaaaataaataaataagagagttttttgtttttttagtttttaaataggtcctatagcttttgaggatttgagatttctactaggttaaaatttattttaaaatatacgtgacaagatttcgaaagtacaaaaagataactcagtggaagatagatcttgcccgctccatacctctagttcttctttctagaggactatcacttaggtgaacttcaattttctataaagaaatcattatgcactaagcaactgtgattttacaagtctgtctagtagagataaaagcataaatatatgaataaaaggttgtttattgcagcattgttcataaaggcaaaaaagtaaaggtcatccatttctgtggaatgttacacagcttgctttttttttgggggcgcagagtcttgctctgttgcccaggctggagtgcagtggcacgatgtcagctcactgtagcctctgcctccagggatcaaatgattctcatgcctcagcttcctgagtaactgggattataggcgtgcaccaccacacccagctaattttttgtatttttagtagagacagggtttcactatattggccaggctggtcttgaactcctggcctcaacttgattcaccttccttggcctcccaaagttctgggattacaacatgagccactgtgcccggcccatcatacagcttttaaaaactgcaacttaactctatatctgtttattagaagtttgtccatgcaaatatattgagagaattgcctgtctcagaataaggtatagtgtatgattcttgctttataatagcaaatagctaatcccctttccccaccacatatatgtgaacatgtttgtctgaatgtgaagtatggagggatacacactaggctgttaacatgtttacctcaggaaatgggaatagcggggaggcaagagtaattatgaacttggaggttaatatgggtctattttagttacagagaatgtggtgagaatagtacctcagggggagaaaactagagtcagtgaatttgagtttagtgaagggtttgggctagagatctctacctctgtggtctttctctttcttcctgtatcagcctgtacagtgattgctgaggctttgttcctgttctttcttgagatttctgctttggggtagccttattcaatttttgattgtaactctgtggattcacttccgttaaatctgtctttctattctgactactcttcaactctaggtcttttggatacttcctcagtcaagcaccttgcacttactttgttcaaaaccatcctcgttatctgtctccccaaattcgtttttctgttttctgcttccttttaagctttataatacacatttgaaaaatacccgcaacattgagtcctatagattccattccatttctgtatcctgtgttttagattttcccttccagagggagcagtgcttttactactttgggaactattttatggagtaggtgtttgaatagatccttggttttgtatgagccattctaagggagggaggtcaggcttctgggggaagggtatgtcatagcacaactaaagaggaaggaaaatgcagtggacggtagaaagttctcatttggctttgagttgggaggtgaaacaataggagattgagttggggagggaggcatgggttgtcagattgacgatacatagtaggttcgattggacttttttagaggagtgtaggccatgatcagaaaggtgccttaggaaaattgatcttgaggcccagtcagggaagcaaataagaacttttgttagaataatccagacatgcattaatagagtttggactataatgaaagaggaatcttgaagaagtaggctaaatttgagacaaaatgaatggatataagggatggagtagagagagtttcagatgatctaggcttttgagactggctgaccagtaaactgaaaacagtagtgccttgatgatatgatcagtcagtgatcccatgccacattggtcatgggagaaaaaaatcaaatttgtaattaattgcaggggtgggatcatctctcccagctagtggccggttacaaatttgtgggcagatgttttaattgctgttgttaaaatgacacccctactctctgcatgccctctttgcc

SEQ ID NO: 25708 - DNA, 2300 bp, Homo sapien
gatgtaaactgtttttcttctgttaagtctacctactgttgctttatattatagactcaattatcaaaccttcaaaaggaagagagaaggtcttctctctcccctacaccagctaacctggtaacttcaaccagaaatgactttaaatgctcaggctattgtaatgggagagctatgctcctaagtgggcacttcagagctggtctacaatattcacagcagtaggaatcactgtttatagaccatagcaagactttcaaattgtagagatccagaaattagcttcacttaagacatttctttcttaattgaagatcattttgccaaatcatttttgtctcaatatattgaaaccaagtatactatggaaaaagacttttaagtttaataaaatccttaactgtcttgcctactataatatgtattctcaggccaggtgaagtggctcatgcctgtaatcccaggaatttgggaggctgaattgagaggacagcttgagcccaggagttcaagaccagcctagacaacacagcaagaccctgcctctacaaaaaataaaaaattagccagatgtggtggcattactgcagggggtgggggatgaggtgggaggatcacttgagcctgggaggtcgaggctgcagtgagctgtgatcacaccactgcactccagcctgggtgacacagcaagactctatgtctaaaaaaaatgaaaataaaaaatatacaatgtatattcaaaacacatgacagatacactcaagtgcttctgctttctagaagcagtattatactatacttgttctagtattttgttgttgtgttgttctgtttttctgcaatttgttagctgggaattgatacacattataattcctaccagtacatgcagggaatgagcatcacaccacaaatccttctttatactttaccttccctagttctgaaggtcagtgtttctaatgctgtgtctgaacttgtgttgaagtatttggtactaataaaacaaagaaggaattaatatattttttaaattgtggggcgggggggggacggagaggattctacaaaggcggatttcactttctaagtagcattatattggtctacattaataattttcccagcaggccttccaagattttactttgaacaatcacagtctttgtttctcagatcctcttacatgtgacatttggtcaaagttttaaaatcagcagctaacggaggaggagaaaagtactgttcactaaggcactgcacaaagccataccacagcacgtttcagggttccaacaagctggatcacattttccagctaaacactatttcaatgttgtgttacattttctgtacactgtacactatgttttattaacactatacttcatcacactgatcaggaaaacatcttctaaacatcattaaaataagccttaagaaaattcttcggttctttcccacaggtgtgcattttttaaagtatcaggtacagaacaattaattttattcctattcaaggtctttgtatacagcctttaaaaaaaaaaagtttgtttcctaaccaaaaaaataaaagatttcacgtaattatctatattactagttctggaactaatggtagccattctgatgagacatgagaagaaaactaagaaaatcaatgcattaatttatgcctataagtccttatccaaataaatcttccccaaagacatggtggaaaaaaaaaaagattagtaaaggaaatatctcacacttcaacatgctatataaggaaagacggctgaaaaatcttgcagggaattttatccctttgaactttcaaaaaaactcttaagtaagattatgcaaacttactaaagaccggtcctgattagagggaaaaaatgcaccccttctccaagtcagttctggaggctttctccagagttgttaaggtttgtgttgggtaaagaaagacctcctaacaaaccagcattcttttccacatgatcagagctaattggcccccctgcaggctaagtgaccaatcacatcaacctcagctgaaaccagcccccacaacattataaacagaggaatgtaagctgtaaaaccagtccaagaagagaacctacaaactagacttgtagattaaaattatctgatcaaaaaggcagactctgtaaatttccttaagacctaccttggcataaaggctgacccagcaaaagaactggtgagtacatgcaataatatccattcttctttccttatgggaaacagggaaagaaactgactggcaaatagcaacagag

SEQ ID NO: 25709 - DNA, 2300 bp, Homo sapien
tagaagtccccttatagcaggtgtgagtaaagtggagacagcatgtatagactatccttttaaaaagtatggcaaagaatgagtcagtgagaggagcaggaatttggagaagctatctgtaattgaacaaacaagatttcaaaggggaaactgcgattatacctaattacttccatcccccttttccttcttaagaacctgcacactgagaggttagaaataggaacaaagacagaacctcttttataatttgtattcctattgagaagaacatcctgcactgtacaggtagactccaagtgcttctaattatcctacaacatgtaatatattgaattatattaatcatgacttgaaacaggtacttactgagcataatcattgatattttcagtaaaggttttgatgagagatgacatatctttcagaagatttagggtgcattgttaacttttacaattggagacatgttatgaagaaaggattagactgattgtttctaagaggtcaacctgtaactgggtagatgctctggtgacacaggtaagccctggagaagcaccttttagataccttttaactcttaccttttgtcattctgtgtaggtaattttgtcactctaggaaggaatattacgtttctccatagaagtagcttcactgttcatgacagggctcacgttttctgtttggcccatttagcaggctgtgcgacttgataatgtagttagccttcacagaagtctctgtatttcaaaggattttcatctgattttttccccctagaaatggttgctgatgtccagcagcccctgtcgcagattccttcagatacagcctctcctcttctcatacttccacctcctgttcccaatcctagtcctactctccggccagttgaaacaccagttgtaggtgctcctggtatgggcagtgtttccacagaacctgatgatgaagaaggtctcaaacatttggagcaggtaaaaatcctgttaattctttttgtctcctcttaaactgccgtaagaattagcaggcattgcatgaatattcaaacataaaacttttgtcactagattttaagtactggaaaaactggatatttagtgtttatttgtacaagtcattgtctttcaaatcatttcatgcttataagtttctgctatgtagtagtcattatgtcaggttattttttgctcttaggttgcccttagctatttacttttcttttttctttttggacattaatggaatgccaaaaatggtgaatacaagcagctgtggatggtcactgtatcttttgtattttttgcttcaagtataacagggaaaatagttaaactttcagagcattaacatcttattcatgtctctaaatttccccaagattgtgtgtaccattgttatatgtaaagtaagtgatagcttgcttttctacgaaagaatttctcttccctttggggtgggatggttagtggcaggaaatgctgaagaaaggaaaaagcgagatagtgtcttagtaaaacttgtaaaacgtttcatttataattgtattaattgagccttttgttctattaacattctttttacaggtttagtttataccatttagagttgaccaacagcttattagtttaaaaagtactcttagccaggcaaggaggtgcatgtcctgtagtcctagctgcttggggaggctgaggtaggaggatcgcttgaacccaggagttcaagaacagtctggataacgtgatgagatctcatctctattaaaaacaaacaaagtactcttactagtgttgatttgaaccctgggctttgatccagagcagtgtttgttttaatcttagttgatttgattagtaattttcagaccttgaacaagacttggcatctctgagctttagcatccccctctgtaaaatggggatagtacctgtttcatggcattgttgggagaagttacctgctatgttctttgcatagtgactttcatagatcaagtagtccaaaaaaaaggggcaggcactgttattatgtgtacaagtactaatttaggatcatttgtttccttgatttttgtttttctgttactagcaagctgagaaaatggtggcttatctccaagacagtgcactagatgatgaaagattggcatcaaaactgcaagagcacagagctaaaggagtgtcgattccattgatgcatgaagcaatgcagaagtggtattacaaagatcctcagggagaaattcaaggcaagttgttcctttttcctttaaatactgaagtgtgtgc

SEQ ID NO: 25710 - DNA, 2300 bp, Homo sapien
ggatcgctgaggccaggagttcaagaacatcctgagcaacatagcgagaccctgtctctacaaaaaaaaaataatgataataacttgtaaaaaagagaatatcatattacatttagctgtcatgtctctttaggcccttcttggctatgacagtttcttagacttccttgtttttgatgactttgacagttttaagaaatattggttagtatattatagggtaccccttgattggaatttatctgaagtttttctcatgaatagactggactatgggtatttgggaggaagatcacagaggcaaggtggcattttcatcacatcaaatcaaggggtacacgtattgccaacagtgtttgggactgctgatgtagaccttgatcacctggctgaagtagtatttgccaggtttctccaccgtaagttacctccccccttactactgtaagtagtactgtaagtcaggactgtactgactccttggaagtcactctgtgcagtccacacttaagaatgtagagttttgcttacttttgcctgtgttctaaattgagattttttttcagaaacctaaattctgttagacatagatagcttccaagttacattgtgtgttgattcattctttggtttattcatttaacagttaacatgtttagttaatgtactacatgccagttactgtgcttgttttctggtggagtataagactttttaggaaattgtttctgtcctcaagaagcacagcctatgtgtgtgatgaatatacaagaagtaagcgccatcattaggatactttcagctccaaaataaaaatacccatttaaggtggctttaataataaatgaaattgttgcctcacactctaaggaggtctgcccatcagcctgttgtacacttgcttcagtgattcagtgaatgccattaagtatttacggcctttgcatactcctcctctgccatttcctggtgtgttgacttttgagttcagatgtttcacgtcatggttaagagttttggatatcacagtgtgtgcaacctgtatccagacaggaaatggcccttctctcatgctttcttccttttatctgggaagaatttcttccttagaggtctcccagtagacatctctttgaccccagttggatcacatggctacccctagttaacactggaagcttaaaagcaaaatctgacattttaaacctctgatgtggcaggaggctttgtctgccaggaataagcctgacaaaggtagtggttattggataggtagaaacaggagctgccataggtggactagaagcaaatagataaggacagggtatagttgaccttaatcaaaaggcaaaggtgaagtatacctcctaaaggctaggcaagtctccgagtggctgacttctatctgacctacgttttaaagaatgaagtagaggaatatgatatgggtaagacaaagcattgcagacacagcagactccaaagatgaagggaatttcttagtgaaatgagttccgcagggcacaatggaatggttttgagggaaggaagcagaaggaaaatgagcccaggtgagggcaaatgcagtagatggtagaggactggttgaggagagatgttctgaagggcctgtgggccacaaggggcaagagccagggatggaattctgtggtcttggaaagttgctttggttccagaactggctggtgctttcatggtaatcagcattcttaaaaggtattggtagctcttagcgctcagcaccctgaaaggcctgctcacctcacatgttggagcagtgtttccaggagactttcctgtagttgatggtgagctgcttcgagatcagagctttgactgcacatgtttaaaatgacagtcctttaattaaaatttcatcctgtaagcataccaggcctttgtggctactataaatatattttaaaagaaaggttacttctaccttgcatcatcatgaacagagtttctgctttctctgtcatctctatagccatttgacagaagctttcaaaagtgagtcagatttttccccccacaattaataaaatttttatatctttaatttttccttctggaaaggaagaggaggctgcaaaatgggcccgggaagaagaagaagcccagcgtcgattagaggagaaccggctgcggatggaagaggaggcagccagactccggcatgaggaagaagaacggaagagaaaggagctggaggtccagcggcagaaggagttaatgcgccagaggcagcagcagcaagaggctctccggaggttgca

SEQ ID NO: 25711 - DNA, 2300 bp, Homo sapien
ttacaggcatgagctaccacacctggccctgttgagcttttaatatatgctatatcaaacatctgtgagtccttattttgttctttaagtattttttatagccttttattgtttcattaaatgcaccatcttacctctctaaggatattacttactgatagcttcttaaaaagccaactcctattttgccgttctcttatttctatttctgctgaattatttttgttttggtctttggcttttatgttagaagtttatgtcaaatgtttggtaattctgggctgtttgttcctatttacaaataaggcactcagaagctgattggaggttctggtatgtacagcaccttgatgggctttcctataatagattctggctgggttgttctgttggggacctccacccccacccccactccaatttgttggtacctacttataggtgtgttctcttgtcaagctggttggcttccccacaggataatgtgccagtctgatttggcttcttcagacagggaatgttcggttttctgctgtggtgagggagagtgaattgcctaactgcacagagtgcgggaggcaatctggagtcttactgcttctttttacagcctttcaaccagtcttcctctgtttgagagactcagcacctccagttcctgagccttctttgtgaatctgcctgtttctgagctcctttacttagatttcaatttattaggtctgttacattggttctcattatttatctgcttttcagattttaaaaaatctattctgttttctttgtcctcatgtgtttatgctgtgtgtgtgtgtgtgtgtgtgtgtgtgtgtgtgtgtgtgtgtgtgtgtataatctgtcattttggtgggggctttaggaagtaaacatgtgttttatttctgtgcttaaccaaaagcctacttaatttttaagaagtaattctggccaggctcggtggctcactcctgtaatcctagcactttgggaggctgaggcgggtggattacaaggtcaggagttcaaggccagcctgaccaacatggtgaaaccccgtctctactaaaaatacaaaaattagccaggcgtggtgtggtggcaggcgcctgtaatcccagctactcaggaggccgaggcaggagaattacttgaacccgggaggcggaggttgcagtgagctgagatcgtgccattgcactccagtctgggcgacagagcgagaccctgtctcaaaaaaaaaaaaaaaaaaagtaattctgaggccgggcactgtggctcatgcctgtaatcccagcactttgggaagccgaggtgggcagatcgcttgaggccaggagttcgagaccagcccggccaatatggtgaaatcccatctctactaaaaatacaaaaaattaaccgggcattgtggcttgaacctgggaggcggaggttccagtgggctgagagtgtgccactgcactccagcctgggcggaagagtgagacacagtctcaacaacaataaaaaaagaagtaattttgcatttcatgtttttattctcctttttaatactgttagcgatttacatttttatttgcaacagcagaatttaatcccatcaagttaattttatgtagctactgtgtatttacattccatttagtatactggatatttataactattatctaaaaacaggaatcctcagctagcttctgtttttatgcaacagcaaaggcgccagcagagggagttgatgaaagctcttcagcagcagcagcaacagcaacagcagaaactctcaggttgggggaatgtcagcaaaccttcaggtaccacgaaatctcttctggagatccagcaggaagaggccaggcaaatgcaaaagcagcagcagcagcagcagcaacaccagcaaccaaacagagctcgtaacaatacggtgtgtgcattttcctaagctgtcgttgtatggactagtattatcttttctgactgtcttcttatctttttaacatgattcacgataatcatttttctctttttctttaacagcattccaacctgcacaccagcattgggaattctgtttggggctctataaatactggtcctcctaaccagtgggcatctgacctagtcagtagtatttggagtaatgctgacactaaaaactccaacatgggattctgggatgatgcagtgaaagaggtgggacctaggaattcaacaaataaaaataaaaacaacgccagtctcaggtagggctcaaaatgaccacacctatgcaccttggttggttgggaggtggggat

SEQ ID NO: 25712 - DNA, 2300 bp, Homo sapien
cctcccaagctcaagcaattcttgtgcctcagccttccaagtagctgggactacaggtgtgcaccaccatgcctggctaattttcatatttttattggagatgggttttcgccatgttggtcaggctggtcttgaactcctgacctcaagtgatccgcctgccccagcctcccaaagtgctgggattacaggcgggagccaccgcacctggccaggtcatttcatcttcaccatccatggcagggttggcgtccacccggcctctgctgccgcttggcctctgctactttagaatcacattatttcctctgaaatcagtgatcccatcatcaactctggcctacaaaaaacagccacaacctatctttttaaagttgccggtcttcactaatgcatctcgcagtgtcttggtgaatagtgtgtactatgggacctactgagaacttagtgtggtcgccaaagataaatccaccccaacattcctttcttactaagccattggtatccccttcttcattaagttaggcttctcaatctcatagcatccaggcttttactgagcctaggttttggtcagccagccaaacagagctgctcctagatgcttaggttgaaacattaaattcagacttcactaagcacacccctgtctagaatgtggccggatctaatgtcatactcacatcttgcctatttagtctgacaccttagaattcattcccacaccatgtttctattaatataaattagcaaaattcgtatcttactaacttgatactaatttattgctagcataaattaacagtagtttttagtttgtgcttatttcctcctaagtcagactttgtgcttgctctccctaggaatgctgatacctgattctagttatggatatggaggcaaggagaagttgttagggtaggtacaaggtaatttcatataaatacgcatgctaaaaagaaatttgaagtgatggggggattgaggggctgacttatcaagctgaggcttgaatggaaggggtggccacataatcaccacaggactgccttctgggaggagaggggaacatgcaaaggcctgaggcaggatctgggggtttgttgggggagcctagtcacggccagtggactgaaacatagagctcgtgggtgggaagctgagcagggccgaggcaagcccttagcgcggtgggaaaccatcaaggtgtgaagtagggggcgctgacagaactctgagggctcagacgtgggaagtgagggaaagagacacctttgatgacttcattgtgtggctagaacatctgggagcggggaactgggattccactgactgagtgagggaaggggcagtagagtcaaggtttgctttggacactgtaagttgtagccgctcgtgagataccctgcggggctgttgagaagcagtgggcagtggggctaagttctgagccaggcccagcctggaaatggatgtcataagtgcacaggggtctagggaggcagagagcgaaagaggaaacaggagcgttttaggaaagactagagctgcctgagggtttggatcaaaactgctttaaaagtccttcttcaacaagcactgagcacctactccgggccaggcatggagaacccagaggtgagcagagtccgtcctgcactcagtgctgcctgcttcaggccaaatttccccaagcccaggccacaggcactaacatgcagattccctgggctacccaagccccactgaaacacagtggccagaggcagcagcatgtttcaagttccctgggtgattcttttgcacaagaaagcttgaaaacctttcattttcagtggtccaggagtaaatgtgggaggtgtgtgtgtgttgcggggtggagaaagagagagagcacaggcaatttcctctttccctctccaagagcggggctgctcccaggttcaggaaagcaggtctgttctgtgagctcttgtgtgtgtgtgttggtggggggagcgggggggtggggaggtgcgggcacgatgtcccaggaggacagagtttgcattgatgaaaacccttcccagccctttgatgcctctttctcactgccctgaagttaaccagcgcagtcctccgtgcgtcccgcccgccgctgccctcactcccggccaggatggcatcctgtctggccctgcgcatggcgctgctgctggtctccggggttctggcccctgcggtgctcacaggtaagaggtgaaggcccttgtctcagccaccactagcctcccagggccgataactaccttggggccaga

SEQ ID NO: 25713 - DNA, 2300 bp, Homo sapien
gtcggtgacacagaggagggccttaccagcaacagaccatggtgtcactctgagctcagccttccagcctctggaactatgagaaatgtgtctgctgtttacactgggttctgatgacaccctgtattactccgctctcacgcggctgataaagacatacctgagactgggtaatttataaagaaaaagagatttaatggactcacaattccacatggcctcacaatcatggcagaaggcgaaaggcacgtcttagatggcagcaggcaagagagagaatgagatccaagcaaaaggggtttcccctttataaaaccatcagatcttgtgagacttattcactaccaggagaacaatatgggggaaaccacccccatgattcaattgcctcccactgggtccctcccacaacacgtgagaattataggagctacaattcaagatgagatttgggtggggacacagccgaaccacatcacacccagtctatggtattttgttatagcagccaggacagcctaagatgtgggatggccagatggagatggccagtgagcagagcaacacactaagggcaggaggtggctgcctggagatacctgggtccatgggagtgagtcaaggaagggcggtgcttggcttgggaaaagaccagatggttgtctcgaatattctcaggccttaagggcatgaagagaccagacctgcccgttctggccccaaagggcatgaagagatcagacctgcccgttctggcaccagggctaagtggcagctttagagactggctttgagtctacctgaacacccttttctagagtcaaagctggggaagtcagaccacgtggggaggagagctcccttccaggcaaaaagcttaatgcttctcagcttcctccccaaccctcccttgatcacacctgccttattcaagactggttaaggatccattaaagccaaacaattaacgagtaactgcaccgctgccaccaggaatgtttgcatcccccccaacgaagaatttgctaatttaaacaaatgccgggtgggttggagcgtgcgggggactatgctccgcactccacccctgcccctggggtttcctcagggccgtaaaaaggacaggcccggctgcaggcgcaggccgcggtcacccaagggcccacccaggtgagccggctggcctccggaaaaggacaccgggcagcgcgccaggggccttcgcgagggtaggcggggggcatcttgctagatatcctcgccacacctgagcagacagcatgatccctgagcagagggcggcttggctcggcccgtaggcacctccaggcctcgctcttccgactgtcctttctgctctttctgatccgcgagcggactgacccagctaacgcgaaggcgcagagtccaggagtcgatgtcaccgggcagggcaacccaggagaggtttcgggcacttggtttctcctcctctggtgcccccgaacccatcccagacccgccagggtcgtgcgtagctgagcgtggctcgtcctgcgaccagactcgcccgggaaagacctccgcgccggccccctccccaccgcgaggctcaggagcgggcttgcaaggagcccctgagaccccagtctccgcctggagcagagacaagacggagaccccctccagcggggacacattccccgaggccgggctcggagcttcagagcgggtcgccgagctgcgaccctgcgggagaccgcagggggtgcccagcgtgggcaaggcggaggtctgcgggcactggggagccgagggtggcctcgcccgccccttccaggcttcccccgccgtgaggagtgggcggggcaggcaaaggcgcagctccagggcctccgcagctctgcccctctccgggtcggggcacggcggcgcgggggaggaaggcgcgagcccgcggcaggccccagcccgcagtcggcgctcgcggggcccgggtcgcgcccagcccgggcgcccccgccccgccgccgcccggcctcgcccccgccgcgcgcgcccctcccgcctccctcgttgccgtggcaaccccgggagcctccaggcgcgcgcccgcccgcgggagtgctcggcagcggtggcggcggcggctgcagctccggtcgagccgcgcgcgctgcgaccccgctccgcagcccgctagtcgcccccgacccagcccagggccccggcgtggcccccgacccggcccccgcacccgccccgccgccgaccctatggagctgctggccgctgccttcagcgccgcctgcgccgtggac

SEQ ID NO: 25714 - DNA, 2300 bp, Homo sapien
tggatgaatgggtgggtggatgggtggatgagtagatggatgggtagatggatgtgtggataagtgggtggatgtgtggatgagtgggtggatgaatggatgagtaggtgggtgggtggattggtgggtggatgggtgggtggatggatggatagatggtgggtggatggatggatgggtgaagggatggatggtggatggatggatggtggatggatgggtggatagatggatgggtggatgggtggatagatggatgggtggatgggtggatagatggatgggtggatggatgaatgggtgggtggatgggtagttgagtagatggatgggtagatgaatgggtggatgagtgggtggatgaatggatgagtagatggttgggtagatgaatgggtggatgagtgggtggatgaatggatgagtagatggttgggtggatggatggatggatggatggatggatggatggatggatggatggttggatggatagatggtgggtggatggatggatggaagggtgggtggatggatgggtgggtggatggaagtgtggatgggtggatggatgggtggatgggtggataatggatggatggatgggtggatggatgggtggatgggtggatgatggatggatgggtggatggatggtggatggatggatggacggatggatgggtggatgggtggatggatgggtggatgggtggatggatgggtgagagaatagatgagagactacttcaatctggctttcagggacaaaactgaaacccatgttttgtggcaatcagatggctgtgggaactttcaaagatggccctcagggacccccacccctggtattgtgccctgtgtaatcccctacctttgagtgtaggctgtgcctgatgacttccttctaacgagtagaatatgccagaagtgatggaatatcacatccttgagtatattacaaaagactgacctacctcttcccagactctctccatagccctctctgatgcaacgagctgccagggcggagaggcccacatggcaaaggactgatagtggccacagctgacagctgagaggggctgaggccttcatcctacagccctaagaaactgaatcctgccaacaccagcagcttggaagtggatcccccctagtggagccatgagatgagacctcagcccctccaacacttggatggcaacttatgagaaaccctgagcagagaacccagccaagcagtgcccagacttctagccacagaaactgagatgacaaatgagtgttatttcaagccacacactttgagttaatttgtttccagaacagatagctaaaacaaacgctgatttgagttttatataaagatggatgatgtagcaattaaacttggcaaatgatggtagtggttttgatactagttggcttgggtttgaatcctggatccccaacttactagctgtggggctttgagcaagatgatcaatttcttgagcctctgtttctgcatctttaaaatgggcatgattctctggtcatagtgacaacacaaggattacatagattatgtaatgtacttagcccagtgcctgtcatgtagtaagcactggattaaaggaagctattagagggaataataataataataataataataataataataataataatggagcaagatgccttacaaagcagtgagtgttccatgcctggaagtgattgagttaaggccagatggccatggcaggaagtgactagaaccctggaggaccccaaagcctctcccaaatctcagatttgagggccgtgcagctggcttggccaatgcttggggttggtgggccagctgagccacgggcccctcttggtgtgaccatcagcattatcttgcactgggcgggcggcgggtattccagccatgcccagccttcccctcagatagcccttccctcctgcaccacttttgtgtcaggtatgtggctgccaccctggctcaacccatggggcccaggaaggtaaacacccagccgggaagtgatcgttatgggctcgtggccagctatgggccaaggcaggtctaaaggtcgggaatgcttaccagtgaagcttttccaggacaggacgaagtttttggctgtgggctctctgggacagagtggagcgcctgtggatttagccggggacacaccatcctgctcgcaggtgcctggacaggacaggggacgagggaggaacactctctgaggaagcccaactcctatgagctcctctctggcaggtgagagaatggtttt

SEQ ID NO: 25715 - DNA, 2300 bp, Homo sapien
cttgccttgtgattcctcccgaagacgtctctgtcttgttttccctctagaatgtctttatagatgtcctcagctggccgggcgtggtggctcatgcctgtaatcccagcactttgggaggctgaggcgggaggatcacctgaggtcaggagttcgagacctgcctgactaacatggaaaaaccccgtctctactaaaaatacaaaagtagctgggcatggtggtgcatgcctgtaatcgggagcttgaggcaggagaagcacttgaacctgggaggcggaggttgcagtgagccgagatctcgccattgcactccagcctgggcaacaagagcgaaactccatctaaaaaaaaagaaaaaaaaaaaaagatttcctcagctaaacttcttctctcctttcctcccacattgtgtagagaaggccagccattgtaatccatacagaaattttggccctgaggacattttaaatacaaacattttaaactgaattataccaactctgctgaatttccatcaaggacactttccagagcccactctatggagcttaaataaatccttgatcaattttccagagaacactgtgaaactgcacagttctccattttcatttttacttgttatcatatttgattctttcctgctgacattttctaacagcgtttcagcataggcctcccgatacctatcaaggcctgtgtccttggattataatttggtgattctatcaccaagccatgaatctcccaccgaagttcagggaatagcacattttttccttgtgcagcttttgcccttctcagttttattttctcacatcgtcctaatattaacgttcactgtggttgaatgaaagactgatagattacatttatttctcaaagaagctaagttttaaatagataacgcatgcatgtggtagaaaaatgagagcagtacaaaagggtgcacaaaggcaaaccttgcccctcttgctggcctcttgcccacttgccctctgcaaaggctgtgtctcagacggggtgcccaggacgccggctctgacacggagacccacggcaggcaagagcctctgggggaaagggaggagcagcagagaaagaggcggctgtaatgcagtctcagggaaggcccagccgcccggagggagctccggagccgcactgttcctggtcaggagttcaggaagagggtcttcaggctctgagtggaccaatcatcaagcagcccttcttgggtatgacctggggcagattcttcatctgggaacaactggcccatcctccccaggccagggccctgcagccaacactccccagagctgcgggatgcatcctcctaaagggacctaggcagcttagcccgaaaatcactgtcacccactgtccccaagttacctctgtcccctccctaccctttttagctgaagacttatttttaattgttattttcttagacctctggagcaccccacgcccccagcctgggttagctgtcaggagcccctgtctcttcctttcccactgcagcgccgccccctcgctgcctcagggggagcccacgcagcagcgggggcagacgggcctcagcctcaggcagcctggggagcagagccttagaagccatgctttttctttttccttttctttgaaacaactttctagggctctggagttataaaaagctcccatgtgtcactttctggcatttgggcagctgccgaatgccacccggcctgcactgctgtcctcccgaggtttgcccctggattgatgggctgggtttggcaaaagcagctggaggttatcgaaaatctgttgtaaggagcattgttaacttagaataaaaatcgaatccaaaacacgcttttgcaataccccctcccgatatccaccgaggcaaaggcagaattaagaagcagggtcttgagatgtaggaaaggagaatgaaccccacgcgggaagaggacaggccgccctgactttggtccactcagccagggggtgagcaccacctgtcttggtgaatgactctgagcccatctcaggtgtggctgcaggtgacacatcttctcttcctgtccaccccccagccccatggcgtcccttcctgtcctgcagaaggagagcgtgttccagtcgggagcccatgcctacagaatccctgccctgctctacctgcctgggcagcagtccctgctggccttcgcggaacagcgggcaagcaagaaggatgagcacgcagagctgattgtcctgcgcagaggagactacgacgcacccacccaccaggttca

SEQ ID NO: 25716 - DNA, 2300 bp, Homo sapien
tttatgctataaaatttggaacagtaatttttttttttttttactgtgtcgctctatcacccaggctggagtgcagtggcacgatctcgactcactgcaatcttcgcctcctgggttcaagtgattatcctgctcagcctccaaagtagctgtagctgcgattataggcacgtaccacacccacctgattttttttttttttttttttagtagagacagggtttcaccatgttggccaggctggtctcaaactcctgacctcaggtgatccactcccctcagcctcccaaagtgctgggattacaggtgttagccactgtgcctggccactctctagccattatttgaagtcttcattgataaatcactatccctcacatgagtttgtgaattttgtaatacgttaaaattatttatattgactggagacctacaaaaaaaaaaaatccacccaccaaaagggcagctctgatctagatactgggatttcctgaatgtggagggcagaagggtgggggacaagccagctgaccatgctggatagatcaggcaattgggtggaaaaggaagcaaagttgggatgggccttaaaaatgagggaagagtgcccgtgtggcgtgtgtgccaggggatctcactctgtggaatggcaaggaccgtgggaatagaggtgtgagaggtggggggctgggggtttgggggaagctctctaagtagggcagtcttggcatggtaggggtctctagagatgagtgggtggaggtgtaaagggaccagtattgcaaatggatcctcctggtggcgtggtccaggacttcatggatgttggtggaggccagcagggaagtgagaagggtgtgaaggtacacaatgggagcataggagatgaccccataaggagggggtggacaggtgctgagtggaggcgtgggtggggaatgagaggcctccacactgggctgctgcagaggtggcgtgctgcggaagggccggagcatggaggccagttcccatcaccactctatccccacgcctggctcccagcctggccagaggtccttgactgggagtgctttgtctgccctacagactcgcctgccatgtgtgttgctcagcggggaggtgctgggggccctgttctgggacaaccatcagtgtgacacatgttgagcccctgggcacatgtgagctcttttacgagctacgtccttcaagttagacaagaagaaaccaaggccgagagagagaagaaacttgaccaggttcccacagcttgaatgtggtggcgctgcctggctggtgccccttcctggagggagtctgttgtcatgtcctggaggccaaggcctggatgtgggatggtgggggcactctttgtgcagcgggtcaacacgtgccccttcggccttggtgggccggacccaaggacggaaggtgcccaggtctgggggctgagggatgggtgtccaccgcagagccctcagaaatgactggtcctggatggcggtccctggagaggcagctcctctttgagtggtgggcatatgtggccatgcccagtcttggaggcggtgcagtccgaccggccaccccgactgctgagacgcaggactcagcacccagtgttgtccttggccaggcggccagcctgccctgtggggctttggggttctcctctccgagcttgtttccccagcatcctggagaagcccagggaaaaacccagcctatgttcccgctgtaaacggcccacatcccctccaagctccctttgtgtgtctccaagctggactgcagggatcagagctgtgctgcccgtgcagcacccacccgcccctgggaatgagggtaatggggtcacagagccatcacttggaccttggcgccctcggctggtggcagccaaggtctcccagcacccaggccgctgggagtctctaaaggggaggggtggggctcgactgtcccctccccctcaagtttgctctgtcctgggcaggccgtagtcccagttgagaagctgtgcccccttgggtgttttggaggttcagggtgggtgctgaaaagccctgagggagagcagaaggctcgggggcctgtctagggcatggcatcccacgtgggtgtcagcacggccgcagaagaaccacttctctggcccacccatgcctgctaggccatgcttcttcagaagtggccacaactctcctgacgtctccagagccggtcattccacccagggggacttcagctgccactggacacttcaattgtacgctgcgaccagttgccaggaagga

SEQ ID NO: 25717 - DNA, 2300 bp, Homo sapien
gaggctgcagtgagctatgatcacaccactgcactccagcctagatgacagagcaagatcctgtctcaaaaaaaaaaaaaaaaaaaaaaagattgcagcgcaataagggtgtccatcacatcaggtgctggctgacatctcacatcagggacccccagcaaggccaagggacaagcgcttctggtgcaggcccacagtgatagcttcccactgagtgcccagtctccgctcctactttcacctccaaagcatcaggggtgggctggtgggaggtctaaggtgtccagagctgtcaggaataatagggaagggtctgggagaaacaagagaatggggcccagacaggtggtgggagatggagagaaagaccgctgggctggaatgctttctgagcacctgggcataggttcaaacaccagctctgccccattgctgcgacctcaaaaggactgaggcacagggataaatggaggccatgaatcttgagccactcccaactcgaggcaggttatagtaaagatggtcattatgacatctttgtgagctggtgtcttcagggaggacttactgagatttgcaattataaggttgaatcatgtaaaatttctgtctttgcaggttgaaacagtcaaacactggtcatgtcatatgttacaccctgaaatttgtgtactttgttaaagtccgcctgctctattgattgcatcctaagagagggccaactgaggctgcttggtgccccactgggtaccccagaaaaatacgtgaaaaatattgagtaggctatgaaagccttcatgtcctctcttctttttaattagtttctttaatttaaatgttctttcattacataagtaatctattctccttggtgaagacgtggcaaacacaaacaagcaaatgtttaaaataaaaacactcgtataccatgagttaatctgggactatgccccttccagatgttttttaattttctctttctttcttccttcccttctttctttctttttctgtttcttttcttttctgagacagggtcttgttcagttgccccggctgaagtgcagtggcaagatcatggctcactgcaacctcaactttctggcctcaagtaatcctcccacctcaacctcctaagttgggagggactacaggcatgcaccaccatgcctggctaatttttttattttttgtagaggcagggttcccctatgttgcccaggctggtctcaaactcctgggatcaaacaatccttctgcctcagcctcccaaagtcctgggattacaggcatgagccactgtgccaggcccaaatgttttattaaaaatgcaatgatgctattcatatcatttgtcaactagcttttcatgcttaaaaatatatattgtggccacctgtccttgttggcaagatagttctggatcacacttgttaaacactgtgatattctagtttatggatggtctagaatactttttttttttgagacagactctagctctgttacccaggctggagtgcaatgatgcgatcctggctcactgcaacctccacctcctgggttcaagcaattcttctgcctcagcctcccgagtagctggcattacaggcaagcaccaccacgcttggctaattttgtatttttagtagagacaggagtttcaccatgttggtcaggctggtctcgaactcctgacctcaggtgatccacccacctcggcctcccaaagtgctgggattacaggcatgagccaccacacctggccctctgatacattattaatgaatctcctaaggctggacagtaaggttgcttctgatttttttctgtgctgaggcctgtgctgcagagccgtgacagggttggacttctgcgcagctcctgatcactttgttaaactcgcacctttgcaggggaatgtctaggccagaagccactcgcttatgactttggacacatgcttccaggttgctgtcctggaagttcacactgatttacgctcctctcagttttcttgaagctgaccaagtcctttgcaaagtgtaatgtgcagggaggcagaggcctttctaagtctgtctgcccttccatccctagaagagagaaggcttctgccagctcctgcagcagatgaagaacaagcactcagagcagccggagcccgacatgatcaccatcttcatcggcacctggaacatgggtgggtccgcgcgccccctccctgcagtcaccccctctgcttctgctttcctgactcaggcatcctcaaggtggggtggagtgacgacatccatgtc

SEQ ID NO: 25718 - DNA, 2300 bp, Homo sapien
ggagaatgcgcctgggtcaagggagcacatttatccacgtgcttatttatttgaaatggaaaacctttgaatactgctcggtggaagtcactaaagaggaagaggctgcagacacaaatgaaagccccacgcatagtctcccattgtgcaggctctgccaacacctgggtgtgggcactgtcgctcccctccttggggaggtgaggaaaggaggctgggagacctgaaggtcatgcagctactgagcagcttgttggaggtaactacgtgatcttgggcctgagcccaggcagctcttccccgttcccagtgcagcactggcaagagggtccccaagctgcaggaggggtgggaagagcttgaggagtgtgatggccctaatagggatcccctcgtcacggatgcaagagcatctgaatggctgctgaaatgtttgaagctttgttagcaggaaacaggcagtacgcaaaacacacgcttcattttctcattcaaatcctgtatttctgcgacacggcaagaccatgtctttaaaaataatatactgtaatcctcctttgtttcttccgcttcatattcatactcacaagcagcatatcatcaaaataaaaaggaaaaacatcaacagtctcattccagtaatcatttttattttggtttcacatttccagcctcatacataggcatacctagattttcatacttacatcacagaaacatcattttatactctgcttccctcacctggtattagatgaaacacattttccatgattctcctgccccatctttgtgactgttccttttgatggctgcattatattccatggacttactgcatcctcattttaaaagtattcctcactttaaaagtactattattgaggctctgtcagttgtttttgttggtgctatcagtaacactgagatgaatctctttgtggacattttttattattcttcagctacattttttattcctttgagtaatctcattaggacaggttcccatgtttgccggatcagagggtgtcaatcagtgtttgtgcttcttggcgcttgacaccaaactgattgccataaaggctgtctcagctgacctcaccacggataggcttccccagatccttgctggcattgggtggttttgttttttgtttttggaggccagagtgcagtggcacgatcttggctcgctgcaacctccgcttcccagattcaagagattctcctgcctcagcatcctgagtagctgtgattacaggcatgcaccaccacccctggctaatttttgtaatttttcgtagagagggggtttcaacatgttggccaggctggtcttgaactcctgacctcaagtgatcagcccgcctcggcctcccaaagtgctgggattacaggcgtgagccaccacacccggtgcattgggtgttatttttctcgcttcctatctatgctaacttcatgtctgtgaaagagcaacttaatgattccttagtttgcatttttgatggctaggaaagtggaactattttccatttattaaaattaaccagctgcaattctttttgtgtgaaacgtctgtctgtattatctgttcatgcatctgctggagagggtaccctcttgcctggggagctagctgcagatactgttcccaatccgtttcctttttattttaggttttttctctgtgcaagttttaaacttgcatgtcctcttgcccgccaattttgttctgtcatgtcttatgctgcatcaaatcttgggaagttttcattccctacagcgatcagatgagtgtttaattctgtctttctgctgcattttctacaatataattttttttacatcaactaatccacgttttgttctaagacttgagacatttgcccccaaagtactgtggtgttgttctgacggatttattaaataacccttgcctgggctatagtttcaaaggaccaactctccggccaagagtttggtgtttctgccatgaaaaggcagggtcttcacccagctgtctcccactttccctgcaggcgagggctgcattgcccttcggttagaggccacagaaacgcagctgcccatctacacgcctctcacccaccatggggagttgacaggccacttccagggggagatcaagctgcagacctctcagggcaagacgagggagaagctctatggtaagcagcaagcccctccccagcgccctcttcagccccccacttagggacgggaacgtgctttctctcagcaaagctgtcgaatatgctctctgctgcggcctc

SEQ ID NO: 25719 - DNA, 2300 bp, Homo sapien
aaagatttttgtatgtggacatgtgtccaaatatttcttggcataaattcctgcaagtggaattgctggttaggcaaactgcaaatttgtaaacatatttttatatatatagagagagagtcagggtcttgctctgttgaccaggctgctggaacacagtggtgctatcacagctcactgcagccttgacctcctaggctcgagcgatgctcccacctcagccccatcccagtagctaggattacaggcacacgccaccacactcaactaattttttgtattgttgtagagacaggttgtgtcatgttgcccaggctggttggtctcaaattcctgagctcaagtgatcctctcaccttggcctcccaaagtgttgggattacaggtgtgagccaccatgcccaaccttggaaacatattttaatcataaatgtgggaaattaacatgctcaactgtcaagatttggtgtaatggtcttttaagggtggtgccactgctgcatttgaaggcattctcggtcactttcagaactttttcattttcttcagcgtgtgaggaagtcacttctatttctgatcccattggatccttccaacgacttcaggtccactcaatactgactaccagtgaaccatcttcaactacagtgctagaagcctgactgtcctcctctcctcagcctaagttcttcttatctgtctctgaaggaccttcctctggacttgagacacactggaagagaaggtagtttctgatattcctttcctcttttggccaactactttgtctggctccattttcatgcagtaaattcactaattgttaaaggcagatggagctccagcaactctattacagaactgggttttccattctactgagcttgttcacagacacaactttctcaggagccagtgtgtcttcatctccccctttcaacatctacagcctcagattaccttctaaggctccatttattgtcaggccacaatttctaggattctaacaatgaagacaaactctgatacacaattcacatctttcttagctcccgtttccagttctcttctccattgcaaacaaaaacaaaaaccccaaacaaaccacaaaacctgtttccaagttcagtgggacactcttcccaacgcaccctgacttcaggtatgtaagagttaagaaacaagaaagaaacacgaaaagcagcttaacaatcaaagacaggtttattttggagaataaacctgagaggggcttcttgtcgattttggtcaggagcgttttctcttacacactaagggtgtttaagggtttacgaagcggtgagcttattgcaggttcgtaatgtttctgtatgagggaaagtttattgcagggttggaaagtctctggccggaggggaggctatctctgggttggcatgtttctggttggaagtgggtttatcttagggttggaatgtttctggttatgctgacattagccattaggctgatgtttttgggttggatttaggcagtttcttaatcaaggggaacttaaaatggtggcagttgtccaagatggcaatgctcctgctgtcagggtaggccttgggaagacaccaggtgtctttgtaaacttaggtttcccctgtaccaagcacagtgctgactgcattacatgggtttttctttttactattcgtgacaaccttctgaggtaggtatcattactgtccccatttacagatgagacaactgaggcttaggtaggctgtcactcatccacagccacagagctactatggagggaaccccatttgttcctaaactgcgattaaaaataaaagtggggggagacaggccaagaaaaaaaacacgaaaagggttgaaaagcagcaaaagaaaagtaagcagtcaggcggaaacggcccctttcctgcctccttcccgcccggcgctgggccttgcgcagggcccggacgcccccaagcggccacctctctgcagctgacgcttccggctacaggctggcgtcactagcgagcgccctgcgtaggcaccggctcctgagcccgtgcttcgggtgagggggcgggtcttccggccctctcgaaaatcatttccggcatgagccggaagaccgtcccggatggcctcggggactgccagtgtgtggaggtgagctccgggattgccggcattcccgcttctgctggttgcttcatgctgcaggctgcggccgtcagccctcgctcgcattggtggcgctgaggtgccggggcagcaagtgacatgtcgtcgggcctccgcgccgctga

SEQ ID NO: 25720 - DNA, 2300 bp, Homo sapien
taaaaacagtgctgtgcatataagtgctttcaaagccatctgtataatagcttgtaattgtaaagcgttatctctttgacacaaatggaatgttttcctgcactttgaaaatggcatcttgatggggcaggagcatgtagaacagtcagaataagaggtcacttgtggagagcagatagctttaaagggtgctagagtagcgagtaatacctgcctgagggaccaggacaggagaccgggatgagaagctaacaagaggcaggagagtgagacaggctttgcatgttaagatcttctgtttaggcagagggattgacatttagggagatcatttctattatagtttgtgaaacaccttcattccactcattccagccttcccaggccagtcaagctctgaccctccatcagcctggagtctattctctgttcagtccgtgcctttgagtctgaagagaaaggtggaaagaagccgtagggggagggaaaggcttccctccatctccagccttctcttcagggaggaacctttgggaaggactccttttgaacgcctgtgttttttgaaagaacctaaaattatcacagggcactaagctttggtttaacatctgaaggtcttactagagccctttgacactggtggattttaaaccataatttcccaggttgaaaccaatgtccagtttggctaattcgtttgaccaatagatgagagtgtttctacccaggagttctcttttcaggtatcaaaaagtgggactcaaaactctttaaaaggagaaacaagctcttttaacaggaatagtcactagcataaaccctgtcttgttctgcttggtacctgcagaacaggtacccacatctgatcttactggtgcctgtgtacctattactcttattttttatttcatttcatttgtttatttatttatttatttatttagagacagtctcactctgtcgcccaggctggagtgcagtggcgcgatctcagctcactgcaacctctgcctcccgagttcaagcgattcttgtgcctcagtctccctagtagctgggactgtgggcaagtgccaccgtgcctggctaatttttgtatttttagtagtttcgccgtgttggccaggctgttctcgaactcctgacctcaggtagtttgccttccttggccttccaaagtgctgcgattacaggcgtgagccacagtaataggcctgtgtgcctattacacttaactacgtgttctttctaatcttgtgttttgaatttctgtactctgtctcctgtcaaatttattatgtttggaaagagaactcatttcctctctaagctctcccctcttgtgttctctcacacgttagcatcctccgcccagttgcttgagcgaggagcctcagaataatccttgactttttaccaatacagatctgttagcgtaacggcctgcttttataatcttttatttaatcattgccagtaagaagtctaaatttctgatcctgctttttcctgtgttggctccaacctttatttccagccacttaccaaaagactctgttattccttctgcatggcccatcatcttcttttaagacttaactcatatatcacctcctgtgacaccattcataaaaatgagtacagagtgtattctctgtacctttttatacttgactgaattaaatgttaactccatgttggagactgtcatttgtatttctagttccctgacctaaaaagtaattagatatgtcaacttatggtaaagttctcctgtcttacttaaaggtacatagcatttcactttgccattgtgtttagtgtgtttttcttttttcctcccaaggtagaaacaaataacttctggggtagaaagcattttcagctccctttaatagggaagacattcttgcaggtgattctgtaggttactgtggctgaggaatgtatgttcctgtattgcatccttcaatacatgacaaggtaggtacctagcaagtgtacatacgttgtaataaataacttagtttctgacttttttattttaatagataacaaattgctggaaaagtcagatcttcattcagtgttggcccagaaactacaggctgaaaagcatgacgtaccaaacaggcacgagataaggtattttgaaactaacttgtattatttatgtctcctctaaggaaatttatctcagttcagttgtcacttctctaatttaaaagcaaatcaagtactatttctgtgttccagtttttgtcagctcctttcaaataagaactaaaaccatgtaa

SEQ ID NO: 25721 - DNA, 2300 bp, Homo sapien
catctgtttgctgacagtgtctacatgttagcctccagcttggacttcttcttgaggttcagactcttaatactcagtttccatttgacagtactcagttttcacttgaatggccacaaacgaactctttaggtctcctccaaaacctgctcctcccacagtcttgcccatttcagtgggtgacacctaccttctaccagttgctcaggccaaaagccttgattcatccttgactcctatctgtcttcatgccccatagccaattcaaagtcaagtcctgttagcgctgtctttggaatggatctagaatcagaccgtatctcacctcactgctcccaccctggtctgagccgcactgtcccatgtttgcacttcacagtagcctgctggctggtcttcctgtttcggcccttaccccactgcaatctgctctccttttaaaacctaagtcattcagctgctcagagccctccagcagcttcccttcacgcctagtaaacctcacagccctcggaggtgcccacaaggctctgcatcatttccccacctcgtccttgaccgcacctcctctgtccccctgtgcctgggcttcagtcacccttcctccaaatacaccacctgctgtacacctctccaggctctgctgctgctgctccttctgcccagagggcccttccctcaagggtccacatggcttattcctcacttccttacagtctctagtcatgtgtcacgtaggagaaaccctcctcaattacgttaaaataggaccccctccctctgttccccttcttgtgcttgagttttctgcaagcacatgtgactgctgacctcacacgtgctctcagttgactgtcagctgtgtggaagcagagccctgcactcactgctgcgtcatcggcactcaggtccttgctgagccagtgggccctgttggtgcctgttactgggacttcattcaggaactttccaccctttattcctgatgtgcctgatggtcacagttgctttgcttttttccatgtgtttcatgtctcctcctttccactcatagtgcctgtaaccgcagctgctggagacacccgaatggtttattggctttgtgaacatgtttctggagttatggtttcattgcctaattggaaaggtttggagtctcatttttccccctccgttttttgcacattctcttcatctgcctggtttgccaatttagtcccggacatgatggcacatggaatgacaatcagctacaagaaatggcccaactgaggattaagcaccaagaggaactgactgaattacacaagaaacgtggggaggtaaagctagcccttttcctcatctgtcttctgccctctatgagagtcctgtggggagcgggggagctcagtcacttctcaccagaattggcagcagccttagccatatgtggcatcaaaagtcccctccataggaataaaagggtgaggaaaacagaatgaaaagaccaggcagattgaggcccatcaccagaagggcaatcctgtgagagcgctgccagttaccatgctccaaaatcagcatgagaggcaagagtggagaggctttaaagaacaaaaaagcctgctacctggtgcgctgaaggcctcactgatggtttcataaagcttttcagtacaaaccctgaaatttcagagacattcgtgagaaagaatcaagtcctaggctgtgttcgcctggatggtggtcttacggcaaagctccagttgggaaaatacagttcaccatcagtacagctgaattgattatcttttcagcagaaatgagtctccaaaaaggtagctgaagttgaggagtagacagctgtcctcagcaagcccctggcagtcacctggaacacttctcattccagccaagctgtccttcaacagggagtggcagggatagttcccctttgtgtccccataggcgcctcggctccttgctgtcacccagctcatttattctttcttaaaaataaatcgccacccactgtgtagtttccaaatgaggtcctaaaatttttatttatgaaagtattcttctttatctcccagttagctcaactggtgattgacctgaataaccaaatgcagcggaaggacagggagatgcagatgaatgaagcaaagtgagtagagaccccgcctccttggagcctggtcattgggtcccatgtcctttgttctgctgacctcttgtgagcagggccagtggcagtgagtggccacagtgcacttagcgagagtttgattttcagtgcatacacactctgggat

SEQ ID NO: 25722 - DNA, 2300 bp, Homo sapien
ggtttaaattcaactaggagtcattcaccaactaacgtcttaatttacaaagaaacaaaggttcccatatcatgcctttgctttagatatgtagggtacgtgtgtgtctgcactctcagatgtggaagattaatctcagttgtattttcccaagccacaaagtaaataaatagttgacctggaaatgagatttggtttcttcagaataacagcttataaaagtgtcatttgcataaccgggttgactgggataatttagacaggttgagcatcctgcccaagatcatacaggaaggggccgaggtaggatgcaaacacagggctgtaaaagcctgttattttattttgtattttattttattttgagatggagtttcactcttgtggcccaggctggagtgcaatggtgcaatctcagctcactgcaacctccgcctcccaggtttaagcgactctcctgcctcagcctcccaagtagctgggattacaggcatgcgccaccacgcccagctaattttgtatttttagtagagatggggtttctccatgttggtcaggctggtctcgaactcctgacttcaggtgatctgcccgccttggcctcccaaagtgctgaaattacaggcatgagccaccgagcccggcctaaggcctctccttaatctctatgcttccctaaggagtttctgggtcagaggacatacatctttgaaaggttttgataacttagcaaatgctagtgttttcttgtggtcccgggcctaagcacagttgcaagtacttaaaaccataaaattctattttcaacaggacattgtcaaaggctcagctcatatttgcagttcctgtctttgcagttctcctctcttccttgtatgggcacaggtgactctcgcaaacctagatccctgggaaagccaatcaagaaaataaagcacagccttgtcctttttctttcgacctgccttttattcccttctacatcctggccaagaatgtggtgcaataattacacatagtcctggaataaatagctaaggaaaataaatttactttgaccaggtttaacttgcttagtaacaggttcttaagtatatatttacctaatccagataattatttattgaaaaggaaaaatctttctgtcaagttcttatgaatccaaacagtaggtgatgaaatcttgggttattacatttaattatcttctccatgaaggttgcatctcagtaggaggtcattaagaccaaaataattacttgccctcctccaagtaggaaagacgtggcccagaaaaatgaggaagggggattccagaggtactttgcatccgctgggataaacagcaacaaagggagcatgtcctatgacttgattatgtcatttgaagtgtgatgggctctcctaatgtcagagacactatgtatttaagcataaaatgcgcagagtcaaaaatgcatagtgtttaaattttgcttttctattttttaaagtaatatttgaaactgggttaagttggctgttgatttcatggcccatttagccatcccttctttccctgaattctccctacactgttgttttatattccatagctgctgcccctaactaccctaggtacccctcagcccttgtgtcatgggaactgtgcttggtgagtactgcagcccttcaacagtgatgctgactgttgatggaatgccctactttggcactggttatgtggttatagactcaacagatcatattttattgcttcaagtgggaactgtgtttatacctaaaaggatcaaaagctcacttttaaatttattctcagttgaaattctggatttgatttgaacaggttaaatgtttattgtagtgttgttcagaacatggcagctcttcctttttctccaaagaatctttaacgcattgctgtcatagccaagtggtttaggatctaactagaaaatgacattagcatttgcggaaccgattaatcacagaactgttcaggagaatcaaagaatgtcttgcctttctttccagggatgatgacattgaggtcattgtggatgaaacttctgatcacacagaagagacctctcctgtgcgagccatcagcagagcagccacgtaagtaggcaggtttgggccagggaaaagacagcttgaggagcaatatgaaggcacatctgtggacatgacaaagaatgcagtcagatgcacccaaccccttaccccttttctgggacacccagcgtcgaacacaccacagaggtgtccagtctttctcagttcacctctgcttaatg

SEQ ID NO: 25723 - DNA, 2300 bp, Homo sapien
agcagttgtaagatgctgtcccagtttcagaggtttgaatgtgggataaggcagtctgagaactcatacaagcttccctcattgaagctgagaggggagtatatgtggtccgaagttttcgcttctgtgctaaagtggagttaaccccactgaaaatagaggaaggattggtttcaaaaatgttaacacaaaaaaaatctaaccctgaaccatgaggtctcatctttgggaactaaggtttggagtgcagtggcatgatctgggctccttgcagcctcgaccttctgggctcaagcagtcctctcacctcagcctcccctgtaacagctgagactataagtacccaccacacccagctaattcgaatttttttgtagagatgagggtctcactaatttccccaggctggtctcaaactcctgggctcaagcaatcctcccaccttggcttcccaaagtgctaggattaccagtgtgagccactttgccaacccttgcattttctaattagaaagaaaacatcagtgaataccttctgaacctctggtgttttacacatagaaaaatgttgatcatgcactgcatagaggtcaatgatgaatggtaaaaggtctgagtcctcagatcccctcccggcatcccagttatccccagctgcctctcctccatcgcacttcagaagtgctgcgatgggcagaagggcagctgacactccgtgatgtccctcattctgtgttcctccgtgagctcagggaagacactggttggcatccaacagcttagtcacaaagggatttgattgttgggagtgctggtatctgtggctatgatctgccttgttcaagctgagacctctgattgaaaatcccccaggggttttaattgtttacataaggagtcctgatgtttccttttgtaaattatgcctgtggtgaccttgtctagtctgactttaaatatggaactgactttcagcagcatggcgcaacatcgaggctttaaaaattctttaatttgatataattcagacatagaaaaattacaaaaacagtacagcaggtatctgtggtagagctgatttcaaattcaagattgaggatggggagcacgtgaagcttggtgctagtgatgttgaatttttgtttttaatgttatttttagtgggagttttatccttttggtcttgatacctcacctttggccaacactcaaagataggcttcctatgagatacatggcccctggataagactcagtgaatgaaattgttgcttcttgtcctgtttgggatgtgtgtgtgtgtgtgtgtgtgtgtgtgtgtgacaggatcttgctatcactcaggtggagtacaatggcactatcatagttcactgcaacctcaacctcccaggctcaagcaatcctcttgcctcagcttcccaagtagctgggaccccaggcgcatgccaccactccctgcaaatttttaaaaaaatttttttgtagagatgggggtttcactgtgttgcccaagctgttcttgaactcctgggctcaagcagtcctcacaccttggcctcccagtgtgctgggattgcaggcgtgagtcactgtgcctgacctgtttctttttcctttgctgtcttatcgctttgagtgttcctggccggatctcagggtggtctgacactctgactctggaggtaaggatgctgtggatactttgccagcataggcagggcctggcgccctgaggctcaccctggctgtgttctctctcctagcacacactcacgggacacagtgggaaagtgctgtctgctaagttcctgctggacaatgcgcggattgtctcaggaagtcacgaccggactctcaaactctgggatctacgcagcaaagtctgtgaggaaattcagtctctctgtctgtgtatatgcttagatgttagcgtggaggtgtgtgtttgcacgtcagagcctgcatttatgtaatatagtttgaatttcagatctggcttcatgtttagaggggcactgaggatagtgatagtttttcttgtttaaagcttcatttaagtgagtaactctgacaagtcagtggttagagggtggcagcattatgtaaacagccacgttggtgcctctgcttgattaatgatgtttgcatttctttcaggcataaagacagtgtttgcaggatccagttgcaatgatattgtctgcacagagcaatgtgtaatgagtggacattttgacaagaaaattcgtttctgggacattcggtatgatacccaagctcctgactggaggcacataa

SEQ ID NO: 25724 - DNA, 2300 bp, Homo sapien
gtgtggtggcatgtgcctgtagtcctagctactcgggaggcttaagtgggaggagcgcttgagcccaggagttcaaagctgcagtgagctatgattgcaccactgcactccagcctgggtgacagagcgagaccctgtctctaaaagaaaagaaaacaggctcagtactctggagtgaagtgggcaagggagagggtggtgagaaataaagtcagaggtaaaggggggccagagcatgccggacctggcaagcattgtccagacttaaatgggaagccattggaatgtttgggtggatgctgataccccaaacgtcagaacaggctttctgcatatacttgtttcattcccaagtcagtcccccatgtaagtgtgttagtggtcgcagagtcccctccatccattccctgagtgttcttgggagcaggcattgttctgggcactgtgaagacaaaagtgaaggaaacaaaatggcctaggccctgccctcatggagcctggactccagtgagggaagagagactgtagaataattcccaagcaagagtgaaatgtggccaggcacggtagctcatgcctataatcccagcacttcaggaggccaggagtttgacaccaacctggccaacatgacgaaaccccatctctattaaaaatacaaaaattagctgggcatgctggtgcacaactgtaatcccagctactcgggaggctgagacaggagaatcgcttgcacccaggaggtggaggctgcagtgagccgagatcgcgccactgcactccagcccaggcaacagagtgagactctatctcgaaagcaaaaaaaaaaaagagtgaaatgcaagcgtgcctccaatctggtcctggaggttggggatagctcccctgaggaagtgactcctggtcaaaaatctgaaaggccaagaagagtcaacaaagtggagagaggagaggcttgttccaggcagaaataatagtgggaaggaggaagcgtggcagacggcgtggaaggaaaggcaggcagaggttccagaggctgcaagctttttgcctgcattctaagagcaatgggtgattgtaagcgagggatgacagggctcagaaggtctctctgcctctgtgtggaaaagggcttggagggtagaaataaatgtggtcggctgggtgcggtgactcattcctggaatcccagcactttgggaggccgaggcaggtggatcacctgaggtcaggagttcgagaccagcctggccaacatagtaaaaccctgtctctactaaaaatacaaaattagctcagtgtggtggtaggcgcctgtagtcccagctactctggaggctgaggcaagagaatcacttgaacctgggaggcagaagtttcagcaagctgagactgcaccactgcacttcagcctgggaggcagaagtttcagcaagctgagactgcaccactgcacttcagcctgggagacagagcaagactccatctcaaaacaaaaaacaaaacaaaaaaaagaaaagaaatagatgtagtcagacagtggggaatcactccggtcctgagaagcaaaggcggtgctggggatgggaggatgcagacaggttccagagacactgaggggatcaacaggactcctgaagccatcaatcagtaggaccgggtggaggagagggacagatccagcttggcttgcataacaccaggttcatcttgaggttgacatttctccttgacctttttgtttagtccccacccgcaaggtcgcattagctgcctgctgagtttaatcaaatctcttcctgtcctggcaatgcccgggaatgaagagataatcagtctatttccagaatccaaagaggtttagaagaaaaagtagctttcatttagctgttggccctcccaccaaccttccccaagtcagctgggtgactcatacatctgtgagaccctccgtatggagaccggggcggggggtgttgcttaatgcttagaactgctgaaactaccagttcactgtctcagcactaatccaactctgctccttaagtgggatttggcttttagacattgagacctggatgctgggcatcctcgctagatcccctacaaattccccacatacgtaggccaggagcctcagcggtgccccttcaggctcatctggcaagacggtaccagcttgctcagaacaggggctggctattcatcatctcagagcatagagaccctctccttgccacccggcccttcccacctggttggtgacaaatcacaaggtatgtgaccaccacaggccaaaa

SEQ ID NO: 25725 - DNA, 2300 bp, Homo sapien
tgacctctccattccaatcccaaaccctgctcaggtcacccggctcccccgcggaatgaaggaatgaactgtttcttcccctgtgcgtccccgcccctcctccgccttgcacactcctccagggttttgcctctgtgtatcactccacatgtagttaattgatagaaaagtcccaaccctgtggggaggctggagccctttgtgcctgcatgagttccctagggctgccagagcactgcaccataggccgggcggcttccaccacaggaattgacgctctcggttctggtggctggaagtgcgagatcacggtgtcggcagggggagttccatcggaggcctttctccttggcttgtagatgccatcttctccctgtgtcttcacatgggctgccctctgtgtgtgtctgtgtcctcatctcctctttttatgaggacgccagtcataccggattagggatcacccctgtgacctcattttaacttcattacctttttaaaaaccttaactccaaatgcagtcacatgctgaggtactgggggttaggacttcaacatatgaattacgggaggacacagttcagcatgcgactgtgctgcagaactttctggggggacgggggaagtgttttatatttgtgctatccagcgtggcagctgctaagccacatgcggctactgagtccctgaaatgtggctcctgtggctgaggaacggaatgctgaattctaactaattgaaatttaagtagccacatgtggctagtggctatagtaccctggggcaccatggggccttcggcctgtcccggactgttcctgccttaggccttgtcctcctctgtcctggccgtgagcccatgcccctggccgtgtccccatgccagatgccactctgcagccccaggtcactgcccagggcggcgcggccagcgaatgcctattggcaggcgaggtctctagcggcagccctttgacagggagagggcacacctgggcagtcccttactgatttgcccctcagagcagggcagacagatggacagcatttcctctgggtggcaccaagccctgctccacctggatggcaccaaaaacttagctgatctcatctccagcttcgcttcctcctcttctgcccagagcagcgctggaccccacccgcccaccatccagcagcccccctgggaaacatgggactcgttctggtcacctctgtctccctccagtcgctggtcactccccacctggatctcagtccacgtctctatctctcagcccctcggtaatccagggcgtccacctgccctgataacttcaaagcccggatcacaggccccagcgtggtgacccagccccgcccagggttaaatccctcaagggcttcctgctgccttccatccccttatctggtttccaaagcccgcttcgacctgcccgccccgaggctcatatcttaatgccattttccttgctctaagcaccagcttccctttcttcccccgtcttcgcccaacactcgttctttcttgcctccaggcctttgcacaaatctggtctctgcctagaacatggttccctctctagtcacaactcctgctcacattttccatctctccttaagaaccgttttctccaggaagccttcccagatggagcggtgcatcccagctctggcgtcccgaggcccgtcccagtaccggggtctctttccagcacgcgcgcgcgcattcgagctcgccccaaactcggccacacaaggctgggcaggacagacacagccccagcctgcctgaggttacctacattctgatgcggaagagtagagatgttttaagaagtgaatatagaaacaagaacacaaacggcgttccagaaataacacacagaagccacggcccggagaggtgggcggggggcccgggacgcttcaggtgggggcggggaggggccgcgcggcgccgtctgcagctgcgcgcatggccggcagggggcgcggcggggagaggcgggaggccgcccccaccgcccccggcccggcccgccctcggccccgcccctcccgccggccccgccccgcccccgcccgcggtgcgcgcgctggcccggcagcatggcggcggcggcgggcgcccctccgccgggtcccccgcaaccgcctccgccgccgccgcccgaggagtcgtccgacagcgagcccgaggcggagcccggctccccacagaagctcatccgcaaggtgtccacgtcgggtcagatccgacagaaggtgagcccgcggcgcggcggcccgggcgcgcg

SEQ ID NO: 25726 - DNA, 2300 bp, Homo sapien
ttttatgtatgagatgtgtagcaggagatgcaagaaaaaatactccagcatctgtcctttaaagataacttataacttttctgggttttgggttgttggttttgtcttttttttttttcccatttagggaagagatggaagtgattgctttccccacaaaggtaaggaagatgaatggggggccaggagagacgtcttcacagtgaggcctttgaggtcaacagagaaagggtctcgtggtatatgtttcaggcttccatggatggcattgttctgtgcagatgtatttgaaatgagtttcatccatgtgtacttggatgtgaaaaggatgtttggaaacaaataccatttcccagtccttcacactgaagactggtttatatcctcgctaccagaatcggggtgggactttctgtctgccttggatcacccttggtctgttttggacgggacctcagatgctaactgtatgctggggatccccgctgtctctaggggagggggtgggggtggggaggtcacttctggcaaacaagcgtcatcagaatgcttgatcgttggataatgttgggctcctctctttttccttcctggcactctttaattactggggagagggtgggtgccttcttcagaagtgtgaggtgaatgtataagccaagaatgagtcagtagattcttcagcagctctgccctgcgctgatcctctagagttggaaagggctgctgttgtgccactgggtcagtgccaaaagcagagttcaccatgattggcacatgctggtgagcaagaagctcttggaagtggtcgtgagtgcagccagttccccccaacccaggaagggcacagtgaggatggctggttgcgggataaggagaagagacccctaggcagtttgcattggcctgtgctgtccgggtgtggtcctggtgtccgtccacatgttgatggcgtgtcgggctgggggctttctgcagccttccctgttccactgtctctcctgttgtgaatgccggtggatggaacaggcagcgcagtgttctgcgcttgcattctggcataggtgggggacatgagcctcctgtgtcttgcttttgctggttttatcttagggagttttaagtgtttgtggatacttaagaactttgtacatgcactgtttgaaacatttacgtaaagtgcagagctatatgagattaggtagttaagcaaaagcttctctgaaccaatgtgcttgtctttgaacagaatttttaggaagcctccctccatttccatgctgaggctccttgtggactgggcatttccgtgaggtgggatgtaacatagtgtgcgaacgccgagagccaggttcttgtcttcatgcttgtcgtttattctttttgattgtgttaatggctccgagtacgtcaaaacatctcatgaccaagtagttagttacgcatttgatgttttggtggcatgggctgcgtaaggcgggagagcagctccgggagaagtagagcccccttcattcttggctttaattgagccaagatgagtggaccgtataatccatttctggattctcgtaagagaacgtcttgtgttggggtgaactcatcagcttttcgggttgagaggagttttagtgtctgtggccgaggcactttcctctcatggtgtgtgcagatgcacacgccaggcctgtgagtggtgggttgggctgagggcgcgggcctggagcttctgagccccagagccgctgacgtagacagctttggcagcagcatcctgagaaatggcagggggccagagaacacagagacagggccaagaatagctgaaaaataccaaatgctgaagttggagaatgcactggccccgcgtcccagtgtcctcccagctgctgtgtactgtggccctgtgagcctcagtgtcccttcttcatgtctgccagtgcgtccagggcacaccctgggcctcttgacacccccacccacacaggcacacattgccccttagaggacaggattggtgcaaccccccatgcccccggcagcgtgctgggcctgtgcataggtcaaggtctgttgagagtgtgagaaatattttctgttagagacacgaatatgtttcagccgcaacaggctgcgtttcagccggaagagtgaaagggcaccttgaaaacgcaagtttatgaatatgtttctgtactttcagaccatcatcaaagaggggatgctgaccaaacagaacaattcattccagcgatcaaaaaggagatactttaagcttcgagggcgaacgctttactatg

SEQ ID NO: 25727 - DNA, 2300 bp, Homo sapien
acaaaaaattagccgggcgtggttgctcacgcctgtaatcccagcactttggaaggccaaggtgggcagatcatgaggtcaggagatcgtgaccatcctggctaacacagtgaaacctcgtctctactaaaaatacaaaaaattagctgggtgtggtggcgggcgcctgtagtcccagctactcgggaggctgaggcaggagaatggcatgaacccaagaggcggagtttgcagtgagcggagattgcgccactgcacaccagcctgggggacagagtgaggctccgtctcaaaaaaacaaaacaaaacaaaacaaaaattgaaaactattcctctgacaagggattataaccagaataaatcgagagctcaaataattcaaaaggggaaaaatctaatcatccagttaaaaaataggaaaagtagacatttctcaaaagaagacatacatatggcaagtaggtatatgaaaaagtgctcaatatcattgatcatcagagaaatgcaaataaaaattacaatgagataatgtcttaccccagttacaatgacttttatccaaaagacaggcaataacaaatgctggcgaggatgtggagaaaagggaaccgtacactgctggtaggattgtaaattagcacagccaccatggagaacagtttggaggttcctcaaaaaagtcaaaatacaattaccgtgtgatccagcaatcccactgctaggtatataccaaagagaaaggaaatcagtgtatcgaagagatgtctgcactcatgtgattatagcagcactattcacaatagccaagatttggaagcaacctaagtgttcatcaacagacacatggataaagaaaatgtacatatacacatggagtactatttagccatgaaaaagaatgagatcctgtcatttgccacaacatggatggaacaggaggacccttaatgttaagtgaagtaagccaagcacagaaagacaaacttcacatgttcttatttgtgggagctaataaaaaaaaaaagaaaacagttgaactaatggagataggcagtagattgatggttaccagaggctgggaagggtagtggggctggggggatggttaataggtacaaaaatgtagttagaataaacgagatctagtatttgatagcacaacggggtgacaacagttaataatttgctgtacatttaaaaataactcagagtatacttggattgtttataacacagagaaaggataaatccttgaggcaatggataccccatttactctgtgattattctgtgcctgtattagagtgtctcatatgccccataaatacatatacctaccatgtacccacaaaaaaaattaaaaagaacgttgatgtatttcttttgtgaaatgcaagttcatagccttttttatatcaggaagattttttttctactgattgataagaaccctttatatattatggatatcattttcatttgttgattattaccaggtcacagctttatttccagtcaagttgttcaggtcctgcatagtctgatattgaggttttctacaagaacatttatatgtgatacatgctcatggtattccagacttacagctgagcagacttccctcaactgttcaaatgctggccatcactgtgggctccctgaagcagtagcaactgtgtcttccactgttcggaaaacaacagttgttacttctttttttatttccttagggtttactactgtgtctaagtagcaagcaattataaatgtccacttaaattgattgctgatgaatatataaaaactaaatttcactgtctttttggtttgagatcattcttatttttaatttttagtgatccttgataaccatttttgttttcggttcagtgtgaatacctgaatgaaatagtaatttttatgtctgtgtgaggtcggttttaagaaagcgttcatagctatcagcacttgccttttgttcatggatctgttgaacctgtttctttctctaggtcataactccatgcaggaagctcatcttgtgtgctgataacagaaaagaaatggaagattggattgcagcattaaagactgtgcagaacagggagcactttgaggttaaaaaagaaaatacccttctccaaatgcctcctgttgcctccctcaccccagtgtctgctgtctgagtgtctcccacgtgcggacccacagtctggagctcacgttcttagcatgttctttatacaattaaagcttattgcttgtcctctcagcagacctgtcctttataaaccttcctc

SEQ ID NO: 25728 - DNA, 2300 bp, Homo sapien
tctgggaagaatgccttggctgagttcacaacgagcatttcctggctgccctggacgtggaaccttgggagcgtccctagtgcgtgcctctgtttggttgcagattgcaatgccccaccagtggttggaaggaaacctacctgtgagcgccaagtgcactgtgtgcgacaagacctgtggcagtgtgctgcgcctgcaggactggcgctgcctctggtgcaaggccatggtgagtgtgggccctgcgcccgggctggaggggagggcttgctccctaccgtgcccatgcgggccttgcggctccgcatgatctgctggatcctggtaaattaatcccagaggcccctccggctgagagtgggtttttgaactgttgggtcattctccttcttagctatgttttggggtatttcttccttttgcatttattcctgtctttagacatatgcagatgtgtattgttatgacagatgtcaccctgcatcatgcggcactgtagccgggttgtgaggggtcacctgggacaattgagctggccgcctctgtggtgtggaagcaggaaagctgtagaggccatttggagcggcgttggctctgggcagtgttgacagtgagcacagccatgtggaaggggtgcagcccagtggcctcctgccaggtcctgggtctcatcgttgctctgggtggtgagatgtgcttccagggagagactcagggagcctccatgtacttgcttctgggttggtcattgtgaagtggctgctgcagtcacttgcctagcacatctggctgccaggaggaagccaagacacaggggacacatagaggcacatggccccaggagccctcaccctcgtcctgaaagtttgaggtagctgtggtcgaagggccagaaggttgggtacaggactgtagctcacacggtgtgaagcatgactggctcctgccgggtatttccgtgttatgccttctcaagtgcaaagccagggcccagggcccccgatgatagcaggccggcccagggcccctgatggtagcaggccagcccagctctgaaatcacctgcctcccccgaggccagctcatcagctacagggcaggaggatttctggtgtgtgtgaaggatgccagtgacccttggtgacgcggggactcttgtttcaggttcacacatcgtgtaaagaatccttgctgaccaagtgcccacttggcctgtgcaaagtgtcagtcatcccacccacggctctcaacagcatcgactccgatggtgggtaccacacatgcttatccttctcatgcacgcccacacgcttccttctccacgcactttctcttctccagctctggagttggttatcttggtgagatgtcagcaagaggtcaggcacagctgttgggggtgctggaggagttgcacagagcggcacacggcgccctgatgctgcggcattgcccttagatgggccagagacccaagcctggcacttgacgtggaggtgatgctgttgagtggcacccaggcttagacaggcctgagacccgagcctggcacttgacgtggaggtgatgctgttgagtgcaacccaggtctggggccttctccgtcatgagccattgaagctgtgccccatctctgcctagcacatgctggcacactggcttgcagctgctctcatgtctggctgggacatggtggcacctgttgacaagtactggtggaaagggggatgtggggtacatggctcagaggagatcaagaagagaagacagcagaaaggtggcatttggacagcttgtgaatgtggaggtcagatggatggggctcccggcctcacacatggagaccggctgtggggaactgttcactgacctcctcctgacttacaggtgtgcatgtgtcaggtgtgtgtcctttgggggggtctgctgctgctgattccatcagtggtgccctcagcgtcttccgtggcctatatattttcttctgttcgttcttgcgtccagggttctggaaggccagctgtcctccttcttgcacaagcccactgttggtcttcgtcaattcaaaaagtggggacaaccagggtgtgaagttcctcagaagattcaaacagctactaaaccccgcccaggtcttcgacctcatgaacggaggcccacacctcgggtaggaagcttgtaaaatatatctttcttggagttttaaaaattgtgtagatagtgtgtgcttgttaaaaaaaaaaagttcaaagacacaaagctttaaataggaaagaaaagttgaactgcttccttcccaa

SEQ ID NO: 25729 - DNA, 2300 bp, Homo sapien
gtaagcctcattttgtacatttctctccctggaaaatcttggattttgacgtcagatttctcgtggaagccctcccatttgctgtgggtcatcctgtgcccaagcttgtgactgaacggtcgctgggctgagccacgatccctgtcgtcctgctgggcctgccctccacatcagccctccaggtggtacctgggccgtgttcagatgcgtattgtgaaaggctgcccttccatttggcctgacatctgcccgtgcttctcttcctctctagtatccgagaaatagctcagtctcaccgggacatggagcaggaactggcccacgccgtcaatgccagctccaagtccatggaccgtgtgtatggcaagcccagaaccacagaggtagctattctggccttttcagtcctggcttcttctcagtgtctgccgccctcggccctccccgtgcgtgttcattcccccgcctccccggtgcatgttcggccctcccagtgcttgttccctgcccctaaccgtgcatgttcggccccccgcccccatgcatatttgcctggtttcttctaggggctcaactgcagcttcgtcctggaaatggtgaataacttcagagctctgcgcagtgagacggagctgctgctgtctgggaagatggccctggtaagctggtgccccagggacagcagggctcgggctgtgtgtgaaacgactgctgtcgccaggttgctgggcacacagggcagcacactttagtccagagttcccggtcttaaggaatgggccgcagaggtcatttggtttgttgtgcggctggtgcccacccctgctggcaacccctcagtcaggttgtctcaagcatgcgagaagcgcttgcagcggaaacacccttgtcgtcgtggacagaagatgcttttctgccttagaagcctgtagtgcagagtcctgctcctgccgagagctggccacactctcaggcaccttccatgctcagccctgcaaaaccggctgatatggcagctgtggggctgttactgaatcacaggggctagaacagggagaggcctgagagactgactggccagccttctggttttaaagatgaggaggaaggggcttgataaagattgggcaactggagaaccgccccaggtgtggtttcccagccctccactccgcacgccactcacctcctcactgcacgcgtctcctcactgcacgcatcacctcactccacacatcacctcactccacacatctcctcactgcacgcatctcactccacacatcacctcactccacacatctcctcactccacacatctcctcactccacgcatctcctcactccacgcatctcctcactccacgcatctcctcactccacgcatgtcctcactgcacgcatgtcctcactgcacgcatgtcctcactgcacgcatgtcctcactccacgcatctcctcactccacgcatctcctcactccacgcatctcctcactccacgcatctcctcactccacgcatctcctcactccacgcatctcctcactccacgcatctcctcactccacgcatgtcctcactgcacgcatctcctcactccacgcatcacctcactccacgcatcacctcactccacagaaatcctcactctacgcatctccttatcccatgcctcccctcgtcccacgtcccgtggtcacacgcgtgtcctcactgcacacctcctgctgcctcctgcaaggttcgactgctgactttgcttcccacagcatttccactgcttgacacaggtgaatggctccgaccccatttctgacagagggacacaagcaggtcagttgtcagccttgctctatgtgaattcatcgttgactgatggacagttttattctctcaccagcactacttagaaagtgaggttctgggtttggttccttttctggtgctctgggacttcgtttctggaaagtgagctccctgatcagagcagagcagagccctggagcggacctcacccccctgggcctcgcgctgatcagcagtgcacactctccatttctctctccctccctccgcctggagcagcagctggatccgcctcagaaggagcagctggggagtgctcttgccgagatggaccgacagctcaggaggctggcagacaccccgtggctctgccagtccgcagagcccggcgacgaagaggtatgtggctcatagggctgtgcctgggtctcccggacatggtggctctcgcctgaagtgcctgtgttccttgtgacccgtgtggctctggga

SEQ ID NO: 25730 - DNA, 2300 bp, Homo sapien
aatattttacaagtccttttgtaaatatcatgaactattaagatttgctctacctattatgatatgagtatccttcttgtggtctgcttgttatatgagaaagttatctttcaaccatgtctaacatgtatttaattttagtgtttttataaaaacacattcttaatacaagttgtacaaccagaaatagtttcctggaggggaattccaggatcaaatggtgtggacattttaaacctcttaaaatagttaaatatttcttcaggcaagttgttccagaatatgagtatttattttacctcacccacaaaccagcattgactatttcatcgtctaggtatttcctaaattgataaatgaaagatgattatcttgttctcatattctccagtgctttgatgactaataagttcaggcatttttgcaaactgtattttgtgagtgcatgattgagttatttcgtgtattttgactgcttctgtaatgaagtctaaaggaaaagctctcttggaatttgtgtgagctctttatgattttgaccctttgtcacaatggttgtaagctgtgtcaggttttgataggcacagtgccttttgcccttttgaagagcagctgtgtgcctcctcaggccccttccatgggcttttctgtccttgaccaacttccagggcactcctgctctcaaggaggcctctagtccctcctgtttctctccagcagcctctgtcccctccttggcaacttcagcatctgtgccgatgccctttctgtcctctggccgcactgtgctgggctccaggccttggcctcactccctggccagcagccccctcccccatggggacatggggctgtgcagcctctgctcttgcactctgcactcccctgattccatgggcccacatcttcccgtgaactctctttcttccagtcatttcatttctcattgcgtgacctcttttgatggtaaaaacacttaatagaagtacatctaaaaatcattcattgtctcagcatcctaagaaccagtcttcatttccccttgctgccttccagttcttatctatagcttttcctccatggcctgtgctgacctctgcacgtccctgttcctcctgccttgctgagtgttgttctttctgctcctcctgctaaggtttcccatctcccacagctgcagccttgtgtctcacccgccctgtgtctctcttcccaattccaaccctcaggttcttctccctggctacctcatggcagctcacatttacagcccccagagtcaagggcataactgcctacctcgagcccgctctcctcctgccagctgccgggctatcaagccaggcctctctcaccctgtccctctctgccacatcgtacctgctcaggccgccacctctttccttttctcccgcactgaggaagttccctaccacgtctgggggggctctgctgtgtaccgagaatgggatcttcacttccgctcttcattccaagattaaaggaaattgaaatgcggaataagagtttgccactagcatccagcatttagggaaaaatctctccttataaaaaccagaaaagctggaggagaagctttgcccattatgcctcaagttaccacgtggttttgtttgtttgtttggatctggcgcttgacggttttctggtacagcccccaggacgtgctgctgaggacacaggtgcgcatccctggtgagaggacctatgcccctgccctggacctggtgtggaacgcggcccagggtgggactgccggctccctgaggcagagagttgccgatttctatcgtcttcccgtggagaagattgaaattgccaaatactttcccgaaaagttcgagtggcttccgatatctagctgggtaaagttgtggggctgtctcagagaaattggggcttaccggcatagcaatgaggttatgcaatttttcacagtgatagagaagttagtgagaacttgaggttgagttttgcttatttaagatgtttgattttcccatagaaccaacaaataaccaagaggaaaaagaaaaaaaaacaagattatttgcaaggggcaccgtattacttgaaagacggagatactattggtgttaaggtaagttgtttaacagcaaatttaccactttgagaagacacgagggtcacatgattttatagagacgttttattgaatcttcaagacacagattatcccattttatacaaattgtttcagagaatggataaaaaagagggaaaactggacaactgactttacaaggccactgaaacct

SEQ ID NO: 25731 - DNA, 2300 bp, Homo sapien
ctttccattgcacttaggttaattccttaacctagcctacaagaacctgaataatttgacccctgcttaactgtaaccttgtgatctgcttttctgcgtactcacaactcacttcccatgctgacttttctgcgtttctcagtgcacaagctctctttaacccccaagacttcttagtgctcagtctctctttcaagtctcttccctttgcttttaacttcagctgtttatttggtcttatatgagatgttccttctcctttcatccctgaccacacagtcccagttaatcttgctgatgtactctcctaacaccctgtacttttccttcatagcatttatcactgtagctgcccttttatttgtgtttttaatatccacctcccccattagacaaggttctgtgaggactgagtttacactgctttgcttaccactgtatttccagtttctagcacagtgcctggcacgtagccaatacacagtaagtacctgttcagtgaaaaccaacagattttaaagagacagtattttaaaagcactttttaagttggggaactctttaagtaaattgtttccgtcgacaagagatttatgtgagaattgtatgctagcctcatattactgtaatacaagatattgaactcaggaatctcagaaagggattctgctgtggtctaataaagttagaacttctaaggctcagactattgttgtctatacagaacactcaaccttcccccacccctccaatttatgtcctactttttaagaattctgtttgaactgaaaacttggtatgccccttccaagcaccaggggatcttgaggaaatatattcttccaaagcaagaatctgtatcctcaaacatagcacatgctggccgatttaataagcataaaatcacccaacatattttaaatataggcagtctgcttgtactgctctgacatgcacgaatttcattactaccatttagttatataacatcaatcccccagcaagatggttaaaatttcagcaaccatggtatatggtatattaactgtaactgaataaagtacacacttgactgccagctcttcagggcacaattcatcacataaataacacatgtgcaccacaagcagtaaccattgacttcatttctttcaagtctggtggtttgtcactgcatgtacacttcattacacagacagcaaagcatgtagttgtgttgtagtgctaaacccaccatgacattttacaagaatacataatcaaaagagggaattgaccaacagagaagaaagtacacaaagaaacaaaagtatatggagttatagaagcagcagctacctctgggaatgttgaccctgcagtcactcaagagactctagatattggaagctgatccaaacttagaaaggagtatgacagtttgccacaggacaggaaaaatgtcactctatattataagctatgcaatgagaagaaaccaagccctgcttaaacgactctttatatgtaatttacaaagacagaaaacattttaattctcaaagattctagtattttaaattatagtataaatattggttttactgttttttcctttcccaatacatgtataatattaataacgaagagggttttaaatgtttcaacaaaaatttttaagtgtcatggaacgattgtaatttttccattgattattaatattgttttgcacagtttgaccaggtacttttagtcttgcactactgcacaaaacaaagactgcctgtacttattttgggggttttttctttggttgttggggggtttttggtttgtttttgtttttagctttctgtagttttctgctaattaacacaatagagcatctctcttttgttttctgtgtttgatgctgtaaccagcttccttttattttgataataggatgaaggttattaattcctagctctctaagaaaaataatattccttttatatatagctgacaacagctgtttgagacctattgatagaaatgggaagcttctttgtccaggtaaatctttttgataactttcaaaaggtggcttatactcgtctgtctttcttgataaatagtggcctccaatacctaatatttaaaaattaccttttggaaactgatttataggacatattttcttccaggtatcttacctttatattgcagaaatccttaaccagaaacaaacacttctgttttctaaatgaaacaccattctttctgattatccgattctcattttactcacgggtttgatctagttatattttttccagctt

SEQ ID NO: 25732 - DNA, 2300 bp, Homo sapien
actggtacaaattgactgtattagtctgttttcatgctgctgataaagacatgcctgagactggagaatttacaaaagaaaggagtttaattgacttagagttccacatggctggggaggcctcacaatcatggcagaaggcaaggaggagcaagtcacatcttaatggatggcagcaggcaaagaaagagagcttgtgcaggaaaacttttatttttaaaaccaccagatctcgtgagacttactcaccgtcatgagaacagcatgggaaagacccgtccccatgattcaactacttccctccaggttcctcccacgccacgtgggaattgtgggagttccaattcaagatgagctttgggtggggacacagccaaaccatatcattattgaatttgatttgctaaaatattgttttacatttttgtatctaaggtcatgagggtctgtagtttttctatattgtcacatctttatcttgttttggtattgtggtaatgttggtctcacagaatgaatcaggatatttcgcatgcctctgtttttttttttttccatctgaattatattttattttatttttttattttattttttattattgttattatactttaagttttagggtacatgtgcacattgtgcaggttagttacatatgtatacatgtgccatgctggtgcgctgcacccaccaactcgtcatctagcattaggtatacctcccaatgctatccctcccccctccccccaccccacaactgtccccagagtgtgatgttccccttcctgtgtccatgtattctcattgttcaattcccacctacaagtgagaatatgcggtgtttggttttttgttcttgcaatagtttactgagaatgatgatttccaatttcatccatgtccctacaaaggacatgaactcatcattttttatggctgcatagtattccatggtgtatatgtgccacattttcttaatccagtctatcattgttggacatttgggttggttccaagtctttgctattgtgaataatgccacaataaacatacgtgtgcatgtgtctttatagcagcatgatttatagtcctttgggtatatacccagtaatgggatggttgggtcaaatggtatttctagttctagatccctgaggaatcgccacactgacttccacaatggttgaactacagtcccaccaacagtgtaaaagtgttcctatttctccacatcctctccagcacctgttgtttcctgactttttaatgattgccattctaactggtgtgaggtggtatctcattgtggttttgatttgcatttctctgatggccagtgatgatgagcattttttcatgtgttttttggctgcataaatgtcttcttttgagaagtgtctgttcatgtccttcgcccactttttgatggggttgtttgtttttttcttgtaaatttgtttgagttcattgtagattctggatattagcccttttgtcagatgagtaggttgcgaaaattttctcccattttgtaggttgcctgttcactctgatggtagtttcttttgctgtgcagaagctctttagtttaattagatcccatttgtcaattttgtctttggttgccattgcttttggtgttttagacatgaagtccttacccatgcgtatgtcctgaatggtaatgcctaggttttcttctagggtttttatggttttaggtctaacgtttaagtctttaatccatcttgaattgatttttgtataaggtgtaaggaagggatccagtttcagctttctacatatggctagccagttttcccagcaccatttattaaatagggaatcctttccccattgcttgtttttctcaggtttgtcaaagatcagatagttgtagatatgtggcattatttgtgagggctctgttctgttgcattgatctatatctctgttttggtaccagtaccatgctgttttggttactgtacccttgtagtatagtttgaagtcaggtagtgtgatgcctccagctttgttcttttggcttaggattgacttggcgatgcgggctcttttttggttccatatgaactttattttctcttggcccagaagagcttggtttgtttgaagataaggataaacccgatgcaaaggtattacatctatgatttactggggtgttttagcgtattcagaaaattttttttaaagaaggaattaagtggcttgttcacaaagcaataattttattaattatcaaatatgctctttatttccagaaagtgacttgg

SEQ ID NO: 25733 - DNA, 2300 bp, Homo sapien
tcagcgaactaagaatcaaaataaagaatttccacagtggatgttgagaaatcgtggaagcttctttagcagagaggtttgagctcaaagtgcaccttagatggatagtgcatcttatagtgacgtgcaggaaggggtgtgtaaaacgggagtccactgaaaaggctatcatcctaatgcaggtgagatttcatggggatctgataggaggagaggaagctatggaatgaaaggattgtccagacaatactttgacatgccattagtttgattcacagacgaaagacaaagatataagattatataaatataatcttatatctttataaatgtgaccactcattcattcatatttataagattatataactataatcttatataaggttatataactataatcttatataaggttatataactataatcttatataaggttatataactataatcttatataaggttatataactataatcttatataaggttatataactataatcttatataaggttatataactataatcttatataaggttatataactataatcttatataaggttatataactataatcttatataaggttatataactataatcttatataaggttatataactataatcttatataaggttatataactataatcttatataaggttatataactataatcttatataaggttatataactataatcttatataaggttatataactataatcttatataaggttatataactataatcttatataaggttatataactataatcttatataaggttatataactataatcttatataaggttatataactataatcttatataaggttatataactataatcttatataaggttatataactataatcttatataaggttatataactataatcttatataaggttatataactataatcttatataaggttatataactataatcttatataaggttatataactataatcttatataaggttatataactataatcttatataaggttatataactataatcttatataaggttatataactaatcttatataaggttatataactataatcttatataaggttatataactataatcttatataaggttatataactataatcttatataaggttatatagctataatcttatataaggttatatagctataatcttatataaggttatatagctataatcttatataaggttatatagctataatcttatataaggttatatagctataatcttatataaggttatatagctataatcttatataaggttatatagctataatcttatataaggttatatagctataatcttatataaggttatatagctataatcttatataaggttatatagctataatcttatataaggttatatagctataatcttatataaggttatatagctataatcttatataaggttatatagctataatcttatataaggttatatagctataatcttatataaggttatatagctataatatagctatactcttatataagatcatatagctatactcttatataagatcatatagctatactcttatataagatcatatagctataatcttatataagatcatatagctataatcttatataagatcatatagctataatcttatataagatcatatagctataatcttatataagatcatatagctataatcttatataagatcatatagctataatcttatataaggatcatatagctataatcttatataagatcatatagctataatcttatataagatcatatagctataatcttatataagatcatatagctataatcttataaatgtgaacgaatgagtggtccgctggccgagtggacccgcgaactcaccagcggacttgtaagcgagctcaccttgcccgctcccgctcccgctccagttcccaaactcttggagcagaagagttacatttcccataaggccccgtgcgaggggccggcgctccagcggggcatcctgggaagcatagtccacgatccataaatcactttctggagacccgccctcgccaacatggcggcgcccagttggggcgggttcgttcgcttcgcgttttggccagggcgggggtctgggctttaggcagtaagtgcggctggcgcccggggatcctgggagggacgtgggaagcgtagggacagtgttggtggcccagtctgaggagggcgaggcgagaggctgcccaggcctgcctgaggacgcggcg

SEQ ID NO: 25734 - DNA, 2300 bp, Homo sapien
tataaggttatatagctataatcttatataaggttatatagctataatcttatataaggttatatagctataatcttatataaggttatatagctataatcttatataaggttatatagctataatcttatataaggttatatagctataatcttatataaggttatatagctataatcttatataaggttatatagctataatcttatataaggttatatagctataatcttatataaggttatatagctataatcttatataaggttatatagctataatcttatataaggttatatagctataatcttatataaggttatatagctataatatagctatactcttatataagatcatatagctatactcttatataagatcatatagctatactcttatataagatcatatagctataatcttatataagatcatatagctataatcttatataagatcatatagctataatcttatataagatcatatagctataatcttatataagatcatatagctataatcttatataagatcatatagctataatcttatataaggatcatatagctataatcttatataagatcatatagctataatcttatataagatcatatagctataatcttatataagatcatatagctataatcttataaatgtgaacgaatgagtggtccgctggccgagtggacccgcgaactcaccagcggacttgtaagcgagctcaccttgcccgctcccgctcccgctccagttcccaaactcttggagcagaagagttacatttcccataaggccccgtgcgaggggccggcgctccagcggggcatcctgggaagcatagtccacgatccataaatcactttctggagacccgccctcgccaacatggcggcgcccagttggggcgggttcgttcgcttcgcgttttggccagggcgggggtctgggctttaggcagtaagtgcggctggcgcccggggatcctgggagggacgtgggaagcgtagggacagtgttggtggcccagtctgaggagggcgaggcgagaggctgcccaggcctgcctgaggacgcggcgctctcctggagtcggggcagtggtttcgggccacggggacctctgcctttttgcgcccctgggcctgtggtggcttggagggcctcggccggccgtaggagttgggaattcaggaatgcagacaacgagctcgaggctagactctcgagttgtgtttttttagttttcttctgaggaaaagaaaaataattgcatttcagcgcttcctgtcatttggtacctatgctaggcgctttacgtttctcatctccaagtgaccctccgccacactcgatgtgaaaccttggggaagtcacctaggcccccagggctaacgatgggattagtggatacatactggaaggcctttaggcttgataattttagtggcagtcttccccgccctccgctccccttcccccctccctccccagtgaactgacttccggcccaacagcttcgggactgtactaaagtgctctaaaaaaagttaacttgatctgtttaatttaaatgtcataatctggtatatagtactgaagggtgtgacaagcagagattttagagagttgattctcagaatttagggttggctttgccgtcccagcagtggattagttgtggcaacaggttttcttttttaaaaaaattagtgatgtgaacgtgcctttttaaaaacagctgttacttattgtgggccaaaccctgtacactaactgcccttctttcgttatgtcattggatagtttaaatgacccgaagagacagatggtatcctattttacacataagaaaacagattaacatatccagggtcacacaggtagttagggtcctgatagggatgaaaaaaatctagatcttgctgcctccaaaacccaactactgtacatagaaacagtagtcctgtgttctaagaaacaacagaatcgactcccaagtgtaaggtagggggatttggggaaaatttattttaaaaataaaagcatttatatgtcactttttttaagggtagtatttagtttcacaatgtttggggacctgtttgaagaggagtattccactgtgtctaataatcagtatggaaaagggaagaaattaaagactaaagctttggagccacctgctcctagagaattcaccaatttaagcggaatcagaaatcagggtggaacctgttacctcaattcccttcttcagactcttcatttcacacctgaattcagaggta

SEQ ID NO: 25735 - DNA, 2300 bp, Homo sapien
agctgagttcaggtcctcaatatccttgctacttttctgtctcattgatctatctaatattgacagtggggtgttaaagtcttccactgttattgtatgggagtctaagtctctttgtaggtctgtaagaacttgctttatgaatctgggtgctcctgtattgggtgcatatgtacttaggatgggtagcacttcttgttgcattgatctctttaccattatgtaatgcccttctttgtcttttttgatctttgttcatttaaagtctattttatcagagactaggattgcaacccctgctttttttttctttccatttgcttggtaaatattcctccctccctttattttgagcctatgtgtgtcttgcacgtgagatgggtctcctgagtgcagcacaccgatgggtcttgactgtttatccaatttgccagtctgtgtcttttaattggggcatttagcccatttacatttagggttaatattgttatgtgtgaatttgatcctgtcattatgatgctagctggttatattgcccactagttgatgcagtttctttatagtgtcaattgtccttacaactgggtatgtttttgcagtggctggtactcatttttcctttccatatttagtgcttccttcaggagctcttgtttaaggcaggcctggtggtgacaaaatctctcagcatttgctggtctgtaaaggattttatttctccttcacttatgaagcttagtttggctggatatgaaattctgggttgaaaattcttttctttaagaatgttgaatattggcccccactgtcttctggcttgtggggtttctgcagagatatctgcttttagtctgatgggttacctttgtgggtaaccagacctttctctctggttgcccttaacattttttccttcattttaaccttaatgaatctgatgattctgtgtcttggggttgcttttctcgaggagtgtctttgtggtgttctctgtttttcctgaatttgaatgttggcctgtcttgctagcctggagaagttctcctggataatatcctaaagagtgtttttggtacatacgtttaaacaaccagatctcctgagaaatcactcactattgggaggacagtgccaagccattcatgagggaaccatgcccatgatccaaacatctcccaccatgcttcaccttcaactctggggattatatttgaccatgatatatggaggggacaaacatacaaattatatcaaaggcatagcatggctactgtgaaaggagggtaaaaacacaaagatgacatcaccactgacctcagggagtgcccagtagactgagggagacaagtacatattttcctgaaggagggcactggattgatggcatgtttagaatgtggaagtagagcggccacagaaaggcagcccggcagagtgctcgcacaaagactgggctagagactccccactgcatgtgatgtatctgaggaaagtcattaaaataggtgatggtcactttccatcaagtccctggtatggtccatggaggcagggttgtcaatgtcatttcggcatttcagaggcctctcagggtttggatatggcagaagacaaccagcaatgattatgcattgcagagatgcaggtgagccccaatttcttgccagctgggaagtcggtgctaaggggccttgctgtctttccttggaacataggataccaatttctttctggacagagagtatttggttggctaaagttaaaatctaaattttgctttgggatgaattccaaaaatattagctttattcaaatttactttcactttatctttctgaatcttcaaggtcctaaagcattgcttagtaattttgtttctaaactcacgttacagcactgggcatgatctgtccaaggcagagactataagctactcttatagtactcttatgagatacatacaagtaggtatctcaaaaaatgatactcatgtattcctgttcttatgagtaaatcattggcagtgagtgtgattttttttttttttatgacaggataaatacacgccctctattggggtcaggttttgtgcctgtagttcttccgcctactgtatcatagcagcttagaatcccagctgctggctcgggctgcagttctctcatggctcgcacagggtggaccagccccattcccctatgtgtttctctgctgctgacctgtggctttgctgaggcagggaagctgctggtagtgcccatggatgggagtcactggttcaccatgcagtcggtggtgga

SEQ ID NO: 25736 - DNA, 2300 bp, Homo sapien
tgaatttccttgtgaattttctgtctcgttgatctgtctaatattgacaatggagtgttaaagtctcccactattattgtatgggagcctaagtctctttgtaggtctctaagaacttgctttatgggtgctcctgtattgggcgcatatatatttaggatggttagctcttcttgttacattgatccctttaccattatataatgcccttctttgtcttttttgatctctgttgatttaaagtctgtttttatcagagactagattgcaacccctgattttttttgctttccatatgcttggtaaatattcctctatccctttattttgagcctatatgtctttacacgtgaaatgggtcttctgaatgcagcacactgatgggtcttgactgtttatccaatttgccagtctgtgtcttttaattggggcatttagcccatttacatttaagattaatattgttatgtgtgaacttgatcctgtcattatgatgctagctgtttattttgcctactagttgatgcagtttctttatagtgtcaattgtcctgacaattgggtatgtttgtgcagtggctggtaccggttttttctttccatatttagtgcttccttcaggagctcttgtaaggcaggcctggtggtgacaaaatctctcagcatttgcttgtctgtaaaggattttatttctctttcacttatgaagcttagtttggctggatatgaaattctggattgaaaattctttcctttaggaatgttgagttttggtccccactgtcttctggtttgttgggtctctaaagagaggtctgctgttagtctgatgaacttcttttcgtgtgtaacaggacctttctctctggctgcccttaacatttttccttcatttcaacgttggtgaatctgatgattatgtgtcttggagttgcttttctcgaggagtatctttatggtgttctctgtgtttcctgaatttgaatgttggcctgtcttgctaggctggggaagttctcctgaataatatcctgaagagggtttttggcattttttaaaaaattatactttaagagatctgggatacatgtactgtcgtatacttttaaacaatcaaatctcatgagaaatcactcacaattgggagggcagtgccaagccattcatgagggatccatgcccatgacccaaacacctcccaccatgcttcatctccaacactggggattatatttgaccatgatatatggaggggacaaacatacaaactacgtcaaaggcaaagcatggctactgtgaaagaagggtaaaaacacagagatggcatcacctctgacttccaggagtcctcagcagactgagggagacaagtacatattttcctgaaagaggtcactggagtgatggtgtgtttagaatatagaagtagagcagtcacagagaggcagcccagcagagtgttcgcacaaggactgggccagcaactccccactgcatgcaacgtatctgaggaaagtcattaaaataggtgatggtcactttccatcaagtccctggtatggtccatggaggcagggttgtcaatctcattttggcatttcagaggcctctcagggtttggatatggaagaagacaaccagcaatgattatgcattgcagagatgcaggtgagccccagtttcttgccagttgggaggtcagtgctaagagccttgctgtctttccctggaacatgagatgccaatttctttctggacagagagtatttggttggctaaagtcaaaatctaaattttgctttgggataaattccaaaaatattagcattattcaaatttactttcactttatctttccgaatcttcaaggtccaaaagcattgctgaataattctgtttctaaactcacttgcagcgtgctctccctccaaggcgaagaccataatctactcttgtctggaaatcatacaagtaggtatctcagcaaatgatactcgtgtgttatcgttcttatgagtaaatcattggcagtgagtgtgatttttttttttttatgaaaggataaatacacgccctctattggggtcaggttttgtgcctgtacttcttccgcctactgtatcatagcagcttagaatcccagctgctggctcgggctgcagttctctcatggctcgcgcagggtggaccagccccgttcctttatgtgtgtgtctactgctgacctgtggctttgccgaggcagggaagctgctggtagtgcccatggatgggagtcactggttcaccatgcagtcggt

SEQ ID NO: 25737 - DNA, 2300 bp, Homo sapien
gcctcagcctccagagtagctgggattacaggcatgcaccaccacctgcagctaattttttgcatttttagtagagatagggtttcaccatgttggccaggctggtctccaactcctggcctcccgtgatacgcccaccttgacctcccaaagtgctgggactacaggtgtgagccaccacgcccagcacacatagaatttttgactccctaaaaatttaactattaatagcctactgtgcactagaagccttaccaataacagaaacagttgcttaacacatatttggcatgttatatgtgttatatactgtattatcataatgaagtcagctagagaaaagaaaatgttattaagaaaatcttaaggaagagaaaattaagtattcattaagtggaagtggatcatgataaaggtcttcctcttgattgtcctccattgagtaggctgagaaggaggaagaggtgggttggttttgctgtttcaggggtggcagagggggaagaagtggaggaagaaggaggagagacaggtacacttggtgtaactttacagaattacatcataattattatttgacttttttgcctttgcaattctttgaaaatgcttttttacagtactagtccttcttccccatttgctttagtttcagtgcccattcatggaagggtttgtgttgtaaaataagtcaaaagtagtcttaataattggaagcctttgccaaactgtttaataggaatttgttttctggcatggcttcttctatgtcttctttagtatctggtactgattcaaaagcactcatctccatcaagtcatcttctgttgattcctctggtgtggtgtctattcattcttgaatttctcacagattcatatcttgaaagaccatatcccccaccttttgttgctgaattagagatgttgggtttgcaggcaagtagaccactttgacaccttcagtgttgaactcatgggttctgggtggctaggggcattgtccaaaaatcaaaagaactttgaaagaccgtctcttactggcaagatattacctgacttcagggacaaagtaatgatagaaccaatccagaaaaagtgttcttgccgaggccttcttgtacaacaaaaaaactggcagtgggtattgatcttttccctttaaggcttggaggctagcaggcttatggatgggggcagtcctatttgtaaacccaaacatacaaacatacaaactatgtcaaaggcatagcatgggtactgtgaaaggagggtgaaaacacaaagttgacatcacctctgacctcaaggagtgctcagcagactgagagagacaagtacatattttcctgaaggagggcactggagtgatggcgtgtttagaatgtgcaagttgagcggtcactgagaggcagctcagcagagtgctctcgcaaggattgggcgggcaacttcccactgcgtgcgatgtatcttaggaaagccatttaaaataggagacggttactttccatcaagtccctggtatggtccatggaagcagggttgtcagtctcatttcagcattttagaggcttctcagggtttggaaatggaagaagagaagcagcaatatgtatgcattgcagagacacaggcgagccccaatttaggaggttaggaggtcagtgctaagggccttgttttctttgcttagagcatgagttgccatcttctctggacagagagtatttggttgcctaaaggtaaaatctaaattttgctctgggacaaattccaaaaaaaattagctttaatcaaatttacttttactttatctttctgaaccttcaaggtccaaaagcattggttaataattctgcttctaaacttaacattgcagcacagggcatgttctgcccccaaggcaaagaccataagctactgttgtctggaaaacatacaaatagatatctcagcaaaagctactcatatattcttgttcttttgggtaaatcattgtcagtgactgattttttttttatgaaaggataaaaacacgccctctattggggtcaggttttgtgctggtatttctcccacctactgtatcataggagcttagattcccagctgcttgctctcagctgcagttctctgatggcttgcacagggtggaccagcccccttcctctatgtgtgtgtctgctgctgacctgtggctttgccgaggcagggaagctactggtagtgcccatggatgggagccactggttcaccatgaggtcggtggtggagaaactcattctcagggggcatga

SEQ ID NO: 25738 - DNA, 2300 bp, Homo sapien
caaatcacattggcatctataaataagcctttcttatagcaatcctacacccacattaaagttgcattttcaatatgagacaaaaatgtatttcacaaaaagatgcgaggtttggctcctgctggcatagctgcagcaatgtcttcatgaatcttttcttctcttttctttctttctctctctctcttttttctttttctctttctttcttttgcaatggtccttatctatcttcattgattttgaaatggcaggcaatcatagcggcagagctcaatctacggtacctatcaagtaattcaagtttttttggtaatgtcatgatttttctttgcttcttgggagtacttgcagcatcattagttgcactttatagtcccatggtggtattcaaggtttaaaaaattacactaaacatgatgaaaaatacagtagaaccataagagatcattttttactctgacatgcaatttactagagagaagaaacgcgcagagggtataaacgtcatatcacatgcatttaggccacactttagctccctgcaatagcaacaggaggtagcaacaaaattattatagtagtgtagtatgtactagaggaaagtgactaagcaaatgtctagtaccagttagggtgtcctggaaggaaccatcttgtgcttctacaagaattatgccctgaggttggctgttgaatccctcacgaaatgctcctcagtgtgttgcctaacacacactgctgagctcacccattaaaatctgcatgatggaattcagcccaatgcaatgagaattcccatggacttcctctgtgcaaggcaaagcatgggtgctgtggaaggaggatgaaaacaggtagaagatgtaatctcatcctcaaggggtgctcggtagaatggaggaaacaatacatagattcctgaagatgagcaccaaagtgattggggtgggcccatagcaaaggcctgcagctctgttcagaatgcagaagcagagtgggcagagagagacagctcattagagtgcttgggcaagcatagggacggcgactcaccactgcagacaatgtatctgaggaaagccatttaaaataggtgacagtcacattccatcaaatttctggaagggtccatggaggcagggttgtcaatctcattacagcatttcagaggcctcagaagatttggaaatgaaaaaagacaagcagcacttgtggctcacctgtgtcacaattgtggctcacctgtgtctctgcaatgcgcaagtgagctgtgtattgcagagacacaggtgagccgcaatttcctcccagttaggaggtcaacgctaagacccttgctctctttccgtcgaacatgagatgccaatttctttctgggcagaggacaaaataaaaattgtctataaactttggccaggtgtagtggctcacgcctgtaatcccagcattttgggaggccgagatgggcagattgcctgagctcaggagttcgagaccagcctgggcaacatggtgaaaccccgtctccactaaaatacaaaaagttagctgggcatggcagcgtgcgcctgtaatcccagctactgaggctgaggcaggagaatcgtttgaacccaggaagtggaggttgcagtgagcctagatcttaccactgcactccagcctggatgacacagtgagactccatctcaaaaaaaaaaaaaaaaaaaaaaaattgcaaatttttctttgtgacaaattccaaaattattagcttcgttcaaatttactttcctttttatctttcaatgtcgtcaaggccaaaagcattgcttaataattttgtttctaaactcatattgcagcacagggcatgatctgtccccaaggcaaagatgatgagttactcttttcttgaaaacatataagcaggtatctcagcaaaggctactcatgtattattatgagtaaatcattggcagtgaatgtgaatttttttttaaatgaatgaataagtacacgccttcttttgagggcaggttctatctgtacttcttccacttactatattataggagcttagaatcccagctgctggctctgggctgaagttctctgatggctcgtgcagggtggactggcctccttcccctatatgtgtgtctactgctgacctgtggctttgccaaggcagggaagctgctggtagtgcccatggatgggagccactggttcaccatgcagtcggtggtggagaaactcatcctcagggggcatgaggtggtcgtagtcatgccagaggtgagttggcaactggg

SEQ ID NO: 25739 - DNA, 2300 bp, Homo sapien
gcaattagctaaggaagagaagcttggtttaaaattcggggttagcagaaaagaatgtttgctcttgctcatgagtgtgacttcctccaagaacaaagaatggctgtcagagttcagtcgttatttccccttatctgaggtctgcctgccaaagaatccatttggtgggagtccaggtttctgaaaaacaactcggggacatatgttatgatgtgatctgtagtttctataggaaaccaaacatctctggactctaactttcttggatattgttttaggctactattaccttcttgcttatcaagtgccttatttatttctcagggccaggtaggtgcctggaatttccttcgaaagaacccaagattttcctttatttccatgcttggaggaacccacaggcccctaaaagggattctcacttcatctcaccattttggaccttcctcaagatctgggcccagagcattctgacttctgcagccccacctcacagcctatcaaatagattaaattgctcctgcatcttatgtcacatatgtctttgtaacttggtgagctaatctgtagtggattcattgacatgtagttatgtttttatagccatttcataaaatattcataaattcaatgtttgccattttagtattctagattcagcaaatttcttattttaagtctcaaacattttgcaggtcctttgaaatcttgcaggtgggtcctggctccattacttatgggtcgtaggtcatacaagggtctgaaagagttagcaccttagaagcaaacctctccatagggtccacgtttccagaccttcctattcccaacatgaaattaccttcatgcacatctttgggtctctcctctattcaaaatgccagctatcctccatttactttttgggaaatctgctcttgccaacagagatttgttttatcttaggatctacttctttcaccccactggaatatgtcccaagcctgagtcattcagcctgcagcaatccctgagaaaaaaaaaaaatcggcctttgcctggacactcaagtgatacctgaggacaccttgactcctacagcaccaaccagggcaggcctgggtctccagcggagctactctttagggatcgtcattatgacgaacagacatgccagattcctctggctagtgtccagtgcagacatacacacacacacacatacacacacacacacacacacacaccattcttagtacagtcaaagctcacaggagaaagaaaaatgttttctaataccttcttaatttgcaagaaggtgttaggaattcaagggatggtatgcatagtgatgttagtttcatttcttcagctccttcctccaactcatgttctgtagggacttctgggactaagaacaggacccacatatgagcaacaggattttcagagcaaggctgtggttggaagggctcagaccaacgtccacagcagagtggaggtctagtataaagaatgtgaagtttgtagcatctcttgatcccgctattcctacatgcttgcttaagccattcttcctctagatgaactgttctttgaaggaaacctgcctaatgtctgcctgctcaagaaggtggacctgagctctgttccctttgcaaccttcctggagtcttattgctatctagatgaactcaaagcaagatgctgccgcccccatgactttgatcattgtaagctgccaatcctcttgggaggctgctcccagcttggactgagctgagtcttcgcatgccttgaacaatgaatttgcatcctggttatgttccccatgggggccagccctgtccttggagtggcccctctaatcatgttgctcaggcttcttctcccttcctgggccccagaacacctccggtgccaaacttgtgggtgggaacaggaactcgcgtgccagccaggtgtgcatgactagctctgggcaagtctgttctagtaattcaaggtaccacctctcactgggacagcctagtttctacacaggtcttgctctgggaccgccctcagcagtgtggttagcaggcagggccagtgtgaccctccctttctgggcctcagttgagaaacctgaagctcaggagaggagtcactcccctggcagatgggtggctgggccagaagcagataccaggctttctgactcctgctctaggattctcaccacgtactggctagacttatacttctcaaatcttaatttcctaaaggcaagtaacagtttgaatgttgttatattgtgatgtataataagaaatatatgt

SEQ ID NO: 25740 - DNA, 2300 bp, Homo sapien
gtacagtcaaagctcacaggagaaagaaaaatgttttctaataccttcttaatttgcaagaaggtgttaggaattcaagggatggtatgcatagtgatgttagtttcatttcttcagctccttcctccaactcatgttctgtagggacttctgggactaagaacaggacccacatatgagcaacaggattttcagagcaaggctgtggttggaagggctcagaccaacgtccacagcagagtggaggtctagtataaagaatgtgaagtttgtagcatctcttgatcccgctattcctacatgcttgcttaagccattcttcctctagatgaactgttctttgaaggaaacctgcctaatgtctgcctgctcaagaaggtggacctgagctctgttccctttgcaaccttcctggagtcttattgctatctagatgaactcaaagcaagatgctgccgcccccatgactttgatcattgtaagctgccaatcctcttgggaggctgctcccagcttggactgagctgagtcttcgcatgccttgaacaatgaatttgcatcctggttatgttccccatgggggccagccctgtccttggagtggcccctctaatcatgttgctcaggcttcttctcccttcctgggccccagaacacctccggtgccaaacttgtgggtgggaacaggaactcgcgtgccagccaggtgtgcatgactagctctgggcaagtctgttctagtaattcaaggtaccacctctcactgggacagcctagtttctacacaggtcttgctctgggaccgccctcagcagtgtggttagcaggcagggccagtgtgaccctccctttctgggcctcagttgagaaacctgaagctcaggagaggagtcactcccctggcagatgggtggctgggccagaagcagataccaggctttctgactcctgctctaggattctcaccacgtactggctagacttatacttctcaaatcttaatttcctaaaggcaagtaacagtttgaatgttgttatattgtgatgtataataagaaatatatgtttgtctttgtttcctggacacagctcctgaaaccataagtggtgggagcgataaacgtgaacaaagaatcttttgttattcaaaacagatccctttcgatcacacctaagtttatgtaaaggagatgtaaagtctctaaggatgagggctagttgccagggaacaaaacccttgcgattagagggaagaaaggagagagagattgaagattgatttgatcaccgatgggcaacaatctaatcaatcatgcctactatgtatggaagcctacataaaaactcagaagggcagggttcagagagctttcaggttgctgaaggtgtggagggtggggcacccagagatggcagatggggctccatggccatacccccatatcttgttctttgtactttttcctctggctattcatccgtattgtttgcaatatcctttgtaataaaccaaacctagtaaataaactgttttcttcagttctgtgagccattctagcaaatgattgactccaagaaagagggtgtgtgaacctctgatttttgccaagtcagacagaagttgtgggtaacctggggacctactacttgcaattggtgtctgaagtgagggcagtcttgtaggactgagcccttaacctgtggggtccgtgctaactcagaattcagttcagaatggaattgaattgtaggatacccagctggtgttagagaataggtccgtgtgcaagaaaaattcccgcacatcatggacataacagacaacgtcaatgatgaggaatccagcaagttcgggatagagaattggcagggggtcctcaggggtctctccaagtcatcttcaaagtgttgctataacttttcagagagggagaagcagacttgtggagctgaagagaaacacccagaagctcaggtgaaagctgacacggccatagttggttcatattaaccatgtgattaaaatggttaaatattaatttgggttcttacatatcaaagggtaaaattcagagcaagggagaggtagacaggacctgtgaaaagcagtggttagtttagggaaaatacctaggagccctgtgatttggagagtgaaaactctttattaccgttgttactttaactctttccaggatggcctgcctccttcgctcatttcagagaatttctgcaggggttttcttcttagcactttggggcatggttgtaggtgacaagctgctggtggtccctcagga

SEQ ID NO: 25741 - DNA, 2300 bp, Homo sapien
gtttgggtggaaagaggtctttagaccacttagtctttgtttaggtctttgtttatgtctctgagattggcagaggggaatatacaatcattcagatcaggctattggatgcctttttctatctctgaatttttctggggtgacctcactgacacccatggcttcaatcaccacttatgctgatggctccaagtctatctgtgcagcccagacccctcctcatctccagaccctggaagctgatgccttgggctgctcctcctatttcctgggcaccaggaatatgagctactccctccccacagtcctgctctccccagtgctcccatgtcgctgaaggcaccaccatcttccaagatacatgggcctccccagggtctaggagtcctagacgtgggagtagaaattagatgacattggtgtctaaacaaaacaccactgcatggagatagaacaggggagccccctgaatgtggtgagagcaccctcccaggtgtgttccaccctcaccccgggctcatcaggagggtgcttaggatgcatacagttttaagggggttggaggaatagttcagaggctgagatgttgcacccacagctgagaatccctttctagcgctctgtgtcctcacaactccccgggaatcatcctcccctggagagttcccaaagcccttgcaggcctgccttctctgtgccttcctgcctgcgccctctggtggacagctccattcgctgcctgtcccatgggttctgtccaaaggtggaatctattatcaatgtggatttctaatgggggtaacttcctccctaagggaagcctcagcttcaccagcaatggcagacacggccaggcatgtagacacagaggaagtgagatagaaagtgtgcacagcccagagagcctgcccacatcatcctggggcgaccaggacaaggaggcgtcagcaatcttgccaagcacaagtatgagtgactttctggagcaggacgagtctcatgggcgtgagaccattgtgagtgctcagggtctctccattagaaaggcacacgtttaattctccattttgaaatttgaactagagcccccacaaattattctgttctggaggaaccattcttatcagaacttggtgctggattgacttggaaaaaagcctgaccataatcttcaggatgaaataaaggcctggatgaatggacacttcagtctctaagcagacttgcagaagactggagccttcagcattcagaagaggaattcagactgtgcaagatctgaggccaggctccagctcccccggtcccttggtgagcaggagctccctgaacccaccatgggtctttgctagggttgtcttgcacatgtgtgctttagacagcagcacctcttcttccatggtgtagatggagaatcctcaacaaagcctttccaagaatctgatcatcacatcttgagctcagcctccctgcagctttttttatattgacagccacttcagagagagtcctctttgagctttacaagaaatatcctggtgtgaaaaacgaccaaaaccagatagccagcctccccactccctgtttaaagaaagctggcttagcaatgttgtctgcattttggatgtgctgtgttacccatatgtgggaagaaagagtattaagagttagcaaatagggtcacatccagcagagaccatatggttggggactagggcaatggtgactcctcagacctcagctgcagcctgataaacgtggttaagagagaagtaggagacagtgacatgaaatgggggttcacagccttgtgttgggaattgaatgagaaacaagagcttgaacttggatgttccccagagcgagcgcaaggtcagatgagtttttcaagataggagtgatcggtctttcccagggtggggcccataatgcaagacaattatagattaacgggtaataagtaactggaggagggcactctgtcttcaattacatgttgatttgctaggtgtctcagtgacaaggtaattaagacgaaggaaacaattctaggaggcacaacgtggggtggacagtcagctgtcggtggcttctgctgagatggccacaggactccaggttcccctgccgcagctggccacaggactgctgcttctcctcagtgtccagccctgggctgagagtgggaaggtgctggtggtgcccactgatggcagccactggctcagcatgcgggaggccttgcgggacctccatgcgagaggccaccaggtggtggtcctcaccctggaggtgaatat

SEQ ID NO: 25742 - DNA, 2300 bp, Homo sapien
ttctcttaaaaacactaaagagttccagtttatatgtttagctctgtgagattgggagaggggagctagatcactcaggtcaggctttcgggatgcctttttctgtctctggacgttgctggggtgacctcactgacacccatggcttcagctaccacatatgctgatggctccaagtctatctgtgcagcccagacccctcctcatctccagaccctggaagctgatgccttgggcagctcctcctatttcccaggcaccaggaatgtgagcttctccctccccacagtcctgctgtcctcagggcccctatgtctctgaaggcaccaccatcttccaagatacatgggcctccgcagggtctaggagtgccagacacgtaaccagaaatcagatgacatcactatctaaataaaacaccactacatggaaatagaacaccactacatggaaatagaacatgggagccccttgaatgtggcaagagcaccctcccaggcatgttccaccctcaccccgggctcatcaggagggttcttaagatgcagacagttttaagggggttggaggaatagttgagaagctgagatgttgcacccacagctgagaatccctttctagcactctgtgtcctcacaaatccccagaaatcgtcctcccctggggagttctcaagcccttacagacctgccctctctgtgccatcctgcatatgcctcccttgagctgggtgtccctctgatggacgcatccattcactgcctgtcccatgggttgtgtccaaaggtggaatctgttatcaatgtggatttctaatgggagtaacttcctccataagggaagcctcagcctcaccagcaatggcagacatggccaggcatgtagacacagaggtagtgagatggaaagtgggcacagcccagagagcctgcccacctcatcctggggcgaccaggacaaggaagcatcagcaatcttgcgagcacatgtaggagtgactttctggagcaggacgagcctcatgggcatgagaccattgtgagtgctcagggtctccccctagaaaggcacacatttaattctccattttgaaatttgaagtagtgcccccacaaattatgcagcccgttctgttctggaggaaccattcttatcagaacttggtgctggattgacttggagaaaagcctggccataatcttcaggatgaaataaaggcctggatgaatggatacttcagtctctatgcagacttgcagaagactggagcctttggcattcagaagaggaattcagactgtgcaagatctgaggccaggctccagctccccaggtcctttggtgagcaggagctccctgaacccaccgtgggtccttgctagggttgtcttgcccatgtgtgctttagacagcagcacctcttattccatggtgtagatggagaatcctcaataaagccttcccaagaatatgatcatcacatcttgagctcagcctccccggagcttttttttatattgacagccacttcagagagagtcctctttgagctttacaagaaatatcctggtgtgaaaaaagaccaaaaccagatagccagcctgaacactctctgtttagagaaagctggcttagcaatgttgtatgtcttttggatgtgctgtgttattcacatatgagaagaaagagtttcaagggttagcaaatagcgtcacattcagcagagaacatgtggttggggactagggcaatggtgactcctcagacctcagctgcagcctgataaatatggttaacagagtagaaggcagtgacatgaaatgggtgtccacagccttgtgttgggaattgaatgagaaagaagagcttgaacttggatgttccccagaggcagcacagggtcagatgagcttttcaagataggcgtgattggtctttcccagggttgggcccataacgaaaggcagttatagattaatgggtaataagtaactggaggagggcactttgtcttccaattacatgctgatttgctaggtggctcaatgacaaggtaattaaggcgaaggaaacaaatgtagcaggcacagcgtggggtggacagtcagctgtcggtggcttctgctgagatggccagaggactccaggttcccctgccgcggctggccacaggactgctgctcctcctcagtgtccagccctgggctgagagtggaaaggtgttggtggtgcccactgatggcagcccctggctcagcatgcgggaggccttgcgggagctccatgccagaggccaccag

SEQ ID NO: 25743 - DNA, 2300 bp, Homo sapien
taaggaatctttaccccaagatgtgaagattagtttctgtgttctcttacaaacattaaagaattccagtttgtgtgtttaggtctgtgagattggcagaggggaacaagaccacacaggtcagtctttcaggatgcttttttctgtctctggactttgctggggtgacctcactgacacccatggcttccacatatgcggatggctccaagtctatctgtgcagcccagacccctcctcatctccagaccctggaagctgatgacttgggcagctccttctgtttcccaggcaccaggagctcctccctccccatagttctgctatccttagggcccctaggtctctggagtaccaccgtcttccaagatacatgggcctcctcagggtctgggagtcccagacatgtgacaagaaatcagatgacttcactgtctaaataaaacactactacttggaggtagaacatgggagcccatgaatgtgggaagagcacactaccaggcgtgttccacccgtcacctgggctcatcatgagggtgcttaggaagcatatagttttaagggggttggaggaatagttcagaggctgagaggttgcacccacagctgagaatccctttctagtgctctatgtccttacaaattcccaggaatcatcctctactggacagttcccaaagcccttgcagaccttccttttctgtgccatcctgcgtgtgctgcccttgagctgggtgtcccccagtagacgcttccattcactgcctgtcccatgggttctgtccaaaggtggaatctgttatcaatgtggagtaatttcctccctaagggaagcctcagcctcaccagcaatggcagacacggccaggcaagaagacacaggggcagtgagatagaaagtgcacaccccagacagcctgcccacatcatcctgaggtgaccaggacaaggtggcatcagcaatcttgtgagcacagcacatgtgggagtgactttctggagtaggataagcctcattgggcttgaggcccttgtgagtgctcagggtctctcctttagaaaggcacatatttaattctccatcttgaaatttggactagggcccccacaaattgtgcagcccattctgttctggaggaaccattcttatcagaacttggtgctggattgacttggagaagagcctgaccataatcttcaggatgaaataaaggcctggatgactgaaataaagactggagccttcggcattcagaagaggaattcagactgtgcaagatctgaggccaggctccagctcccccagtcccttggtgagcaggagctccctgaacccaccatgggtctttgctagggttgtcttgcccatgtgtgctttagatagcagcacctcttcttccatggtgtatatggagaatcctcaacaaagtcttcccaagaatctgatcatcacatcttgagctcagcctccctgcagctttttctatattgacagccacttcagagagagtcctctctgatccttacaagaaatatcctggtgcgaaaaacgaccaaaaccacatagccagcctccacgctgttcagagaaagctggcttagcaatgttgtatggtttttggatgcgctgcgttactcatacatgagaagaaagtttcaagggttagcaaatagggtcacatccagcagagagcatatgactgggggctagggcaatggtgactcctcagacctcagctgctgcctgataaacatggttaacagagaagtaggagacagtgacatgaaatgggtgttcacagccttgtgttgggaattggatgagaaacaagagcttgaacttggatgttccccagagtgagcacagggtcagacgtgtttttcaagatagtcatgatcggtcttttccagggtggggcccacagtgaaaaacagtgatagattaatggttaataattaactagaggagggcactctgtcttccaattacacgttgatttgctaagtggctcagtgacaaggtaattaagatgaagaaagcaaatgtagcaggcacagcgtggggtggacagtcagctgtccgtgtcttctgctgagatggccacaggactccaggttcccctgccgtggctggccacaggactgctgcttctcctcagtgtccagccctgggctgagagtggaaaggtgttggtggtgcccattgatggcagccactggctcagcatgcgggaggtcttgcgggagctccatgccagaggccaccaggcagtggtcctcaccccagaggtgaatat

SEQ ID NO: 25744 - DNA, 2300 bp, Homo sapien
agacagtaagcactctggacatgtttctgtatagaagtgactcctcttctcttttcgttctagaccctgcatccaagccagcaagtaagtgctgaatctggatgtttctaccactgtctctcagacccagctgtcatggtcccatttcagggcccctgtcccccagttgcccaacccccagctgtcccttctgaatcactgcctcagctgctccctgaaaaacgccaccccaccaacacttctggaaccttggtcagcagcttcctgggcacagaagaaaattcagagtcctctgccttgctctcaaaactctgggatagaccccagcccccctgtctaagctcattcctcctctccaccccttctgcttgccccctccctctgcctcttaccctccagccattctggatcacttgttgttctccaaacttgctttgatgttcccaaattgctttgttcacactgaactctaccctcggccagctttctatgactgttcattgtgtgcttaccaagtgccaagtccgggtctcaggttatgtcactagaggctatataaacttagaagtttgttctggtgacataacacatccccattagacctaataccctataggaaatcttagaatgttctttggttaatcattttccccttagaactgagtgacctttactagtgtattgcctcacaatttatcaaagaaaagaatccagtgtcaaaaagagaataaggaggtgaagagaactcagatctcaaaaaaattcccccaaaattcatggtcatgatatagcagttctagtggaaataatcactgcatcccacgtttatccccagtgctatacacacggcctgcaagtcttaatggtttcgatacagtaaatagtgctgtatttccttttgtctgagaggatctccctggttgttttagcagtcaagaaaagtgaataacatgcacatttgaccctccatatacttgggcttcacatctgcagattcagccaacagcagattaaaaatatttggggggaagagcaatgaaaaaacaatacaaataatacaaataaaaaaccaatactgtaaaacaactatttacatagcatttacatttattaggtaaaagtaatcaagagatgactagaggcttaaagaaggatattggtaggttatatacaaatactgtgtcattttataaaaggagcttgagcatctagattttggtatggagaggagggttgtcctaaactaatcccttcagaataccaaggactactctgctagactagcgattctcaaagtatgagccaggaaatcctagggatccccaagaatttttcaggagaattttgcaaagttaaaactatttccataataatgctacttgattttttcaccgtcattctctcacaagtgtacagtggagttttccagaagctacatgggtgatgtgtaatatcacagtagattgaatacagaagctgacatgagaatccacctctctatagagccaagtactaaagagagatgcaaaaactgtaaaacgatgccactcttctcactacattttgtcttaataaaatttacataaaaataagatttgctattgtgtcatgggtttattcttactaaattgcccaattaatatgtctttttaattctgttttaatctctaatgcagtacgtatgatagatataatccacatgaacaaaagcaaatgggcaccggggctggaacgttggagaactgcagtcctaaacaacaggatgtcttcagccccagtcagactaaactcactcccaccaccctcttccctcctgtggccgaggaaaaagactgatataaagcctactttaagaaaaacagttcttcaggcagccaaagtcaaggccctctcttttccccaacctctttttcccatcctttttggagaccatggctggttggaggccggagtgggcggggcctggtcttggagcatcacagggcctcacagagcctcacagagagcagggccagtcccagaagcactgcatcttgggatgcgaggcgctcataggcctcgaccaatgagatgtggctgcgtcataaggggcgtctctccaggcggcccaggtctccgagcactcgggcctgcgcctgggtgctggcagccttgccgctcgctgtgccagtgcctggtgggccgttctggccatccagcatggtggactactacgaggtgctggacgtgccccggcaggcctcatccgaggccatcaagaaggcgtaccgcaagctggcgctcaagtggcaccccgacaa

SEQ ID NO: 25745 - DNA, 2300 bp, Homo sapien
gcagatattaattggattgcttagtagtggttctctgttgtaattcatgagcatgaatgtggattgcccactattcagattagtaagtatttcttggtcaagggcagagctgtggccacaaaccatccaggtacacagcagaagcagcctcaaaaagcttggaagctctgcatgatgcaggaaagtcataaaatcattacagtggtgacttatgtgtttatagcccctttactgtctataatctgcaaatgaactcacacagcattgggactttggaagaattatcacccttaaggtttaaattaaactgtgaatttcagaatttctaataaggacacaacaaagagtgaaagcattgctatgtctattctgcttgcccagaatcttggtcctaaaaaatgaagagtgtttgggtgtggggaggagcttcagtgtgcatgtgcatgcaaagtacctactctaaggagaagaatgagagggtaccctaattacctgttaatatgtcccataggacaccaaaactctagttagctgtttctctatgatcctctaagcacatccccaagtatggctggccagtgatgtgtatggttcaaatgttgggatctgtgcagttatcttggaattgtatagtacagcagtatatcccccccaaaaagagtgtaatacttccaattctggctgcacaatacttgccccatagtccatggtcaataaatacaaatttgagttgtttttgctcatctttcccttttgacttcaaatcagtcatcagaatttccccaaatgcctttcccctggatcttgggccagtggaatgagtacaatttaacttaattgaatttgcttatctatttggtttcctgttgtgaacaaaagttctctgaaaaggaatttggaagaaagagactttgttctagtgaacagtttgcaaaccagggagttacagcctctggtacgcaatgaaggtgagttccacagaacacaaggcaggcaggtttcacggcaaaaagttccttcccaggttcccaatcaggtccatttatgcaaatgaaggatggaaacttgcttagttcttattggtcactgcagctgcattctgattggttgatgaagctgagccctgagtggctgaggtgggtgagctttaattggttggttcaggtgagcgctgaaaatctcaactataaaaaggtacaggttttcaggatactcagagtaaccgtgtgacctgtagtaagcaaagggccagttggctctattttaaatccaggcccagttagccactcaagatctatcttacaggactggctctttcaggttcacactaataaaggcctgtccttggggaagacttctgttcacatgcgctccagtgaatttccctttctggtcattctctaccccagcacgccccccacccccgacccgccccacccacccacctgttcatttccttcttagcatgcttcacgatttctaagttcctgctcatgtgtttaaattgtgagtctggctcacctcatggcgcgtgctcgtgtggtgggctctgctgcagcctcaagaccccacactgtgctggactcaataaatattgttggacgaaggaatgaaacacatgatacaagtgagcaggcagtaccgggggagctgtggagtgggcactcttacaggtttccatggcgaaagcgggggtacagttgtgttcttttctttctaaaaggctttctaaaaagccttctgtttaatttctggaaaagaagcctaacttgttcactacatagtcgtccttcttcctctctggtaacacttgttggtctgtggaaatactaatttaatggatcctgaggttctggaagtactttgctgtgttcactcaagaatgtgatttgagtatgaaattccagccagttcaactgttgttgcctattaagaaacctaataaagctccaccttctttatctctgaaagtgaactccctgctacctttgtggactgacagctttttatagtcacgtgacacagtcaaacattaacttggtgtatcgattggtttttgccatatatatatatataagtaggagagggcgaacctctggcaggagcaaaggcgccatggctgtggagtcccagggcggacgcccacttgtcctgggcctgctgctgtgtgtgctgggcccagtggtgtcccatgctgggaagatactgttgatcccagtggatggcagccactggctgagcatgcttggggccatccagcagctgcagcagaggggacatgaaatagttgtcctagcacc

SEQ ID NO: 25746 - DNA, 2300 bp, Homo sapien
aaaacaagcaatggggaaaggattccatatttaaaaaatagtgctgggagaactggctatccatttgcagaaaattgaaactggacccctttctcacacattatgcaaaaattaactcaagatggattaaagacttaaatgtaaaacccaaaactataaaaaccctagaagaaaatctaggcaataccattcaggacatgggcatggacaaacatttcatgataaaatcaccaacagcaattgcaacaaaagcaaaaattgacaattgggatctaattaaactaaggagcttctgcacagcaaaagagactatcatcagagtgaacaggcaacctacagagttgaagaaaatctttgcaatttatccattcaaaaaaggtctaatatccagaatctacaaggaactcaaacaaatttacaagaaaaaaacaaacaatcctattagaaagtgggcaaaggacatgaacagacccttctcaaagaagacactcatgcagcgaataaacatatgaaaaaaagctaaatatcactgatcattaggtaaatgcaaatcaaaaccacaaggagataccatatcatgccagtcagaatggccattattaaaaagtcaagaaacaacagatgctggcaaggttgcagagaaataggaacacttttacactgttggtgggaatgtaaattagttcaaccattgtggaagacggtgtggtgattcctcaaagatctagaaccaaaaataccatctgacccagcaatcccattactgggcatatacccaaaggaatataatcattctattacaaagatatatgcatgtgtatgttcattgtagcactattcacaataacaaagacatggaatcaacccaaatgcccatcaatgatacactggataaagaaaatgaggtacatatacaccatggaatactatgcagccataaaaaggaatgagatcatgtcctttgcagggacatggatgaagctggaagtcattatcctcagcaaactaatacaggaacagaaaccaaacaccacatgttctcacttataagtgggagctgaacaatgagatcacatggacacagggagaggaccaacacacactgggcctgttgggagtggggtgggggaagagagagtattaggaaaaacagctaatgcatgctgggcttaataactcggtgatgggtcgataggtgcagcaaaccactatgacacacgtctacctatgtaacaagcttgcacttcctgcacatgtaccccagaactaaaaataaaaattaaaaaaaaaattaggttcaggtttaagaagcaagctatttaaattcttcaaatttgatagggatggattataaatgatttttttttaatgcttgctgacaatagtgtgggggctttactcttcaggaattttccctgaagagcatttaaaataggttgtgatcgttgtattcactgctctacctggccctgaataggtgctcagtatatgtttaaatgaatggaagtgctgtaggaagctcctgtgattgctgatgttggtgtctgggacaggctggaggtggactgaggtggagacaaaacatttggaagcttagagcaactgcgcctaatgggggtttaaggaactagatgtggggatagtcaatagatgctcatttctcctgtccctggactcaccaatttggtgtttagttttcaggcctctttcaaacatactcaggtacttgcatgcacacatgtacacacatgtacacacatgcatgcacccacacgcataccagtgaggttttggcactcagaatactaggccattagtaattctcctgaaagtgaaattcatgttttttgtgcctttctgttcagatgcaggtgggcgtggctcttgcatttggcagtggctgttatgttacctgaaaaaataaatgacgaatttatatatatacgtaacacttatctagcattccccccatatttccttattaaatccccacacagaccctgaggcaggtactagcatcacccgctttttatagagaggaaacggaggctctcagagcccctcccctcctgtccacagagccaccaatctgcattacctctcctcccacgtcccaccttgctgctgagaaatgagcccgccctggggataactgcccaatgtcctcccttccagttcatgagcggcccagttctgtaccaggagaagctgctgaagccggcagctttgctgctggagaagggtgccgaccaggaggaagacgaggccctgcgggtgctgtccctgcgcgccctcggcaa

SEQ ID NO: 25747 - DNA, 2300 bp, Homo sapien
tagagaataagccctgggagacgccagttttgaaaactggtactatcgtgcttgttagagagtcatggtgaggcaggagaatagggaactggggtagcaaagggttgaggcataagcaaaggaacagcagatgcagccagttcgcataagcaagagaacagcaggtgcagccagttttaagcaagattgggcaggacataggctacatcttcactcccgtgataacaagaaagaagtttccacttcagcccctgaatgactgcaggccaagtttccactttaggctctgattggtcacaggccaatccttcatagggtgtaaccaattggaggcctctaaagggtacccaggggtgttgccaagttcttttggctttataaaaaccctaattgaagaggctcttgagctgcgggctccagtccgctcgcactctgtgaattgtcttcaatgaatctgtgctttccttactccgttctcctgttgctttgtttttcgttgcttcattcctttgttactttgtgtgttttgttcaattctttgttcaacacaccaagaacctggacaactctatctggtaacaatggaagagtcaatcatccaaaactcaaaaagaaaaaagaaaatcttattcaaggtctcaagtctctaaatgggcccagttagatgtttgaaaagtaaattatgtgtgggaagcacagagtccaaggaagagcatgttaagtttctgaacactcctaaggaaggaggaggaagacacctcggtctgtttgtgaaaattggaaaaggtacaagttaaatgtgtagatcctgcaactggagaagactcagagaggatgtttatatagggaggaagggaaggaaagaaacaggattggtaggttaccccatccaattccgtggaattgagagctcggaagataaagtggcccagggttttcttccatcagactgaaatgatacagccttcctgttcccacctggatcagtcactggtgctgggccaccctggggcagcaggaccttgggtgagggagttctctgcaactgaatcatcccagaataggctgacaactgaaggcccctgccaactgccctcctagcagctgtggcatcttaaggggaatcaggccagcacatctctgtgtccagcacaacgcaacacgttttgtggacacacacactacatgagccctgaagttcttaccctccacccactcccacctaaatttccgcaggacatcatgatagaattgccgtgcaggctgaaaggaggtgaagagccccctctaagggacctcctggtgctcagtaatgcttttattttcaatcacatactatggtaatcatatcagcacaagcacacaaatgtggttaagtgatgaagctgaatgaaactttcctaagatgtcaatcataaattccatcaaccatactaaagactgatttatcttgctcttctctctggagaaaatattacaagattaatatcaatgaagaagcagaatatgcaatcagaaatacatagggaaaaagctgggttaatagaagtattttcctggattttgtgatgtgtatcgcatttgtcagcatctttaaatgtgtcattcgttgagacttattttttccttctagatgaatattcgctatcctgcctccttttgggttggtaatttggggttgtctttcttaggcccctgccctggaaactgcgccgggatcccaggcggaggggtgaggaaggcggacctcgcccagcggcgacacccagagcaagtcacgcagaaatctccaggccgcacttatctccggtgcacagcgcgggagatgacacgcatcccaccggatctcgcacagcaccgctgatgaataagcacacagctgtttgtacaactaccaccggccgtggcggccggagaccctccctcccttccgccggacattggggcgtggctggaaactcgggagtggattggccggaaggtgggacgcaaatttgtttgaaaggcccaatcagtgcccggcttctccgctctagccaatagaaaaccgagaggaaggcagggagggcggagtctcctatttgagtttgtggcgcgcgaggccctgcagtccgggttggcgcttgggtactggctgggtccgatgctgggtacgctgcgcgccatggagggcgaggacgtggaagacgaccagctgctgcagaagctcagggccagtcgccgccgcttccagaggcgcatgcagcggctgatagagaaggtgcggcccccgccggtccgccgggaggggaggcctgcgt

SEQ ID NO: 25748 - DNA, 2300 bp, Homo sapien
aggataccactgacagcattcagtgacttgtggagtcttttactccacccaacaagagcaggatatgcattttttcaagcacccatggaacgtacaccaaaataggcagtattctgggccatgaaacaagtctcaacaagtttaaaagtattgaaataatatagattatgtcttttgatgataatagaatcaaactagaaatcaataacaggaagacaacaagaaaatctctaaacacgtaaaaattgaacaacgtacttctgaataagccatggatcaaagaagaagtataaaaggaaacttttaaaaatacatagaattgaatgaaaatgaaaacataatcgaagtatatgggatgcagctaaagcaattatgtgagggaaatttatagcactaaatgctataaatcaacaacttatattcctagctcaaaaaattagaaaaagaagagcaaaataaagccaacacaagcaaaatgttaccttcagagaaactatttaaagtataaaagaggcatcttgaattatttcttacaactacatgtgaatctgtaattatttcattaaattctaattttaaaatgtcaattgcattttcatacatcaacagtagaaaaatggaactttaaatcatataatttacaaaagacttctaaaaatccaacaaaatgtatctgataaaattataattcataaaatatatactgctaaaattataactataaagaaaactataatttattccatcttttgaaagatattaaagaggacctaaatcacaggagggatattccatgttaacagattagaagatccaatagcataaatatatcaattattccccctaattgatctatagattcaaagtaattctaatgaaaatgccaaaagagtttctgtaaaactaacaaactggtaataagatgtatatggaaaaatcaaaggtcaaccatagccataacacagctaaggaaaacgaacaaggagagaagagttacccagctagatagttattataacactgtgattaggtgcaaaggtagaaaaaaaaggaccagtgaaatacaatatagaatctagagacaggccaatgtacacatagaagagatacagttcaggggtggcattatagaacagtgaggaaaggataaattattcaataaatgttactaagacaatttgttatccacattaaggaaaagagaattggccttctaccttaaagcaaatacaaaaatcagttccagtggattaaaagtttaaacgtgagaggtaagttttataaccacggaacataaaatgatttcttaaataagacaccaaaagtgcctatcataaaggagaaaaatacaaattttacttcaattttgcactgggaatattagcaaaaacacaatactaagtgttggcaagagcataagaactcaaacaccaacatgagtgacattttattgttattctttatatgttatgcatgccacaaaaggttttgtatgtattgcatatttaattttaaaattaaatataaaatgatttttttcttgacaaatgaaatgcttctagtatttatcattaagcaaaatgttaggactataaattttaattattttaatattcaatatctcttggtagtatacttaggatttttaaagtagggaataatattaaatttatcttgcaagtagaaatagtaataaaaacttctaaataatgcttgtatcaaagaaggaaacaaaaggaaaatcacgaactggtactcagagaatagacagccttaaatgcatttattagcaaacaaaagtaaatggaagtaaattcattatgctttcaattcaagaaacgattttagaacagtttaacctaagttaaaaggaacaaaataatacagtcaagaaattaaagaaaataaaaacaaaaacgtgatcaagaaacattaagcgctggttcctttaaaagaccagtaaaacagataaagttcaacaacataattaattaaagagagacaagggatacataaataaatagcattagaaatcaaatggggcttccgcccggcatgccggaccgcgcatgcgccgtcggcagcgtcgcgcgcgccctgtcgcgcagccggcgctacgtgtgcgcccgggacgcggacgcaagccgccgacggaggaggccttttaactacggtgggtttctctcttcgcgttaaatctcccctgccgtgcagcctggtgccgcgtaggctcccgtgggacgctcccgtcggacgccgtccgacctagattgttaatgttattgttgggaaaggcgaaa

SEQ ID NO: 25749 - DNA, 2300 bp, Homo sapien
tgaggagtaagtggctgaaaaacgtctgtgtgtgactgaggttgctcagggcagccaccttctggcattaaaagatagttcaacaatccagcatcttaaaaaaaaaaccaaaacaatttctatctatcttgctagatgaattgggcattttgttgcgtcttggatgaaatggtaaatatttacattatatatgtacacctctacttatatctctctatctccatctctctcgctcccatttcatgaggatgcttacttacagcaaggatccattcacgtatgattttaaggacttgctaaagatatttgaatacaacttgttcaggccagatcatacattatctgctgtggataaaacaagtttggatttacaatgaaaattgagatagaacaaaagacttgcttaataaccagaaaatgaatgagagaagtccacatgagcttaattaattggctcaatatttctctctctctctctctctctctctctctctctctctctcttttcttgagacagaatctcactctgtcacccaggttggagtgcagtggcatgatctcggctcactgcaacctccacctcccaggttcaagggattctcatgtctcagcctcctgagtagctgggattacaggcacgtgccaccacacctggctaatttttgtatttttagtagagacagggttttgccatgttgcccaggctggtcttgaacccctgacatcaagcaatcggcccgcctcagcctcccaaagtgctgggattacaggcatgagccactgcacccagctggctcaatatttctaacagctaaaaagctcattttgctgctccgctcctcagatggacttgctcccctgtgcagtgctatatatgtgcttggggaccatgctgggtatgggagtttttagtcctaggacccatatttagagtaattctgagatttctctgattctctctctctatttctagctggatctcttctctcacgggtcctcattcaaatctatcatttccagttttccacagcccccacccttccctacttactacctaacacttggctgctcccttcatctttatgacctgtctgagccttggaatatttgagtttgagacctctgtctggagtcttttgtctctctttgttaagggggttttcttcttgaattgaacatgctttctgcaggagttatcactacaaccctatccttcctttcagaccttgctcaaatctctctgcctttgcaaaaaaccccttcacactccttctctttcatctctaacctttttgcaagtgtatgtcttgtgcaatcagttcctgaaatacactatcctatttgtatttctctatgacatatgcttcatatgaaaataaaatagaaataatggccaaaacagaggaacattagttataatataactgttatgtttgtggcacgtgatttaagtaaaatgaccgaaagttgcccactgacaattgttacttatttcttcgaggagagctcttccaaagtgtagtttaaaggggacaggaaatagctgtaaattaatgaagctggatttgctcacctccatgatgccctcttgcctggcccaatactgcatttagttggtatgaggaaagttcacaaaatctgcaaaaaagcaatgttggttaaatttcctctatttaataatttttttcctaatcttaattaagagcttttaatttattaattaatcttgtcatcactttctataatgagcatttcccattttatttgtggtttttaaaatgtgccattaattgcagaaattaagtattagtatgatttcatactatggtgttattgtcaagctaagagcaggaatttggtatcatttctttattagcatttaaaataccatgttcactaattatccattccctactcgtattccactgctaaattgctgctatgcttggaggctttaggagtcttcttgcaatttcagcggcttaagttttttgttcctctgcttaaaagaacctcagagaagaaggcggggctaagaagattccagttataaaagctttcctcctcctgtggggagagaccagcaggatccttgggtgaaagaaaatcctgcttgacaaaaaccgtcacttagggtatgtcatcaacttttgctttttgcttctccttaaatgttgccattgctgtaacttgtagaatagtacgagtttgtgtctctgggaggggcatcatttagtttttctatgaagatttgaaactaaaggaagacaaaaatttaaattcctcaaagtgttgtgggc

SEQ ID NO: 25750 - DNA, 2300 bp, Homo sapien
ccttcaaccccagtgacgaagcacctctgggagggcccttctggaggggtccacctggcctcagcatcagagccctggaagacagagtctgtctctttctttctttctttctttctttctttctttctttctttctttctttctttctttctttctttctttctttctttctttcttttctttccttccttccttccttccttccttccttccttccttccttccttccttccttcctttctttctctttctttctttctttctttctttctttctttctttctttctttctttctctctctctctctttctctctctctctctctctctctctctctctctctctttctttctttctttctttttttttttgagacggagtctcgctgtatcgcccaggctggagtgcagtggcgagatctcggctcactgcaaactccacctcccaggttcatgccattctcctgcctcagcctcctaagtagctgggactacaggctcccgccactatgcctggctaattttttgtatttttagtagagacggggtttcactgtgttagccaggatggtctcgatctcctgacctcgtgagccgcccacctcggcctcccaaagtgctgggatcacaggcgtgacccactgcgcctggccgaggctgactctttcttgagcctgccactgtgacctcctgctggatgggtctcctctcctcagcccctgcgggtgaccccctcccagatgcaggcatccctatgggtagaactgctgagaccatgcaagagcatctcagttctggggggttcctttttgccccctaagcacatgcacacctctgcaaagtgcattttcagagggttttttaagcaacaaagcagttttaaaaaatcatcacccttcttccttgatcattgattacacagattacacagctgttttcttcctgcctgttaagtagacttgaaattagttaagtggatgaaaaaattacaagtaaaaatgggcatcacagactttcaaaactgtacaggtgagcactgaagctatttttgctttcaaaatgtttgtgttgaaagatacaaagaaaagaatgtatacaggtgaatttccagcttaaaaagaatattgaaaagaatgctcttgtgcccaccaccagcttgagaaatagcatatcgcccccatgtggccgccccgttggctttcctctttcctgtcagaggttataaccactatcctgaattttttgttacccattccttgcttttatttataattttatgacttgagtatatgtatctctctaaacaatacattgtttagttttgttctgttttgaacattcatggaattgtactatgagtatttttttgtgagtttcttttctttttttttttatttttttgctcaaaactgtttttgagattcatccacggtgagacgtgtaaccattgttgatttatttcatggctatgctgtgtcctactgtgtgcttatgtttgttcagcctaagggggatggtatgtggatttctggtctttgctatgaacaacaataccacttgtaacattcttagatgtggaagtcatgactaactggaaaatattatttgagttgaggcttggtgggtgaaggtaaacatccctctttcatggggtctgggtttaagacatacgacctatggggaaacttatgttcaaaggattgggaagataaggcacgtggtcacccttctctgataccacaggacttgcaggggcagaaggtgagaagggaagggggcacattgtgaacttcattccaggagaagggacatccccctttgcagtgcatggctggtggtagccttgctgcagggcataagaagtcagggctggctctggtgccagtggcctgtcttatgaggccaactgtgtgtaaagttgtctgagaactccagctgccagtatctggtgacctgtgggaagtggcactggattgctggggagaggaagttcctagcagccccacctccccagggaaaggcagccctctgaggctgaatatttatcgccaggcagctttgccaggcattctgggtgtgcaagtcattcatggggcaattctgcctttctccaccagagactcttcctcagggaggtaactttactggcaatagtggacaatattcaggaacggttgtatctgtttactgctctccccttcgactatgctgggtgtttattgcctttgatatttttactaacctggtgggtgtgaaatgggatctcactgtggttttcctttgcatttgctcattctgaa

SEQ ID NO: 25751 - DNA, 2300 bp, Homo sapien
tgcacattttttttaaaaaaagatttcttttaatcaagatgttttactgccatgtggcagaaaatttttacagtaatgacacaaatctatgatgacaacaatatgagtaataccctctaggactgtgtagtgcacagcctgtaccactgtacatggtggctggacagtctacatctgcctacggagggtgtactcaccctctgcaggttcctcttgaaaaaatggtgaggatacatccatcctttttcctgactttgccagcagacatgaagagcagaacagccagtgtgctacctactttccaatcctcctggattagcgtggggcacgtggtagggctcacttggcatatgaaagaataaacaaacacgtcattggctcaaaaaggacctggaagaaaatgagtggacatttaaaaatctggaaatggttgatatttccaagctgctgatgtccctctctgtccctttctgtacgcagtggtacgtaaatggggtgaattattttactgacctgtggaatgtgatggacacgctggggcttttttacttcatagcaggaattgtatttcggtaagtagtctcatcacttttcctaattttctgtgttttgactacaaaagtggagaaaagctctgcagacatttcaaacccaagggaagtctattactcattagagattattacacaagaccatggtgtctgctttatagagatacaccttggttgtcgtgaagttgagtcccctctcttccccctcccactgatgtgtaatttaaaaggggtcctgcatgatttttctctttgttcttaaagactttggggagaattattttttttaagtagagatgaggtttcatcatgttgtccaggctggtctcaaatgccagggctcaagggatccacctgcctcagcctcccaaagtgttgggatcacagacatgagcctctgcccctgatcatggggagaaataaatagaaattgagaactttgatttgaatgctggctgtggagtctgcccttccagttacaagcgtatttcctcaatggcacagccagagtgtgggattagaaaaaccaaccacaaattaccaccacaaaaacaatgtgtattccacatcgtagagagattagggtatgccccaaaccatggtttgcattgcctagcctgcatcctaactggcctgtcgtccccaaatagcttttaagataaagctagcaactgggcatggtggctcacacctgtaatcccaacactttgggaggatgaggtgggaggatcacttgagcccaggagtttgagaccagcctgagcaacatagtgagaccctgtttcaattttttaaaaaatataaggctagcaattatatatgagtagtactttcaaatgatgtcattttgtaaagaatcttaaccattcatatttacacttatacagaatgagatggtttacaatgagtgttcgccctccaatttgaatggggtaaaaacatcaatttcctcttcagatagcctccctttctggttgggtttaaggtttcagcatttgagccacagttggttggatatgattctagatcactccagttagaaagcacagatggctttcaatgagcacattagcaggtggttagataatcaaatgatctggtgcaaatgaggtaagtttcattaggggaaagctggcagggtgaagtcccaagtggttatgggggtgggctgggggttggcatcgttatagaagccttgtgagccagggaagttagcaatagcacggttaggttcctgctgtagtgtgtgaggatggcgggctaaagagacaggaacctccgagagctcagtttggtgagatgtctttgcttttcatgtcttttcatgtccttgactctacttgaggccatgaaagcggaagatcatggcctctgctgggtggtgtttctggcctattttcactcactcaaccttccagctcttgcctgtttcttgaaattgggttatttttagaaacaaaactttggaatgttttgtcaatatctcatgaattctgttccttcttttccccctaggctccactcttctaataaaagctctttgtattctggacgagtcattttctgtctggactacattattttcactctaagattgatccacatttttactgtaagcagaaacttaggacccaagattataatgctgcagaggatggtaagagtcaagaatatttgtagtcatcatttttcttgcggggcccagagttcttttaatggtcgataggaggattttgtccttagaacgac

SEQ ID NO: 25752 - DNA, 2300 bp, Homo sapien
gtgtgagcaaacaccttaaaatctctttcttgtaaacttgtttaagctctttgtagattctaggtattggccctttgtcagatggatagatcgcaaaaattttctcccattctgtaggttgcttgttcactctgatgatagtttcttttgctctgcagaagttctttagtttaattagagcccatttgtctattttggcttttgttgccattgcttttggtattttagtcatgaagtctttgcccatgcctatgtcctgaatggtattgcttaggttttcttctagggtttttatggttttaggttttacgtttaagtctgtaatccatcttgagttaatttttgtataaggtgtaaggaagggatctagtttcatctttctgcatatggctagccacaaggaaaaaacaaccaaccccattaaaaagtgagcaaaggatatgaaccgacacttctcaaaagaaaacatttatgcagccaacactcacatgaaaaaatgctcatcatcattggtgattagagaaatgcaaatcaaaaccacaatgagatatcatctcacgccagttagaatggcgatccttaaaaagtcaggaaacaacagatgctggagaggatgtggagaaatagtaacacttttacactgttggtgggagtgtgaattagttcaaccattgtggaagacagtgtggcaattcctcaaggatctagaactagaaataccatttgacccagcaatcccattactgggtatgtacacaaaggattataaatcattctactataaagacacatgcacaggtatgtttattgtggcactgttcacaatagcaaagacttggaaccaacccaaatacctgtcaatgatagactggataaagaaaatgtggcacatatacaccatggaatactaagcagccataaaaagggatgagttcatgtcctttgtagggacgtggatgaagctggaaaccatcaatctcagcaaactaacacaagaacagaaaaccaaacaccacatgttctcactcataagtgggagttgaacaatgagaacaaatggacacagggagaggaacatcacacaccggggcctgttggggggtggggggctgggggagggatagtattaggagaaatacctaatgtagatgatgggttgatgggtgcagcaaacaaccatggcacatgtatacctatgtaacaaacctgaaggttctgcacatgtgccccagaacttaaagtatatatttaaaaaatctctctttttctttccctctatattttggttctcctttctggagaaccctgactaagaacacacctgacctctaaccatttatgcctattttatagatgagaaaattgaggttcagaggtgttgagtgccatgcccaaggggatactcctggtacatggtagagccaagatctcagtccaggtctttctgagacaaaacacagcttcttatgcgtgaaatccacaaataagaacacaatgacctacatacaacacaaactgtacttccaattaagtagttctcctttttaatcattcaaaaactaccttgggatcttacagtgcatgggaatcatcaatatgtaaataccttattatccaggtgatgtgcaaaagtgtccagtagcacagaagattggttaataggatggtgtgtcccagctttttactgcacttgtacttgcttcgaatatttaggacccctatataaaattatcttctccaaagtcataatttccaagaagatcttatacccacactattttcataagtagtcaactgcaagatctttagaaccatgaggggatctcaatacacaacaatttaagattaaccattttgttgaatgtaagattatatcccctccaaagaatgaaattaaaatagagaaaaataaacagcacacgtggaatcctgagcctcttgatgccttttgccttgggctaaagttctcttgtgagttgtaaacttcaaaagtgtcctcaaactggaacctttccataggaaaagtcagcagaaaatattgaccccaggatcaattgtttctgtttaagttacagattgctgcagtcaaaataagcagccagtgtttgataaagacagctcctcttaggaagaactgtcatccccaaacacatagagagacactctctgtctctcgattacaatcatgatttccagaatggagaagatgacgatgatgatgaagatattgattatgtttgctcttggaatgaactactggtcttgctcaggtaaggtattcaccaacctggccacctgct

SEQ ID NO: 25753 - DNA, 2300 bp, Homo sapien
gacctttaactgaactgtcactgacctgtgttgggctttggagatcaattctgtgggtggctcattagttcttgtgaattttctaagatgcttgatgtttttctacatttaaattctctattagccattgaattcagaaatcaggaattctttttgcaaaaaagattttgcaaaatgagattttgatgaggagacgtgttatctgactccctttgcagttatagagaggccatggatatggacatcattttcctcttttggagtcagatattgaaactcaagggcaaggaaggaaaagtaacaccatgaatcccaaatgaagaccacctcctttcccctcagatctgggcctctgctgtgacttaggatgtctgttcttattttgttttcacccatcaccaagaatgaagccctcagtgccatctttgtcttcttattctctcccctgtctccaccatacccatttgttgcaaaacttctcttggctcttttatgctgtctttcgtctcttcccccctttcgcccactccattgctgctcctctgatgcaggccctttaaggaaggggagcgggggacataaagggtggctgcatgtgcactggcatcccgggagaacccccaaatgggggatcagtgtactctctcttagatttttaggaactgaacatcaaatctggaagcctgagtatgtcctaactcagggagtcgcctctctagtccagagtttcccaactggttctgaagagccccagtgttccatgggtgtgagtggccttctggtgggcagatccaggccagcagcccctatttcaacaagaccttccaggctcatctctttgaaatgatttgccgtcactccttatgtgtagggaagtgacacaattcatcataggggcaaatgacatttttgctttggaaaacccttcaaggtgggtcaggctataggagataaaaaggaattattttgccttatatggtgaagtagcagaatgtttgcattttccgcaggcagcccagtggactgagggtgaagagcttgtatctcaatgatgagggtatattaggtttctagggctgccactaaaaagtaccaaaaactgggtgacttaacagaaatgcattgcctcacagttatggaggctagcagtccaaaatcaaggtgttgacaggaccatactccctctgacacctctaggggagaatcctttcttaccacttcctagcccctgatgattggccaacaatctttggcattccttggcttgtaaacaacatcactcaatcctctgtgttcacatggccttcttaccatgtcttttcatgtcatcctccctctaaacaggtctgtgtctgtattccaattttctcttttgacaaagacaccagtcttattggattagagcccactctaatggccttaacctccacagtgaccctatttcctaataaagtcatattctgaggtgctgcagattaggattcaacataccttttgggggcacacagtttaatctgttacaagaggagatgaaggaaatgctcaagaggcaagagattaagaggttgggatctcatgagagcaagccctttggtgaagaatggccagaaaattgttacaaatggggaagtctgctattaaatttgaaggaaatcctggttgggcatggtggctcatgcctgtaatcctagcaatttgggaggctgaggcagatatatcatttgagatcaggagttcaaggccagcctggccaacatgatgaaaccccatctccactaaaaatacaaaaatttgctgggcatgatggtgcatgcttgtaatctcagctacttcggaggctgaggcaggagaattgcttgaacctgggatggggaggttgcggtgaactgagatagtgccactgcactgcagcctgggtgatactgactctatctcaaaaaaaaaaaaaaaaaaaaaaaaaaaaaaaaacagaaaagaaagaaaaagaaattgaaggagttcctagttttaatctataatcactttctttttccccaagcctttaataaaagccttgtgtgtaacagctttgttgtattagtccattttcacactgctattaatataaagaactacccaagactaggtaatttataaatgaaagaggtgtaattgactcacagttccacatggctgggaaggcctcaggaaccttacaatcatggcaggaggtgaagaagaagcaagtaccttcttcacaaagcagcaggaaagagagaagtgcaaaggaggaacttccaaacacttataaaaccattgga

SEQ ID NO: 25754 - DNA, 2300 bp, Homo sapien
caacctgcctaacaagacaacctttcatttacaatatattaaatatttcctctcctcaccttccataacctgttgccaactgccccctgccagaagccccaagcccccatttctttctgtagcttaaaatgctacctaagcttcaaccacctggcccttctttgagtctcatattttgtggaacccctttgctttatgcatgtaataaatttgtgtgccttttctcctgttaatctgtctactgtaatgtttatttcagagactcaaatcatcacaccttcagagagtggaaggagagttcccttgacccctataccagcagtccttggcatttcttggcttgcagctgtattgctcccctctctgcctctgtcatcacatggctttctgttccatatttctgtgtttctgcgtttctatgtgtgtcttcacatggcctccttagaaggacaccagtcatttagatggggatccaccccaatccagtatgacctcatctttgcttgattacatctgcaaagaccctgtgtgcaaaggccaatttcgaggtcccaggtggacataaattttgaaggaacattattcaacctcgtaaaatgttcgacactctcataagtgggagttgaacaatgagaacacatgaacacagagaggggaacatcacaccccggggcctgtcggggggtggggggcaaagggtgggagagcattaggacaaatacctaatgcatgtggggcttaaaacctagatgacaggttgataggcacagcaaaccacaatggcacatgtatacctatgtaacaaacctgcacattctgcacaggtatcctagaacctaaagtaaaatttttttaaaaaaaagttcaacatttcactgtttttttctttttgttttgtttttttttaataagagcttttatggaaccaaaaaaccaaaggaggatgtcattataaattaagaatagagggatctctccttgtggtgctgcacgagagcggagtatgagtctgcggttgaggaagtcatggcaggacaagcatttagaaagtttcttctactctttgacagagtatttgttgaaaggattgccaccacaactgtaaccaaaggaggcattatgcttccagaaaaatctcaaggaaaagtattgcaagcaaaaggagtagctgttggatcaggttctaaaggaaagggtggagagattcaaccagttagcatgagagttggagataaatttcttctcctagaatatggaggcaccagagtagttctagatgacaaggattatttcttatttagagacggtgacattctgactgggcactgtggctcacgcctgtcatcccagcactttgggaggccaaggtgggcggatcacctgaagtcaagagtttgagcccagcctggccaacatggtgaaaccccatctttactaaaaatacaaaaattagccgggcgtggtggtgtgtgcctataaccccactacccgggaggctgagacaggagaatggcttgaacccaggagacggaggttacagtgagccaagatcatgccattgcactccagcctgggcgacagagtgagactctttctcaaaataataaatacataaaaaagagatggtgcattcttgggaagtatgtagactgaaataagttactattgaaatgacatcaacttgaagctgcccattccactgaagttctgaaatctttcatcatgtaaataatttccagatctgtcttttttaataaactaatgataactaatgacaaaaagtagagagcgtagctaaatctattcagtccatcctcaattcaaactatccctcgtgcttctagttgttccttttgtcaatctgtcctgttttcattacgtgttgttcttccttacattttctatttcttctttgaaatcgctttcataacttcaaacatacttattttttaatcttttaagataattttgttacctcaatatcttgaattgctacaggggtattatcaacccagggccaattcatatgttacaagcttaacttagagtttcctgccccacgcaagtaatttaaattcagacttttttttttttttcttttctgagacctgggtagcagcacgtcgatgggttggttttgtttcctcttcattgaaggtggtgagtttcaaagatatcagctttatataaagctctccgttccaaccctaccccaaacttcctctcctgtcttcatgtggatgctaacttaaaactcttatttctgggtcagataactccctgctctcagccctgatgac

SEQ ID NO: 25755 - DNA, 2300 bp, Homo sapien
cccgatttcaacccctgggccacatccactggtgtgttccctcctcctggactgcagtccttgatccagggtgcgtgctccaggctttggttagagttactgggaaagagttgtaccttttcctttccaggatctaaaccaaggatgtgagtccaaggctgccagaaggaaaaagaatcaacacaggggaacacggaggaggactggagagacacctgctcgaaagactccttttgagctcctgggtctagccatgcctgaagaggacctttatccttaacttttcagtgatgtcagtgaatacatttccatttttatttaaaatgaagtaagtggcacagtgcagccaatattttctgttgaactctatccttcgggtggctcactttattcctcattgaaggaaatagcgtgtgggtagagtgggatgtgaggaagagggcaggcaggtgcccagttttgtgcatacagacccttggtcctggagcaggcagtgggcctctaggttctgccttagccgtcacgggcgcctaggccttgttacctcactggacaacgttgggtggaatgataggcagggtcctttccagcctgatacttcgtttccagccccaaatccactcagtagagtggatggtcgctccggctgccaccttgggaattccaaggataggggtggtggtggcttgtccttccttctacaggtgaggtcttctcacatgctttggtaccaacgatatcatatgtcttttcgtggtttgtgaacagaaggtgataaagtatttctctaaaattctagcttttattcataaattcttagcattttcattttcttctcccttgaccccgtttccgtcgtttctgtctcataagctagagctgggaagatgcggtcgcccatgctgcggcctgctgtctcctgcggagcagctctccccagatctgtgtgtttgccataatatactctcacttttctccgcacccagagaggatatacatttgttacatgtttacaaaccagaataaaaccattgaactgaggtgacaggaggtggaacccgtggaatatcagtgtttgtaacccactgcgccaccagctccaagctgtagacacattttctttcagcccccggggctggtgttgccatttctgcggagtagttcacctgcgggcaggtggttctcagttcccaaagtcgggtggcaaggggtgctctcccgaaatgctgacgcttcccctgggatgtcagcagagtcgatgcggacgaaatgaggtagcccaggcgtgtctgggagggtgagctgtccgagctacttggggcaggtaggtcttctaatcccccatcgcggcctaggtccgaccctgccccaaccgccgccaccgggcaagaaaggctgggcctccagggtgccctgggcacaggcctgggctccggagggcggcgctggccgggtgcagccccctggaacccaggcaggaggcgagcctgggcgtcactgggggccggggccggcgacagccgcggcgcgagggtgggaggggacgcgcccggctggatccagagcgcaggctggcagctcaccgaggccagccccgtcccgtcccttctggggtttggaggccccagcctcgccgccctcactccccagagcggcgctctcccagtcaccctgggggccgccctgccccgcctcgcgcccacagagctgggaccccgggacccactccctcaggcaggctgcgtcgcccacggctgcggcccggaggggcagggggcgggctaggacccgggcggggattccgggagccgagagctatttttgcaaacgcgtcagccgctggggaggaagagccggctccgcgcccattgtgtctgcgcggcgcggcgcgggaggggccggggggcggcggggggcggcggggacgcagcgaagcgcgcgaaaacggccggctgggcggggaggaccgcgcctgacccccggcggcgggcggggcggggcccggggcgggtccgggggcgggtccggggcggggcgcgagggggcgggtccgggagctctccggccgctgcaggctggcggctgctgcggcggcgcggggactgtgaggctgccgagcggacagcgactcccggggaagcccgcgctccgggagcgggagcgggagcaggagcaggagcagcgccgtcccaggccagaggcgagcgccgggcgccgggagagcggagagcccgggcagctgccggagcgcgggggcgcggcccgaggaaaccacagagcgagcccaggcctggggaggg

SEQ ID NO: 25756 - DNA, 2300 bp, Homo sapien
ttaggtccgcttggtgcagagctgagttcaattcctgggtatccttgttgactttctgtctcgttgatctgtctaatgttgacagtggggtgttaaagactcccattattaatgtgtgggagtctaagtctctttgtaggtcactcaggacttgctttatgaatctgggtgctcctgtattgggtgcatatatatttaggatagttagctcttcttgttgaattgatccctttaccattatgtaatggccttgtctcttttgatctttgttggtttaaagtctgttttatcagagactaggattgcaacccctgcctttttttgttttccatttgcttggtagatcttcctccatccttttattttgagcctatgtgtgtctctgcatgtgagatgggtttcctgaatacagcacactgatgggtcttgacactttatccaatttgccagtctgtgtcttttaattggagcatttagtccatttacatttaaagttaatattgttatgtgtgaatttgatcctgtcattatgatgttagctggttattttgctcgttagttgatgcagtttcttcctagtcttgatgatctttacattttggcatggttttgcagtgggtggtaccggttgttcctttccatgtttagcgcttccttcaggagctcttttagggcaggcctggtggtgacaaaatctctcagcatttgcttgtctgtaaaggattttatttctccttcgcttatgaagcttagtttggctggatatgaaattctgggttgaaaattcttttctttaagaatgttgaatattggcccccactctcttctggcttgtagggtttctgccgagagatccactgttagtctgatgggctttcctttgagggtaacccgacctttctctctggctgcccttaacattttttccttcatttcaactttggtgaatctgacaattatgtgtcttggagttgctcttctcgaggagtatcttcgtggcgttctctgtatttcctgaatctgaacgttggcctgccttgctagattggggaagttctcctggataatatcctgcagagtgttttccaacttggttccattctccccatcactttcaggtacaccaatcagatgtagatttggtcttttcacatagtcccatatttcttggaggctttgctcatttctttttattcttttttctctaaacttcccttctcgcttcatttcattcatttcatcttccatcgctgataccctttcttccagttgatcgcatcggatcctgaggcttctgcattcttcacgtagttctcgagccttggttttcagctccatcagctcctttaagcacttctctgtattggttattctagttatacattcttctaaatttttttcaaagttttcaacttctttgcctttggtttgaatgtcctcccatagctcagagtaatttgatcatctgaagccttcttctctcagctcgtcaaagtcattctccatccagctttgttccgttgctggtgaggaattgtgttcctttggaggaggagaggcgctctgctttttagagtttccagtttttctgttctgttttttccccatctttgtggttttatctacttttggtctttgatgatggtgatgtacagatgggtttttggtgtggatgtcctttctgtttgttagttttccttctaacagagaggaccctcagctgcaggtctatttgagtaccctgccgtgtgaggtgtcagtatgcccctgctggggggtgcctcccagttaggctgctcaggggtcaggggtcagggacccacttgaggaggcagtctgcccgttctcagatctccagctgcgtgctgggagaaccactgctctcttcaaagctgtcagacagggacatttaagtctgcagaggttactgctgtctttttgtttgtctgtgccctgcccccagaggtggagcctacagaggcaggcaggcctccttgagctgtggtgggctccacccagttcgagcttcccggctgctttgtttacctaagcaagcctgggcaatggcgggcgcccctcccccagcctcgctgccgccttgcagtttgatctcagactgctgtgctagcaatcagcgagactccatgggcgtaggaccctcggagccaggtgcgggatgtaatctcgtggtgcgccgttttttaagcccgtcggaaaagcgcaatattcgggtgggagtgacccgattttccaggtgcgtccgtcacccctttctttgactcggaaagggaactccctga

SEQ ID NO: 25757 - DNA, 2300 bp, Homo sapien
gactggtttgaggatgcttgaggcatgactatagcaagtactgcgcatacatatgtggacatcgtaagacacactctctgcttccccaggcgaaatctgtaatgctttgtttattcatgttctattctgcgtttccatggcactttgttctttgtggtttttagggtatctttctccctctctgctcagtgaactgagctgcctggacaggccttgagttttcttattcgattgttttttgtgtgtgtatgttttgccttagctccctcactagtatagtcaaggagcttttcatgctttgagccatttgtggcatttcaggaattaccttcatagcttttgtccattttctactggcttgtctttttcaatgtttttataggcattttttaaaaaacacagtgtggatgtcatttgggatagcagtactaatagtagctaaaacttactgaaagctactgtgtgccaggcagtctgctgagcactttacatgctgcctttcatttttacactcatttaggaaactgagtcacagagaggcgagataacttgccagagattcaagcacactccagacacatccctacaccaatcagacctcctagccacccagaaactctcctctgctcggaggcttctctgcttcctccacctgccccttcgcctcactgcctcctttcaaaatctgcggcatgtattttagggatactcgtatccattttcaggaattccatgatctacacacagatgacaccaaaatcggaacagcaatgtccacccttctcccgagccctaggtcggtgcctctgtccacctgtgtctcctgaaacttcaacacagacttcaaatggagtggcagaaaaccagattccttagggaaaggaaggtctcccagacggcaggagcggcaggccttaggggcagccgcaggggctcgggagtctgaacatacccggtttgaattcagactctggcacgccccatgcgatcataacatagtgctgcacgtctcaagccacctataaaaacggggacaataacaatatctgcctcggggttaatggtgaggactgactgtgtgtgtctcgctcaggaccaggagcaacaaatgttggcttcttccccggcaaagacccgcgctttctcctgggctccgggttcccggggtgggggtgggcgcagtcccgagggccccaggcagtggcgcagtggttagaccccagcctctggagtcggcctcggttcagattctggttctacccttctcctctgtggcgaaccaaccctccgagctctagtttactcgtgtgaaatggactagccaaaattgggatttttttttttttttaggattagatgtgtcggtccatagacgttgctggccacatagttaagtggtgcgttcactcactgggcattgatggagcgcctactacgtgccaggcctgttttacgcgccgggggcccagaggcgcccaggtcagacaaagtgtaaacgattccgaccagagcccttcaatctgcattccgcttcgcaggaaactctcctccttttatgattttcagccggactgccttccctgttgttagtttgtaactttcgctccggcccccgcagcctcgcgcctgccttccctccactgtcctcagccaaggtgtagtaaagcgtctccgaacgcggcgcgaccctcgcccacgcccgctcgcggggggaccgcaccgccccaggggtcctcgctaggggttcccggagaaggggtgggagatgggggtgcgggggggcacaggagcgcgggccagcacccagacctgctcggtaccggggacccagacccgaggatgccgggcggccaaggccccgctaccctggccggctccgggcggaggaagaagaggaggcgcccagactggatacccgcctggacccggagccgcggcaccacccccagcccgccccacgctcgccagcctcagacggccgcgccccgccccgcccctctcccgaagccccgccccggcgcgggaccaccccctccgcggcctcagctccggtcctggccccgccccccgcgcccccgcccccgcccccgcccccgcccccgcccaggcgcgggaccaccctccgcccgccgaggcgggggcccagcgcgcccggcactctcggcggtccgggcccctcgccactaccgccgccgccgccgccgtgagtcccgcggagccgcgcgcgcccccggctgggccgagccgctggccgacgagcggagcctcaggagccggcggggacgccatgcgagccaggt

SEQ ID NO: 25758 - DNA, 2300 bp, Homo sapien
tctgagcagagcaagcaggggcctgcggaaggggttaagaggggctgggcaggtgaccaaggtcaccatggcagggataagtcacgctgatggcattgtgtggcaagaaggacacctgcctctggtcttcctctcagtaacacacaacccagtctaactgggagaaaaacccccagccgaggggcgtcttacagaatacctaaccaggcctcctctactgtcaaggtcacccaaaacacacaatgtctggggagatgccctagccaagaggagcttaaagagacacgacacctaatgtcatgtggtgatctggatgggatcctggaacagaaaaaaaggacctcagggacaaacataggagacccggatgaaggacaggctttattgtttgatgatagtgcaccgacatccattgtgacaaaggtgccgtcctcctgtaagacactcacagggaagccgggtggcgggaggcctgtgggaattctctgtattatctccacgacttttctatgaatttaaatctatcctaaaagaaaaagcttatttaagaaaataggtaagagtggttaggaaggctggttggaggctggggttccaggcctgaccctctgcacccgtgtctgcttcaggcaggtgacactgggcacctcctgccggggagaagctcagggtccccatttcctggccgggaacttccctttcctacagaccctcgcttggtgcgccatggcagctgggcccaggcctcccagttgggccgaggcccatctcttttcccaacagcacatcctttgttctctccagcccagacgtgtagaggtgagccaccctcctggccagtgaggagcttctaaacacggaggcagatcagctttttgccgagtgaacttgagaaccggagcagagctgcagggacaatggtgcattattaaactgctctgaaactcagagcccagagcacccagctctggggcgactggcaggtgttggacctgtggccgtggtgccagcccccactaatcccattagcgacttaggggtgagtggatggaaaacaggatgagagtgtctctcccccaaagagggctggttcaagtatgaatattcacagccacaccgaggcacctgctccgtagatgatttttttttgcttatgcagttagtgcacagagtgagccctgcgctgggaaagacacgcacacgcatatgcacacacatgggcacacacacacatgcgtgcacacacacgcagaccctgagaccctgcacttgagtttctagtcttaagcaagaagggtgtcaccgaggttgtgtcctgcagctgctagtggccagtctgtcccacttggatggtctgtttctattttattttattttttactttttttgagacagagtttggctcttgttggccaggctggagtgcagtggcgccatctctgctcactgcaacctctgcctcctgggtttaagcaattctcctgcctcagcctcccgagtagctgggattacaggcatgcgccaccatgccggctaatttttgtattttttagtagagaaggggtttcaccatgttggccaggctggaatcgaactcccgacctcaggtgatccgcctgcctcagcctcccaaagtgctgggattacaggcgtgagccaccatgctggcagtctgtttctattttggcatttcctcactgcacctggagaagagcttcattcattaattcatccattcattcattcattcaacaagtacctgacagcctgtacagcagtggtgccaggtgaggagggtgggtaaaaatgcagggtcctcctcactgcagtcactgcgggaccaggtactcttttcctgcgccccacactgccccaaggccccactggtcatccgtccagcactctgtgctcgctgactggtgcggtgaactctccggctgggctcctttcctgctgcaggtgccgcgtctctttcttaagcctgtgtagaaagttcttttgtccgggtgacattggcatgattgaatcagtgccagagccaaacaggatgtggttctgggcgactcccaacttccagcaaatccgtggttgttttcagttaccttaagagggacaactgaaacagagacaagcaccccaacagtagggtgcttcgaggtcctggaggggagccctggccctgtggagagagaccgagtcgtgcagcgtccgtggcctgcatttgaaactgaagggcaagaggctggtgagatccgagagtcatgccgctgcgtggaggaacatgctgaacctctggagga

SEQ ID NO: 25759 - DNA, 2300 bp, Homo sapien
gtcctttgtttctgatctgggagtctcatgtcttctgccagcatccatgaattgtggcaggctaacttgttagcttacaagtaggggaatagctcagcccctgagcagctcttgataagagctcatgcctgtggggcgaggccagatgggagtcattggagggttttgagaaaaggcatgacaagtccggacgtaggttttgtaagtttcaccaggtaggaagcagtgagctattacaattgttagatctagtgatggtccagctagatgatcctgacttcagccgagtggtgagaagtcgtgggattctggatcctctgaaggtggagctgacaccatttgggatatgagagaatgataagcaaaaaggacagcactgaatttttcgcctaagcaaatggtggcctggagttgccgatgactgggatggagaagatttttaggagatgtagccggaagggatggcaggagttcagctggcgacatgctggacttaaacaccagctaggcttcaggaaatgttgaggatgcaggtggatgtgaatttgttattcaggggtgaggtcacagctggagatacatatgagcttcattaacctgtgtatgatattcaaagccataagacaggggcgatcacagcaaatagcaaagaaaagaggcctaaccataagccctggggccctccatatttagaggttaggggagtagaagaaaaccacaaaagggacagtgaagccagaaacacagcaggaagccctggtgagcactgggagaaggggtttccaggagcgcaagtgatcagctgctgctgataggtcaggtttggtgaggccacatgcctgcctcttggttactagagttacttatgcgtggacagcccgaggcatggagtgatgacctgtgcctaagtgtcaaggagaagacaagcaggtccggaatggtaaaaatgtcagcacatctttgggaagttgtggagcccagccagtaagccaacacggctggataccagggtgcttaggccatagcaaactgcatgtgagccggtgaaggctcagcaggctttaaacggggatgccggcccggctggctgagtttcagaaagaccacgccgatggctgggggcagggactcagccagtgtcctcaatccaggaccttgtgggaccgcccggcagccagtgcttccgcaaatctgaagggtcccatttgcctcaaagcggcgagacgagccttccaagcgctgctgcagtgcggtcccagctccgcggggggtccccggggatgacctaaatcggggattgcggtgggacagacggtccaggggctaaggaaccccgtggagcaggcagcggcgctcaggaggcagcagcttgagatccacggctcgatttttaaaaattgtaagggagaaggatgcctcgaaagcctctgtggtattttgtcgcatctcgcacccctgtctaaacttcagtccactcgtggagtgtggacccccacgccgcatgggctcaggaggcgcttcgcctttggaaagaaatcgcatgtattaagggaaagcacgtgtgctactttgagaaaggaggcagaaagttaccaaacgcgggaaggggaggctcgccaaccaagcgaggccgtgggacactggcgagtcgcagaggctcctggagccagccgcttggaaacaaacaacaacgcggcgggcgaactcccgggcagcctcccccgtgccggggcgcgggggccgccgcgagaacccgggcaggagctggcaggcgcggggcctggccggcgggagggtcccgcaccccggcccagtgtgaacaccccgcgcacccccctggcccggcccgccgggggcgcggactacaagtcccaggaagcccagaggcaggcgcggggcggggcctggcgcaattccccgggatccggcgcgctgggaagcgccgaggaggacgcagcgccggcggccggagggcggcaagcgcgcgggcaggcggggcgcgggcgcgggcgcgggcgagggcgaaggcgggggcggggccgacgtgggccggagccctgcgtgccagggagggggccggccgggcaggcggcgggcggcgctcggagcgggctccgcggcttgcaaggcgcctgcgactcggtcccaggtcggcgggcggcgcacggcgggctcgcgcgggggccccggcgcgccgggcggcgcagtacgcagcgcgcggacccacgccacggccaggagcccagagcagcgcggccacactgcccaggggtcggccctcggccccggcgctcggagcg

SEQ ID NO: 25760 - DNA, 2300 bp, Homo sapien
tatttctaaagctgttcttgggtgctgtttaatgttccagtggaaaaaaaaaaaaaacacctgtaatactccagtaacatttgactagtcgtgaaatctagccatttagatttttcaacctcaatttgaccgttagttgcaaccaagtgattataaacacatgataattttttaatgagaattatctgtaaacgttgagatgatgagcctgctgctatgttggtttaatagataaagcagaagtcagttcagccatcttcactgatgattttcagaattaacctgatcactcaccatggaaataccattcccctttgttcttgtcttcctatgtgtgtgacagtccctaacttgacccctggcatggaagccatcagtgaggatcaggtgatattgtctaaaaataggtaaaggatgctaacattattattagatgttcaaaaaaataataaaagggaagcatgttctgtttcattttgagcaagaaaaaaagccgtaaaatcagaataaggagatagtcatgtttttggcattgatgaaattggcaggacaaagtgtgtttttgagttggctgtatggaactcagaatgtattgtcccatattgttataattaatttgacaagaaatccagggcttaccaaaagccatactgggcctgcattggagcctgtgttccagagaaaatacctttctgaataagtaactgtgatgcagggctgggacttacacccggtctgggagcgccctaaagaggacaagcccgctggcttctgtggggagtcactgtctcctgagggcagcgcacagaggctcatgtgtgtcccttcactcacagagcccaacaacagcacagcacatgctgttgacacaactgttgctttcctaagaaacctcacggcatcagatattttaacaaaaccgttctttaagaggaaaatggagactagagcctagaaagtttcacgtatgtaattacaaatcatttttcctagagaaattttaccccaaaagtgttctgaggctgtgggtgcatttacctgtttattgcggattaacagagccattgaatctatcccaatggaaccaccatcacacactttcacctgtgttcactgctcctcccgtctgcccatgtctttggccttgatcacgccatctctctggaagcccagctccaggtccaggaaaccagattatagcagaccactgtgcccctggccagggaaccgcctgctctggtctggaagccccggggccatgctcgctgtgttagtcaatgctcttttggttgcatgagatagttgaccaacttaggttagctaaaatagaaaggcagggagggggtgggccagtggtgaattattaacttcttaacttgcatctctggagctgccaaggggatggatttagttttagaaagaccctaatctcctgatgcactgaagttcttgaggagccctctcccccatttcttgcctgtgttgggtgggcatcatgcccagcaaggtctccccacttggtagcaagcccttcatggtggtttcggtccttagtgctcagatgtggtgaggagggaaaggtgaggatttttgtcaatagctacagcaaaagactctaagtcagttccatgtggcctcatttgagtcaggtgcttttccctaaaacaatcagtatcacaggttggaggggatgttttgattgttctgtcccttcgggtggggagatgaggtcagcctaattgagctgagtggcttgagcaggagtatgatagactagggctgggcagaaggtggactccagaaaaggccgggaggcaagtcccaaccctgtgtcttcagggtttgtccgttttaaacattttagccagggtggggctggggggagggggtgttgtgcaatgcagttctctttcctaattcacagatcacgttacacccagcttgcacggtttgaacttgggtgctaaaggagaagcacctggggtatgtttgaattcaccccaaagctacctctggtaagtgtctccttgtgacttttacagtctcacttgggctgtggacctctgacattttcaggcaagtttttgcttcttaatctccaatgctgaaagcttagtctttggaatgttatacattgtttggatcttaaaaatgtcagctcacaaaataatgtttttacatccttcctccaacatcatcaaccgcattagctcaccaccactcctcctctccgcttctcccccaacctgttttatcggtgtcaggaaaggggagcgatcagtctctcaggaggtacccat

SEQ ID NO: 25761 - DNA, 2300 bp, Homo sapien
ggaattgtgtactttgtggcttttgttgtgccttttcttctatcagcaaacatctacttgttgataaacccgtgactccttcacaagtgtgggtgttgccctgcaattaaaaggtggactgcttgcctgtcatcccagctactcgggagactgaggcaggagaatctcttgaatccggaaggcagaggttacagtgagctgagttcatgccactccactccagcctgggcaacagagtgagactcttgtctcaaaaaacaaaacaaaacaaaaaggtagacagcccgtttcctggaagccactgggatctcgctttggcctctctgctaccctaccctgtgtcccagcagcttcctcaatacacttggccaagtttccttgtccctgagacagaggcttccgacccttgcatagtgattctagaacttgatccaactatctctctgcatcgggtaactgccattgggcagttaaaagacagcagcccacttctccaccctgcctcggtcccttgcatccagcatgtgagtttatttggcagttcttctaaaattacgttggctgagcacggtggcttgtgcctgtaaccccagtgctttgggaggctgaggtgggagggtgacttgagactaggagttggataccagcctgggcaacctagcaagacctcatctctaaaaaaattaataaatgaaatggaattatggtcacctgaacttaattacttttaacaaagacaaatttattggttttcacatctaaagggaattcaccaagatgctgccaaagaaagagcatatttattcccacttcctgcatagtcttaaaacacttgaaatgttgtttttccaagagtaattttcaaatacagtcatttctctgtattcatgggggattggctccaggaccctccagaataccaagatcctcagatgctcaagttccttatataatacagcatagtatttatatataacctgcacacattctcccgtataccttaaatcatccctagattacttatacctcatgcaatgtaaatgcaatattttcttatttgtattttttttaattgttatattgttacagagggctgagtgtatattctttcttaacgtgtgatatcaagtaatatgtgtccagaatgcttaagatactgtgtttgcagacagggagtctcattaccagaaataataataataacaataataataatgagtgatgatgatgctgcactaaaggatcagtaactcactggccagcaggcccatcccccggctctcagttgcttgttcaccttccccgttccctgcccatcagccagtttccaggtagtgtttgactccacagtgagttaagtgagctgccagagagcagtcactgtccaccgaggcttccctgtagttctctgattgctgctggtcatttgcttccaaggcctagaaagccagataccccttggacatcttcctggttcttagcacaacagttgacctttttacttccagttttcacctgatttttcaccagagagcttcagtcttatctagattttaatgatattcccatctgagacagaaaggttattacaaaatggtttcctactccatggaattttacttggaatttataggaggagcctaatgtaccctctgataagcaagagttcaaaaaatcagattttgtgtgtagacttacttcctaatgacccttgaaggaggcacctgctgtgtctctccttacatctctaggtcctggattagttcaggacacagaagcaaaactctgatttaaatataataatgatgttaccagtactctatagataaaaatctcatgatttttaaagtactttccacagtggaagggtcatagggttttaactcatgacgtctgatagacccttttgttctaggttgtaaaaggtcttttttttttttttatctctcttggatgtttaacattttcaacaggattacatgcagaatgttcatggtaaggagattgaccttctgagaaccactgtgaaagtcccagggaagaggccaccccgagccacgtcagcctgcgcacccatctccagccctaaaaccaatggcctatccaaggacatgagcagtttacacatctcacccaattcaggtaagcttacagcaaatgcactaacaaatcaagttcaacagcaacaggtggtccaggctcgaggataatgttggactcctaggttaagtggagacagtaactatcacattacagattaaggtttagaaacctgatcacttctgtggctgatcatttcc

SEQ ID NO: 25762 - DNA, 2300 bp, Homo sapien
tagtatggtacatttcttagagttcatgagtcaatattgatatgtttttattaaagtccacactttatttgcatctctttagctttaacctcatgccgtgtctctgttccaggatccaaatcctattccattgtcatgcctccttagccttctcttggctgggacattttctcagacttttcctgtctttgatgaccttgaaggtcttgaggcatgctgggccaggtgtatgataggaatccctctactggaatttgtgcaatgcttttctcaggtttcatcttgagttacaagttttgtggagaaggaccacagggtgaagtgctatttccatcctatcctgtcaagggtatataccatcaactttatttatggctgctgatgttgaccttgatcctttgacttgaggtagtgtctgtcaagttattctgctgtaaagtcattgtgcccctccacagcccatactgaacttttggaaggaagtcactgtgcacttaaggagttgggcgttagaccccctgtccttgagggtggggtgtctatgtaaattttttagaattcttttgcaggggagatctgtttctctcccccatttatgactatattcagttgtctatttgtattcatgtggacttgtgaatatttattttgtattctaggctgctatccaatactgctgtggcccagattattccacccgtggctcctgggggctcctctggctgctcccacaccctttgccctacaccccatctctgtggggtttcttttgtttgagcactttccttcctttctgtcagtacaaggtgcattttgtatctttcctgccacaatcttagaatcggctgtttcccaaagagctctggttccttttactggagaatggtattagaaaccagtgtcttggagctaggcgtgctcgttgcttctggggtgccatttcttggttctcttggccaacagagtaaagaacgaaatgtgtgtatactaacctgcatatgcatatatatctacaaatatttctatatgtaaccatctgtatctatatttaacagatttcatattcttactggcataaaattggaaataactaagtgttttaacatgaggaatggctacaactatgttaatactacctccatgatgcaactgttataagggacaggttggaaaactgtggaaacataatactttacattaaaaagtagtattttttattgtagagtctccaacaaaggtctctgttggagttacgcttacaatgtgatagttgtgtgtgtgtacggatatgaactttaaaggaaaaatggaaaaggtagataagccatggcttattcatattaaactaacataaaattaactttgcttctgccataatgttagtcttccagtgagttcttgctgaaacctgaatgaagttgatgtatttaattttaaatgaaagaaatgagacactttttattccgttgttgtgttagccctgcagtgctttttcaggccctcccagattaataatgaccttgtttactcattgacagtaaccaaagagcctgctaaaaaagttgtgaagttaaggtcaaagcagttttatgggaggaaatctgtgagtgtttaaaggaaggatttccataatagcaagaagagcccaaagttgggaattcttcttttgcttttccactctgatctttgtattaatgcttgattgactgaataaatgccatgtatcttatggttttcatgatgatttctcaagccacacgtcaggatacttttgggaatttccagagaagtccttaaatggaaaagctaaaattatctctagtagatattttcaccagtcttcagttcagatggcttacatataagaggagcatgattgactggataaccctgaagtgtatcatttcacccgctgtagttgtcagaactcaactacaaagatggcagatcaaatacttcaagaagggtggttgtttgccattgtggaggctggtggtccagcgatcacagcccctcaattacggccctgcgtgagagcacaagcagcagtcattacataattatacctctgattagttggttgaactggccattgcctttgaaatatgataacacaatttggagttttattaaaaaacaatttttttggaatttttgaaaaagattttgtgtttaagaaaaaagaaccaaagggcctgcaatatattctgttagaggagattaaaaagaagaaagggatgagggaaaaaaagagatgaatgtttcccattatcactcatttctgtctcaggagggctaag

SEQ ID NO: 25763 - DNA, 2300 bp, Homo sapien
cggagcgatctattactgcggcctggagtggggaaacgcgatcgagacgtctttgtccgggtggtggtagggagggaggaggcgaggaggaggagagggctggcggcggaccagcgagttttcccagcgtcccggggcgccaaggacacaccctcccctctttcctccaggtctgctgggtgggcagtgggtctccggcgggactcctggcagaggagctgatctgggattaagacgtcccccggggggccttggggctagagcgagagaaagaggaagaacgcgaaaaaagagcttcaaagaatcgggtcgataaattcataaagatcgatttatctttatctcccaattaaatgtgcttgtaagtgatacataacacacgtccaacacgggccaactccccaaccactagctcctcggcgtgagctgatttttaatgaccgaactaacaatgcccttctttccttctccccaacccggtgctgttggcggttcagggctgacgtctagacccgggaagttgaagcccgggccttggagactcgaggaagccccgctcgcgctggtgcgctctgcacggtctgccgttgtcaagaagtgattccatttttaaagggaagacaagagctgaaagttttttgtttgaaaatggaagaggggataagtacgtccctagtttccctccaccccaaaattcccttactttcaaatttgggggtctttaccgttgtcgagaacaggggaaacatcctgaggggatcggctccatcctgcagttagcaaagaggaaccgcgcgccctcgagtcctcgcgctggaaaccgggcggcggcgccagggtgagcactccttgcgttcgcaacgtgcttaattagcgcctatttacaaaacgcagcttttatttgagcaaacatcataaagctttcatcaggataatctcacgttatacaatctggaggcacagcaactccccccttcctccccgaggatggagcagataaaggactctctttattatcataattatcgtggttgttattttggtgcgcgctggcaaagtgtgtaaataggtgcgatgattaagaatgtcatgaaaaatgagagacgggatcgctcacgggagggcccagcccgggatgggggaagcagcagcctccccgccccacccggtgcgcggacctacagcgagcaacccggcgggtttctggcggcgggcaggcgctgccagctcccagccttcgccccgggggtggctccggaggggcaggaccctgcccccaactccaggaccctcgcccggaccccaggcgcagccggagcacccagcgctggagtgagccgcaggcaggttggttccatggcaaatacagtaaaagaaataaagcgcccccggcccagccgtgggggtgcgggccccggaggctacccttcgaggtggcctcgacaaggctgcagggccccaaggtccgagccttggaggtgccatccgcccgtctcaagtttgcgcggcacgggctaggcatgcaggctccggctccccggcccgcgcgctccgacggtggcgcccgcagcccgctcgaggccagcttgggtggaaagggcggggccccgctttcgccccacccccgccccgctcagccaatggccagaggcgcccagccccacgtgaggcgagccgggccaggcggcaggcaaaatgtgaatgagaaagaggagcgcgatttaaaggtgctggctgcgcccgccggagataagtacgccggcttcgcgcgctccccagcggcccgcgggaggcgacggacggcgggacggacggacggacggcagcttaccggggccgagggccaaacccgcgaagcgcgcgggctccgacgggcaagcggcggacgggggctccggcgagccctcggggcccgggcgccctctccactccggggcgcacggcctcaccccgcacaccccctgcacccgcccggcatgcagcgggcccaggactgaggggcggaggcgtctgctctccgggtcccgctcggcccctgcccggcgctcccggcggtgctcccggcgtccggcgggcttcccggcggcggcgcggcgcggggacttttcgcctctcgctggcctctaccgagcgcgtctatgagcgcagcgttcccgccgtcgctgatgatgatgcagcgcccgctggggagtagcaccgccttcagcatagactcgctgatcggcagcccgccgcagcccagccccggccatttcgtctacaccggctaccccatgttcatgccctaccggccggtagtg

SEQ ID NO: 25764 - DNA, 2300 bp, Homo sapien
gaactgttatcattcatttgaaaaaaaaaatgtggcattactcatcttcagcaagggatgcacatttagggatcagttctctgtccctggaagaaactcacaggtaccagggccccagatcatgtctttgggaaccccgcatctgtcctatggagcctcctaacacccagggacacttatctggaacctggtcattttcagtgtccagtggggcctccttcacacatcctcagggtggccacaacccttggaacacacatctgctcatcactggtcatggcaacagagaacatggatgggaaaaaaagctaaaagacactcttcaaaccgagaaagacaagcttcacttatttcaggtagtaattactctttttttttttttttttgagatggagtctcgctctgttgcccaggctggagtgcagtggcacgatctcggctcactgcaagctccgtctcctgggttcacgccattctctcacctaagcctcctgagtagctgggactacaggcgcccaccaccacacccagctaattttttgtatttttagtagagacggggtttcactgtgtcagccaggatgatctcgatctcctgacctcgtgatccacccgcctcggcctcccaaagtgctgggattacaggcgtgagccactgcgcccagccctttttttttttttttttttttttttttgagacagggtctcactccactgcccaggctggagtacagtggcacaatcatggctccttatagtcttgacctcccaagctctagtgatcctccccaccttagcctcccaaatagctgggaccacaggtgcatatcaccatgcccagctaatttttttttttttgtagagatggggggacccttgctatcttgcctggtctcaaactcctggactcaacaaatcctcccacctcgacctcccaaagtgctgggattggccagacacagtggctcatgtctgcaatcccagcactttgggagaccgaggtgggcggatcacttgagatcaagagtttgagaccagcctggccaacaaggtgaaagcccatctctacgaaaaataatttaaaaaaaaattagcagggcgtggtgatatgcacatgcctgtaatctcagctacacaggaggctgaagtaggagaatcacttgaacccaggaggtggagggtgcagtgagtatcatgaaatattattcttcttttgatttttcccaactatttataaatgtacaaacaattcatagcacccaaaccatacaagagctgggagtggagatcgccaactagtgacagcagacagaccctttcagccctatcaccctgagagtaggtcctgctacctggcaccgccttcgcttggagaaagactaaatcctgggcagccaagaggcctctctggaaagtggctcctgacagtgctggcccagttctgagtaggtcctacctgatgcaactggaagccagcagagtggcgtgggggacagaggatggactcttgagacagacgcacatgggttccaatcatagcacagctgctaactagccaggcggccgtggccatgctatttccttcatgtggttgttattgggagtaaagaaataaatatggtaatacttaaaaagcaactggtgtacatcgggtgcttcataaatacttgtttctttcctctgagcataagacttttatttccagattccaaatatagtactttaaaaaaaaatctgagaggatattacttatttgctaagtattctggtcaccaaagtcatttttgtaagtgagtcacttactccacataaacaggtaaatgcaatgctatttaagactggggaatcatctgcccaacagcaggataaatgagtccatcacaattaaatgtgtgctgggagtctgccctcggtgcatggagagctgctttggagctatccagatgtgtctgtctccagagttagcatctgtatcatcacaaagagggtggctgagtactgcggcatcccagtgctcacatgcccctggtcatatcaagtaaccattatcacatcggagcccacaggagttataaatataccaccatcgagccccaactggatgacaattgagtaatgacaatagaaatagctcacactccataagaccatctttcccgttcctgaagaactcttctgaaatcgacggcatctcaatggagagacagccagggccagtgagaggaaaacttcaaatatttcaaaagacagagaaggatcctcaagctagagcagggtccccggtgcaggagtaccacact

SEQ ID NO: 25765 - DNA, 2300 bp, Homo sapien
gccattgctcctccacttggggagtctggagttggctgttgtcattgcaaaatccactggggttttatcatagaaggcaggtcgttactattatcaaagaatagaaggcttgggaggatcaactcaagttcttcactggctgagccattccccctgcacctccttagactaaaaccaggacatttccatgattgaaaggcagagtaaatacactacctgtatcaaccaagaatgccttcagttgtatgtaacagaaaacacacagaaagtgcttatggcataaagacaagaggtctggtggctggggccccagagctggggcaggggttcagaaatgtcatccccagtctctcccccgctttccatcccactctcctttctgtgttaatccttcatttcatatctgttgcctcccagctgtgatgtggctgctgcacctccagatatcatgtccatgttcaaggaaacaagaacaggaaagggtgttgccagtcacttctgtccctcttgatcaggaaagcacataacttcccagactcaccccagcagccagaactgggttgcaagggagactggacattgagtgcaggcaaaggagactgggactgacactactgacctaaatcaacatgactcatccccaggggctgggcacagtgcccccaccaagaaagccaggctgtgttgggcaggtggaaggagaatggatgttgggcaggaactacagtgcctggcacctcaagtgcagatggaacagaagctggaaaatcacacaaatgagctgaaaggaggaagagggtgtattagtcagtgttctccagaggaacagaaccaacagttatgtagggagagagagagaatttctcttcaagaattggctcatactattgtgcagacttggtaaatccatcatcagcagggtgggctgataggctggagacccagggaagacctgaggttgagaccaaaggctgtctgccgccagaattccttcttgctcagggaaagtcagtcttttgttctattcagacgttcaactgattgatggaggcccacacacattagggagagccatcggcttcactccaagtctgccggttcaagaaattctaatctgatcccaaaaacaccttcatagaaacatctagactagtgttgggccaagtctctgggcactggggtcctagccaaattgagacataaaattaagcacaggggagaagaaagaaagtaaggaatggaaaagatggcgagatagaaggcaaggcgaaggaggccctgtaagctccacggcccgccctgggccctcagagaccacagcacacttggcatcagcagagaagcttcaggcacagctgtgcttatgcacaggttggcacacagagacccaagcacactgaagacacaggtcaaggagagaaagccccacctttgcccctaggagtgcacagaaatccccctgagggctccacacttccacaagtcatggaattataggctttgagcaaagtttaccagccttgaggcatagggaggtcacaggtaatatttaggttacttttttttgtttttctgtgatgcttccgtcttcctgagatcagccagtccttctctgcatttggaaaccaaagattccattccattctatgcgtttgaggcatgtccaatttgcaggtgaccagacgctccttttagaggaagtgaaggaacacaaggggtagaatattagaaaatgttcctttccacagaatagaggtccaagcccagtgccaggaagaggttttcaaagtttcaggagagagcctcacttttgataaaagaagatattattcaacaatacccatgaaagctgtctttgaaaatattgtctctccttcttgcaccactcacaaacatgtctgctgcccccatctctagaataatcctttgctgaggcctctggaaagattacttcacacctccctgctggcaggtggccctccgcagggactgtaagaggagccagggtgctgctatttatagcagcccccacgccactctcacggacagctgctgactttggagtcgctttagaggaagaaaagaagggctggtcactgcagaaacgacgtaacaatgtccaactcggattaccttcccgactacccactcaactcagatttagtgaagagattaaagtctgccctggatgccaaagatgaggagagagtgagggatttaatctgcactgaaatcacgcctgtggacgctgtgatagaactggccaatgacgactggatgaaagacccctcggctcagct

SEQ ID NO: 25766 - DNA, 2300 bp, Homo sapien
taaagctgcaccagacacttctctggggccctgggttctgtccgctgaagcacagctcctcaatatttctgtcttggggagtgatgtgttcaggccgccattctggccgacgtcatcgcccctcatccagcatttcctccagtgaccttgaagttttcatagccacagtggctgggacatctgtcttacagaaagactgttcttgtctttgcagctatcaaaagtagtatcttccagtccataaagcaagggctgccaatccgtaacatagacggtggcttagttgtctctccacccgcaatggagctcaaaggtgtgcagcagtccccgcggccccactcctcaaattcctccgggccacgtggggacagacggtgctgaaaagtgaagggtggatttgtagaggaaacacagccctcaggttcaccaaacatcattcaatctctccttctttcccccagaccaagctgtctctgcaaagaaaatccaccccccaggctgatggatgccctgtctggtccccagaaatcccttcgggcttccgtttctccacattcccagtgccctcctcctcttgcctctctccttggggtgcatttcgctaataacccaattcatcacaggcccacccagacccagtgtctggtcggatgggtccagggtctgtcttcagacttttctgcaattccaggcttcagagggtcagaagctcacccacatcacattattcacctctcaggcttttggaaaactccaaataaaaatgaatgttcagagactgcgtcatctcgagcgccagccaagacagaatccactgggaatgtcaacagcagatgaaggggagccaaaggccaaattctctttcatccaaagaagggaaagagaatgtagattggtctgaagatgtgaggagccttttgcctccaaaagaggaaagtaaaattcagcacttggcctggagagcccctctgctgccctcaacactctggggcccctagccttggtcttcaccaacacagccattgccacaccccaagactgcagtgcatctgtgctccccactgcacttctgggccagagaccccacagcctctggggctcccatgctcactgccggctccagtctccacccagcccaccacgctgtgcctccctccacacctgacaccaccgtgggccctacagcagctatttaagggccaagaaaccatgagtgggtgattgtgtaaaagcaatagaagcgattctttgaaagaccaacagctcgagttcatcagctgcaggaaggaagccaagcctggttttgcatccccttctctggatcttcagatgagcaggcaggtgggcaggtcccaccacagctgggactgtctcacagagctctcttgctgcaactccagtaaaaatggtgatctatggagagtaaccaatgagtcatgtattcagaggaatcttgaccgaaactctccgtgaacaccaagtatcctacactttaaatgggcagcagcgggtttacatgtccctctggcccttgttggtctcactgcaggtctccaaagccttgatgcctaattgtccacagctcggagaaactggcaggccccacggtacagttcaccctttcccagtacagtaactgtacaccgttactaatgaatctctactcatcgagtgattactcctgcaagaaggttggatgatttgggcagaaaacttccaagattgtgactgttgtggcttcacagagaagccagggagagagttagttattggttgccagtgagcacgtggccctcaccccttcccactgatagttcccttttgcaccacggcaggaattttgctcatgcgtgcccagaaccaagtccgcaagcatgaaacccagcctgggatgtcaacttcagcttttggggccttacctgtgactctcccataaatcatgttcccttctcagcttccagagtcgccactcagacccggtggtactttgtttagatgttataaatttggacggaagacacaccagatctcaagtgaagatgtgggctagttgttgttgttgtgatgatcatttttaccatgggttatgttttctgatctctaactctgcaacagttatatttagacaaggataatcttcaccggctgccatccatcgctacacaaacaggctttgaaacactcttgtagcctattttgtgttgtcttttgtaattgatgttttaatgagggttaggaaacttcagtgcaatatagaatgaagaacaatcattgtcattgtaataacaacagtaacacag

SEQ ID NO: 25767 - DNA, 2300 bp, Homo sapien
tagctgctgtcctgcattatcctctcccctcgaggggtacagagtgtcaatgaggtaggctaagaccctgtgagatgctctgcttcctgggggatggcagcaactatttggggctaaactggaactgtatatatttatttatatataaatatttattaaaaattaatttattcatacaactttatatattttattccatttaccatcaccatatcagcgtgaggaaggggttattttcatttctcagaaaggggaatggtctctgcaaaggctatcccctgctaaggtcaccagctggtaggtggtagggcaggggttccacctggccacaaacagtggctcttgcaccaagctgtgctgccccaggcaggtggcaggtggccaaaaccctcgggacaattgtcctgcctattcaccagttctgagtttgcctcagagtctccccaggctttccccacctctcctgagagtctagcttttcccgggtctcacagcaccttatccctgcccctttccttgtccatcccttttgccagttcctggtcctctgtggtttgttcagagactcaacccctccttcccattagtttgcccatgtaattctctggggaaacgtctctatgctaggtcttcacgtttgatggctctgggtctccagcagccagatttgtgcttctgtctgtgactatgactttcctcccaatgtagagttagagcaccaccctctcccttctcggtcagtgggtcatgccatgcttgtcagggaagccatgctgagaagcctccctcattcattcaccaccccctgccttggaggcctgcagcctctgctgtcttcacaaggggcagcccttgtcccttagaggttgggagcctctgtctgtgccctgggtcctcagctgccttcctaggttgaaggtcatcagaaccctaaaggcagctcccagtgaagtggccagactgggtggcggttgtcagcttcacaaattccagcaaatttcctttacattctcgacatagattccagaaagatgtctccttccccaaatgacaagtcttggcttcccatgggagacctcttccaagtcccacgtcgaggatccagctattccacacctcagcatacatttggaacctcccttctgagaaaggagctctatttccatttattttagtgatgggaaattattcttactttgtctagggtcatgtttctccaggtccaccctcctaaccaccaggaagaggcaaaagggaaattttaaatatgtgtgatttcaaaaacatccaaaaagtaattcagaaatttagctgttgaattagggagaaatactgggtacttgtgtgtttagtgttgtctgttttgtaataggaggcaagggataattcctggagagttcaacaggcaacaaaatctttcgtattttagtgaatcatttgaagaaaaaaagtaagataaaacattacaaaaaaggtcatctgtgattgtataatcccagcattaacatattgtttttacatgattataataatacagtagaatactattgtatcacacttaaaaaatattgagtaaactaaaactcaatatttttacatcagcagttttttttctttttttagtgcatttacaagcacatatatgaatctcatctgtccagcttattttattcaaacttttatcctatgcaataacatataaagttaggcttatgtttatattgcaataacttacaattaacctacgtctttttaaaatttcattaacctatatctttttaaaattttttctttttctttttctttacccttctggagtgtagaaatctggatgaaaaaagatgagtcttggaatttctctcaggactatgatccagaactgatcaaagaggagaaacgaaaagaattacagtcagagatcaggatacaggtacagctacgtttatggtgtagtaacagcaaatcatttacttcaaccattgtgcttctttacaatttcctactaatgacctaccccataatttaagggatttttaaacttcacaaacaaaacacaagacatgcaaagtgacttaaaagtagtatgttttgtattctcctaggttgatgagttgatgagacaggaacttaaaaacttaaagctagctgtggacagagaaagggagcgcccagtgaaagcaggaaagaaaaaggacaaggtgagtggggaaggagcctgcagaggggtgcggtggagcggattcagtcatgaaaagcagcccctgacatgctgtggcatgtccaggagggccgcctgttgc

SEQ ID NO: 25768 - DNA, 2300 bp, Homo sapien
tgacatcgttggtagtgagaggacatgggatccagggggtgctggccttaggtagaggaactcagcacttaacaatggaacaggtaggaaggcagcatcaagatgctattcagtgggtgggtgctctggaggtggcctggaacgatcatggtagatggaagatgatggtgactgaggggcagtggtgacagcatcagatgaaatgggattcaaagcctgggagtgttgggaggagggaaggcaaatgtctggaggtgcagtgaagagaaggggtccccttgacccagccccacagccagagacagagggctctgggggtaacaggagcctctactgagagggcttctgagcagagacaggccttccgtagagcaagaaggcagggggagtatttggggaagaagacagcaaactagttaagattggaagattcagaaggttttatcttgtgcaaaataacttgaaaagaattcccattgtgcaatattttgagttcccacggaagtgcatatattcaagtgaatattcaagtgtttccctcccctacccactccgttataggaaaactgccaagctgtagaaataacagtctggtctttttaactgtcatattcagtcttcatccacaagcctcctgacttcaaaatctgtcatatctctaagtcatatgctcaagtctgaaaccaatcatatactttcaaaaactgttaagtagtctcatggataaaatattaccttctgtttgcaaagtgcatttaaaattccaggaacactttcacacctgttgttccatctgtattagtctgttctcacactgctaataaagacatacccgagactgggtgatttataaaggaaagaggtttaattgactaacagttctgcaggactgggaagtccttaggaaacttacaatcatgacagcaggtgaagtcaaacatgcccttcttcacatggcggcagcaaggaaaattgcagagcaaagtggggagaaaagcccctgataaaatcgtccgatctcgtgagaactcactatcatgagaacagcatggaggtaactgtccccatgattcagttacctcccactgggtccctcttacaacacgtggggattatggaactaaaatttaagatgagatttgggtcgggacacagccaaaccacatcaccatcccacagtagtccctggaggtgtccagagttggtctcatcatccaggtttgccagtgaaggaggcgtaagcatgaagagattgagtgacctccagggatgagctgctcaggacactggtttctattttaaatgtagagcacttttacctttgaaaaccaccttgccctacccagggaaaataaagacatatttccacgcagaaactcgcacaggaatgcttctagcagcattactcacagcagcaaagaaggcggaaacaacccaagtgtcaatgggctggcgaatggataaacaaaatgtggtgtatctgtacaaaggaaacttagcaatagaaagaaatgaagtacaaagtatgcgacagtgtggatgaattttgaggacaccgcaccgagggaaaggagctcagcactgaacgcccccccccaccgccgtgtaatttcacttctgtgaagtgtccagaataggcaaaaagagatggaaattaggttaggggttgccaagggcagggaggagtggggaatggggagtgactgcttcacgggtgtgggtttctttcccagtgatgaaaatgttctggagttagataatggtggtagttgcacaactatgctgaaaaccactgaattgtacacttgaaaagagtgaattctatgctgtgtgaattctctctcatcaatgctcttatgaaaaatcatcttgccgcctctcttgtctcatttgaccttcatggctgggctcaagcagaaagaggcttgaggctgcagggcgaggaggtggggcgcaaggccagatgggctgagcgcaaagtgggggctccccaggctggcgtggccgaggcatggtgcccaggtccctggcggtccagtgtgggagggggtgtggtcacgtggagaggcatcaggacagctggggagcaggaagccagagacagtctcgagggaagagggtctggtggaaggagatgacgccgtctctcagcgctgaggaaaacaggtaatgatgcagggatccgtgtgctttcaaagctgctcattttcctgtcagccgggaatctttgcctggtctcccccagacagggattccccagacagactgcagttggggaagaaagaaatggcaggacccgg

SEQ ID NO: 25769 - DNA, 2300 bp, Homo sapien
agctgaattgtgcctggtctatttcttggtttttccaacttattttctgtattgcactacttctgtttttcttttggtttccttagctgtgtaatcttccttcctttctcattccattgttttatattttctcccagttcttattttattaccttaatgttcttattagcttattctatagcatggagcacaagtaaagatttttctgttttggcagggcgcgatggctcacgccagtaatcccagaattttgggaggccgaggcgggcagatctcctgaggtcaggagttccagaccagcctgactaacatggtgaaaccctgtctctactaaaaatacaaaaaattagctgagcatggtggtaggcgcctgtaatcccagctacgtgggaggctgaggcaggagaattgcttgaacccgggaggtggaggttgccgtgagccgagatcacacactgcactccagcctgggtgacagggggagactccatctcaaaacaaacaaacaaaaaagatttttctgcttttatttatttggttagattttctccagactttctttcacttgtctggcctatgttataatcctttcttttcttctacttttatgaaagtcttggttttagacagtggatatgctgcttctttctgtcttattcctatttaacacgtgttgctctttgaaaatgttctgtttgttcaaatataatgtgggcgaattctctttgactgtcttctcactgtatctgagttccagagctgagatactgcacttttctctgcttttctggaacctgagtacacatttaggataaggactgctcccttgaatccacacaacttccaggctctgtgctctcttctgagattttgataagctcctttaccaccatcctcccactcttgtcacgagtgtgccctattcctgtgacaacatgccctttgactttgaatctttgcctcaattcaatgtagggacctagaaaaaggcaagccctggagatttctcctgtccctgctcaggtcctgggagcggtagggattgacctccactcaggatggttttatctggccggatttccccaggtgtttcctcgttcggctcaccctttcataccccttcttttcagtgtgtgtattctttgcatcaaaaagcattaatgagaattcttggtgttgtgtctacttggtctctgccccctgaagggctttgggagggtggagatgaggctggacaccattctccacggcaagctgctatttcactgagtttttgaagtttacggtacaaggttgtactcaatttctcgtctgagaaataatttgctccattatttgaaggcggtgcggagggctggcttttactatgcttttgcgcatttcattagtaatggtgggggagaggttttgtgatcctgattataatttttacctggatgtcctctccacgcctttgacagcattaaacctggcgttccaataggagctgcagggtctaaaatgtgcaaataaacctcaacagttactaaagtcgaagaaagaagagcaatgaaagccaacactcatagcgacttacggataactgttaatagcatccacactgcattttacatttacaacgcacccgcgccttagttcatactcattaagtctccgaagggcgcgtctgcctaagtcttgggtgcccagaatctaagtctgcacttggcccagaatagatgcccagtaaagttctgaacgaacgactgttatacccagtttacagatgggaaaactgaagaccaccatcattaagggccttgcccaaggccgcagagctgacagtggatgaaaatggggccagcaggaaagcgggaagacggcctggaggaccacaggctaagtgctggggcccggagcaggctcgccaagcggccgggccccgcgacggagcgctcggactccgaccggctcccacagctgcgcccacccaggcctcccgcggtggcgcaggcgcggaatgcggggggcggggggggggagggggcaggcggaaggcaatgcgcaggcgcggcgtttccgttgctagggccgcgtcgcgcccacctgagtggccgaagtgaggttcgcgagtctctgggtcgcgacgggaaggagtgaaacacctctctgcgcctgcgcgctccgtgcctgcgaagcaaacccggcctcaccttttcctgcccgaagcagaagattctcgcagtcctggtttctccctccagaagaccccccacccaaatcctctgtagctcctggtagtgccctgacccctgctgcca

SEQ ID NO: 25770 - DNA, 2300 bp, Homo sapien
gcttgccacggagatgggaggtcagttactgtgggaggctgggaggctgaataagagcccccagagaggtccacatcttgagctccagaacctgtgaatcgtcccttatatggcaaaaggggtgtgattaagttcagggtcttgagatgggagattatcctgaattatctaggtggagccactgtagtcacaatggtccttatatgacgggggcagggggccagtagtaggcagtgtgaggatgcaagcagaggttggagcgattcgaggaggggcccaagccacagaatgcaggtggcccctagtagctaaaaaaggcaagaaagcagatgcagccccaaagcctccagaaggaaggcagccctgctggcacattgatctcagcccaggatatctagaattgtaaggtaatacatctgtctttttgttgctgttgttttttgagacggagtctcactctgttgcccaggctggaatgccatgttgtgatctccgctcactgcaacctccacctcccaggttcaagtgattctcctgcctcagcctcccaagtagctgagatcacagtgcccaccaccatccctggctaatttttgtatttttagtagagacggggtttcgccatgttggccaggctgatctcgagctcctgacctcagttgatccccccacctcagcttcccaaagtgctgggattacagacatgagccactgcacccggccatttgtcttgttttaagccactaacattatggtgatttgtttcagcaacaataagacgctaataaagttacatccaatgggactgagcaaataaataattataacgaggacaatggaagctaggtctctcactatggagaaaggagttacaaacatggaaatggagaaaacttgaatgaattttgtataatggattggaattagagatgctggtgggaaccaattactgttaatacagatatgtgcatatatattttcatgtgaacgtatgtgtgtgtgtgtgtgtgtgtgtgtgcatacgtatagatgtcttggcttttaccactgagagagcctggaagttgcaacacaccaatagcaaggagcacactttgcacccagatcttggcttctaaatcttgttttccacaaaggctccttggaaaggcagattccagggaatcttaaataaagtgcaagatgagcccacactgactttttgtgccagaaaatgaggaagtattcaaagaatgatggccatatattgaaaggacatagaggctagcccccactggccaaatcaggaataatctgagctgtcaactaaatactgagagtaatggattataactcacgaaatagaacagtaaaccacaagttcatacagatggaaataaacagatgaataaattgaaagtttgagaatgagatatttgcatacatttaaagaatcttccttcaaaatacttattaatgacatagagaaaagggagtggaacagcctgacagccagttccaatcacagcaaacatcatcagtcatgggacaaattggtgttggtgaccactggatgggttgccatgagaacacaccctcacttctatgatatgcatgccagaaacgtgagacctgaatcttatcttaaggaacgatcagacacacccaaatggaaggatattctacaaaataatcaacctgttatgttcagatgtgtccaggttatgaaagtcaagggaagactgagaaactgggccagactgaaggaaactgcagagaccagcaactaaaggcaccacgtgattctgaggagtctttctctagaacagacacgctcgggatagttgtgatgcagggcaggttcttggctttgctcaggaaagaactcaacagtcagctggtggtggaaaaaagcagctttattgagtccggcagtgatgcatctccgtgcctgctccttggggagcagggcaaccctataggcagtgcgtggagagtagtagcctatgggccgctgctagtcatatttccatccactgttaatgacatgctaatgaaggggcgggtcattcagaaatagctaggaaatgggtggtaacttccggctgttgccatggcattggtaaactgtcatggtgctggcaggaatggctaagggtgatgggcagcgagaacaaccagaggcgctttttgtgtctttttctagttttggcctgttctcaatctggtctgggagacgaatcctgctgacctcctacctctgctggcaaaactcgagtggggtctgggaacttgaaggaaggaaagtgttgatgctaact

SEQ ID NO: 25771 - DNA, 2300 bp, Homo sapien
ttggtccgcccctccccgtctggaagcctccagcagccccgcccggcggaactaggggacgggtgggggacgtcgaagggcgagggcggtgaccccggggccagaattctcgcaggcgcctgggccgggtgcccggccgtgcgtgagtgcggaacaagtctgggcgcggggaagggcgtgggtgcgggccgtgggtgggtgcggggcagggcgcggggctgtgggagggcgcgaggccgtgtgtgggtgcggggctgggtgcaggccgtgggtgggcgcggggccggggctggcggggcagggcgcaggctgctgcaaggcggcctcgtggattctggccccggacgcacgaagcgggttctactttttaaaaaaactgcgttgccttttccttcctctacgttagcatcctgtccggggtccccggcccatgtggcctttcttccagcgacagtacacttagctcagaacggattgacacccactctgtgtttccaccgggcgcgcaggctctgcaatgcggagcgcgttctctgaaggacaggccccggagtcacggctacagccacagaaagcggaaaccgagctgcagtccagaggggatccccgtacatttccagcgggctcagacacagggtcccccacaagaaagaaacaggacagaaaaagtcaggacacgtatgctgtggagagtcgaggtctcgcctagatcttgggtgtgggtagacgcagccgctggcagttttcctttccagcgtctctggggagcctggagatgtccttggtgccgatgtgacacgaagagtgattgcgccgccctgcagaggcggtggcgggacgctgcgctcgggctgggaaaggccggccccagggcgacccctccggaggcccccggagagcaggtgtgcacctcgcctcccgctgggcagccagttcaggagaaaaatgtgaagcttttagctaaacaaaatatttctttcgttaagggctttctccacacggagactttctagccacgtgagactttgacctcccagtcccccagattcagcgctgggaccgagcgtctgctgttatttttagtagaagtataaaaagaatctcgaaaagttttagctctggagaaggcgtgaatacagctggtgccttcatacactccacttgagccgctctttaagaactccaggagatcagaaagcaatacgaaagccagagcattgcacatgggatgggctggcgggtggcctttgggtccctatcttatggacgatttttgtaaatggggcattggagatgagtatcacctggatcacatttttaggttgaattcctccgtggggggaactttagcaatacgcatccaaataagaatgtagattgcaataattgtagtaaagtgtttgccagactcatctcagaaaaagacattatcaaaaggcatttattatcttcctaatgcgtgtctggcactgggcagacactgtagaatactatcttgattagagtctcaaggattttgtacttaaagtcctttacaaataaaagtattcaagtataatctattataaagactcttttctccactttggggatatacggtgtggcatcgattcattggtcataccaaaactgttacttctgttttggaggaattaacaaggaaaacccaggcttagtaaatcaacatcgaagttcagaagttcagagtaatttgtcttgggaacaaagtcctccctagagcgaagaggcattcacaggagctcttggtgttaatgggattattcaagatatacctgagaccagataaatatttgatgattttgccaagcactagggtttctttgcagtttgtctttggctgacgttttccccccgtggggtttggactttgtggcttcaccagattttgcaaatgaaagaaggctggggtttcccaagagtacacttgtgcaggaaacaacagactagtgaggtttacaagaggggggtgtgtgtgtgtgtgtgtctgcctgtgggatgggggtggcacgggggagagagagatgtgggttacaaagctgccatctagaggctagaggctcctttctgcagtgtatataatgcaagtctgcagccagcagagctcacagttgttgcaaagtgctcagcactaagggagccagcgcacagcacagccaggaaggcgagcgagcccagccagcccagccagcccagccagcccggaggtaaggaaacggtgctcgggcagcagctctgctcggaaagaaggcacggcttctgctcttaagccaagtggtctt

SEQ ID NO: 25772 - DNA, 2300 bp, Homo sapien
cgggcatcctcaaccctgaaccagaggactcagcccaacctctccccagagtggacctgcactgccttgctcagacactggctgggagcagcctgtgagaaatgtggctgcatgcaaatatttaaccgtcaacaagccacagctgaggaaacatggccacacaaccgtattagtccattctcgcactgttacaaaaaatacctgagactgggtaatgtatgaaggaaagaggttgaattggctcacagttccacaggctgtacaggaagcgtggcaacatctacttctggggtgacctgtgggagtttttactcatggtgggggcaatgagggagcaggcatttcacctggcaggagcaggaggaagagagaggggggaggtaccacacttttttttttttttgaaaagaagacttgctctttcgcccaggctggagtgcagtggcatgatctcacctcactgcaaccattgccttctggattcaagcgattctcctgcctcagccttccgagtagctgggattacaggcacgtgccactaagcccggctaattcttttatttttaatagagatggggtttcatcatgttggctaggctggtttcaaactcctgaccacaagtgatccacccacctcggcctcccaaagtgttgggattacaggtgtgagccactgctcccagcctgcacacttttatacaaccagatcttgtgaaaactcttgtcactatacagtaccaaggggagatggtggtaaaccattcatgagaactctgcctccatgatccagtcatctcccccaggtcctccctgacactggggattacaattcaacatgagatttgggaagggacacgaggcaaatcatatcaacaaccatttggaaagtcatatgcaatgggagagagaaatcatgggaaataatataaaatgaattcttttcagcaacgaaatctgctgacatcaagataaatacatatatacatgcatatatacacacacgcatatatttaatatgaagtctgcttcaaactcaaacaatagagagatggatttatgcatatctgaaaatgagcactatacctctattaaataggtaatattgaaaaatacccgatggcatagaataatgttctgaaatgaaaataacgggtgaaaagcagtaaatacaaagtaaaatgtcatgtttcataaaacttcttaccagtggttctctctgtgtgatgggattacagatgatttttgttttttactattttcttacaaaaagatcacatgtcgttttgtaccttcaagagattttaagagcaccatcgcatgcgtctggctctcctagtatgtcaaggtgcctgcctctcatctgtggggttgcaggtcggcaccgctgggggagtggagagtctgtgctccttctgtacgctgctgcctctgctgcaatgaagtttatgagggagcctccagccactggggactggggtcttattgtccctctgctcgtcctctagtcagaactgagtgcccccggaattgacatctcccagggatggggttgagagtgccgggaggcaggatatgccagcctgagttcacagcccttgctggcccctctgggtaggggctgagctgggcttcatgttatccacctcgggggtcaaccagtgctgcccccagcatggtttgcagcaatccccttctgcttgtcaaatctccaatagccccctccctctgcaggctgcccagcgccagaaaacacgctgggcaggttctcccaggttgtactccaggctgagcacagatgcatgtggcgtccccactgccagcactgttaattaagccatgtccaaggacccacaacaccacacaacacctaggtattaagcagacccattggaatgtaactccagtgaatgcattcccgtcctgttacatgactccgtgaggttctatacgcaaagaccctaatctgttaactactctttggggctataacgtaatctccctgccagtgatctggatttttaaaaaaatggattattcatctctaaggtttttggcccctgtcttttctgaccatagggggaaaatgtctggcagaagcaagccttggctggccatgtgcacctcattccatgccattccaacagttgctgtgctcccaggcttatataagaagaaccagttttcccacttcatgattttgcagcttaatgggatggatatggtatggcttacttagaggcctggtctcattttgacagtcttttgtgcactttacatattccaggcactttcattattac

SEQ ID NO: 25773 - DNA, 2300 bp, Homo sapien
ctctaacctgtgatatgtatcaaaagcctcaccgggatttcctattcagcaaacagccacctttgtaggtttccacctcttagaggcccaaagcacctgccaaagcgttcacattatagttttccctttaaatgatcaaatagccaagcagggcttctattgaatatttctttgcccgaaaagggttagagaccattattacaagcttcaaaatcctgctcctcatagttctgtcaagtgatcttagaatcatactgccctcagtccttctcttccttgcagccgtggatgaaactctgttgctttattactccaagatctctctagttctgctaactacttatgtgcccttctatttaatgttggcagttccttgaggaacacacaagtgtttttttttttctttacatttcattcagggaattactaaacaatcatttccacacagagatgttgtggattacgccaaaaaaaaaaaaaaaatcaaggatggctgtctctgtcttgaaatgcttaataattttatctgtaaacttgtggtttgtaagtgaggtccattaagacaatggagcatgagccagggaaacgggcctctacgtgtggccactgatgttccatacagcattcataatgcaccatgcacactgaattccctgtggacccctgatgttgcgaggccagcaagactcaaagtgagcacaaggtactcgtgctgtatctacaactgagggagctgggtgctgacaccccaaaaggccgcacttttccccttaagagagtaaacttgtttcgaaggcagaaagaaggcaatggtgtcttaagaagcatgaagaaaccatattgtatgagtcatggttctctagagggacagaactaataggatatatatatttatatatatatatatagagagagagagaggagtttattaagtattaactcacatgatcacaagtcccacaatgggcagtcttcaagctgaggaacaaggagagccagtccaagtcccaaactgaagaacttggagtctgatgttcgagggcaggaagcatccagcgtgggagaaagatgtaggctggcaggctaggccagtctctcttttcgcatttttctgtctgctttacatttctagctgcactggcatctgattagatggtgtccatctagattaacagtgggtcgaactttcccagcccactgactcaaatgttaatctcctttggcaacaccctcacagacacacccaggatcaatactttgcatccttcaatccaatcaagttgacagtcagtattaaccatcactcatatcatatattttcttattcatgcacttctttatattagacacctgatcatgccaaaaggccagtccatagttcttttgcttttcagtccttccttacgcatcggtgagtcccaggtcgagagtagaggtagaattcgtgcacgtaaagtgcgatgaaaacgggcaagttcactttgtgcagcatctgtttttaccagcgtggttctggtaaaaacaaaatctatatgcatgtataagctatgaagtacaaattgcataatttctgtgattccacatatgagatcagtgcacttatattagtatttaaaactggcattgcacaacgtaaagatggatggtgaacttcatgctaacaatttaaatctaaatttttcttggaatgatattaaataacacataaaaacactatgaaaagagagaaactgagaggaaagagaaagttttatattttatgacctcagaggcactttctttctgttttttgaacaaggaagctccgcacttttctctgagctccacaaattatgcagccagccttgcagcaggcaacacatcaaagcctctttcctgggggtctagtgagggatgtaaaacacaaatatgttaataatatacaatataatgtcactaacagtaagtgctgtgctaaacaaaagccaggatggctacagcaagccggaggggagctgagaattagatgtaaattctgagggatgggaagggccctagattttagggcgttgtgcagaagagtaaccagatctgctctacgtttcaggaaaggaaaaaaaaattccctctggctgcggttccgagaatagcctggaaggaggcaggggtcccggctggagaagcgtggctccggggtggggcgtgcagggctagcccgggcgggggacgctgcccaacaagcaggtttgcggagactcacaccttagattctgagtttttaagcttgtttcctcagagcagggaactcacgaacgtttcgt

SEQ ID NO: 25774 - DNA, 2300 bp, Homo sapien
agtatcaaacacgaaaattctgagtattaagtttatattcgtcatcagctttgatttatctccctttgggcttcagtttctttatacattcaagaatatgtaagtggatccccttccccagttctcaaattcccatttaaatgatcttactattataagaaacaaattcgacagattcctgaagcattctgattctgcccattacatcaagcgtcctgaataagagacagaaaatcaccacagctgcgttgcaaagacaattctttccattttaactcaactggaaagtatctattatctattagtgagctgctgcttctggatgttgtctcctttatttaattttaaaactaatgatataaaccctttttaagtgtctaagaaaaacattaactttaacagctgcataactttcatctgtcttactgaagacaaaatggcaagctaacttgacaacattacgagaaaggctttgtgagttaaaaaaaggttacaatggtcacatttttcttggtgtgcgtgtgagttgcggtgtgtgtgttagtgtgtgtgtgtataccaagatctttaataaaacccactttactaccctctcccaacccgatactgggaaggaaagatgcctaattaatatgagctcatcggtaggtgctggagcaaagacgcacagggttttcgggctcacaagctgaagacacataacaaaaaggtcccggcgagttcggggagaccgggcccggtcggagcaggttgcggcggtcagggatccacacgtccacctcccacgcccgccccgtgagctcccaaagcccgctagcctcagaccccgttaccctggaaactggtgccgccccagggcctaagactactccgcagtttctcccagcgcgacgcaaagggttacctcgagctcctggttctcgcactgatccagcaactttttgaaactaaaggcgctttccgccatcaccgccactggcatcttcgcggccggcctcgccgctgcaccgtccggacagccaaaccccagactgtccctcaggcgtcgcgcccgcgatgacgtttaaagccgccgttgccgccgagcgcccctgcgtaccagaccgtcagttccggggcgccgtcagacatcgctgcggccgggatagggcgccgccgttctggccggctttctcggtgccctggaggacctggccggctccgcgggaagctgtactcagagcgcgcggccgccctctggcagggaggagttcgttgcacttttgagggttcttcacgaagacatccaatacatagaaaacaagtaacagcaacagtaacgaatttttaaatattaaaattgctggggaacacgacggatcctgcagctgctcggctgtcccggtcgtcagtgacgctagggctccgcaccgtaccctgcataccgtaggtgctcacgaaacgttcgtgagttccctgctctgaggaaacaagcttaaaaactcagaatctaaggtgtgagtctccgcaaacctgcttgttgggcagcgtcccccgcccgggctagccctgcacgccccaccccggagccacgcttctccagccgggacccctgcctccttccaggctattctcggaaccgcagccagagggaatttttttttcctttcctgaaacgtagagcagatctggttactcttctgcacaacgccctaaaatctagggcccttcccatccctcagaatttacatctaattctcagctcccctccggcttgctgtagccatcctggcttttgtttagcacagcacttactgttagtgacattatattgtatattattaacatatttgtgttttacatccctcactagacccccaggaaagaggctttgatgtgttgcctgctgcaaggctggctgcataatttgtggagctcagagaaaagtgcggagcttccttgttcaaaaaacagaaagaaagtgcctctgaggtcataaaatataaaactttctctttcctctcagtttctctcttttcatagtgtttttatgtgttatttaatatcattccaagaaaaatttagatttaaattgttagcatgaagttcaccatccatctttacgttgtgcaatgccagttttaaatactaatataagtgcactgatctcatatgtggaatcacagaaattatgcaatttgtacttcatagcttatacatgcatatagattttgtttttaccagaaccacgctggtaaaaacagatgctgcacaaagtgaacttgcccgttttcatcgcactttacgtgcacgaattctac

SEQ ID NO: 25775 - DNA, 2300 bp, Homo sapien
ttggttgctcaggctagagtgcagtcgcgcaatcttagctcactgcagccttgactttctgggctcaggtgattctccccacctcagcctcccaggtagctgggattagaggcacacgcaaccatgcccagctaattttttgtatttttaggacagacggggtttcactatattccccaggctggtatcaaaactcctggactcaagccatccacttgccttggcctcccagagtgctgggattacaggcgtgtgccacggcgcccggcctagagtagttatgctttctgacttttccatgtgaacgtgaaataggaataattaaaaacaaaaaaaacttaaaaaatctcatacatgtttgtaacgaattcctcttggctgcaatcttctcttttcacttcttttgttttattgattatatatgaagttaagtaaatagaggtcataaaagtttcttaaaaagacaaaaaggttaaatgaatttactgacgtaatttgtcataataaattgaaatgttttctagaaagtatatgtaagacaatgacgacctaatcataattcattaacctatgattcaataggaaatagacgttaacaattactgtaataaaaaaggtagctcgttgtgcctatgtttagtggtgctacttcagtgcagaaatatttccatataactttgagaaacctgttgctcttagctttaggttaaacatacttacatgtcattatggagcaaatataaagctagaagctgaccatacactgggggtgtagcaattcctccaggggcctagaaggccaaaaatgaaaacaaaacaaaacaacacaaaattttaaaaacctcatttaccctttaactttcatttttaaaataatattttataaatgctaattttaaaagtaagcctttttagtctaagactataagtaatcttatagtcctattatagatttagaaacagcttagagaagtatcaaacacgaaaattctgagtattaagtttatattcgtcatcagctttgatttatctccctttgggcttcagtttctttatacattcaagaatatgtaagtggatccccttccccagttctcaaattcccatttaaatgatcttactattataagaaacaaattcgacagattcctgaagcattctgattctgcccattacatcaagcgtcctgaataagagacagaaaatcaccacagctgcgttgcaaagacaattctttccattttaactcaactggaaagtatctattatctattagtgagctgctgcttctggatgttgtctcctttatttaattttaaaactaatgatataaaccctttttaagtgtctaagaaaaacattaactttaacagctgcataactttcatctgtcttactgaagacaaaatggcaagctaacttgacaacattacgagaaaggctttgtgagttaaaaaaaggttacaatggtcacatttttcttggtgtgcgtgtgagttgcggtgtgtgtgttagtgtgtgtgtgtataccaagatctttaataaaacccactttactaccctctcccaacccgatactgggaaggaaagatgcctaattaatatgagctcatcggtaggtgctggagcaaagacgcacagggttttcgggctcacaagctgaagacacataacaaaaaggtcccggcgagttcggggagaccgggcccggtcggagcaggttgcggcggtcagggatccacacgtccacctcccacgcccgccccgtgagctcccaaagcccgctagcctcagaccccgttaccctggaaactggtgccgccccagggcctaagactactccgcagtttctcccagcgcgacgcaaagggttacctcgagctcctggttctcgcactgatccagcaactttttgaaactaaaggcgctttccgccatcaccgccactggcatcttcgcggccggcctcgccgctgcaccgtccggacagccaaaccccagactgtccctcaggcgtcgcgcccgcgatgacgtttaaagccgccgttgccgccgagcgcccctgcgtaccagaccgtcagttccggggcgccgtcagacatcgctgcggccgggatagggcgccgccgttctggccggctttctcggtgccctggaggacctggccggctccgcgggaagctgtactcagagcgcgcggccgccctctggcagggaggagttcgttgcacttttgagggttcttcacgaagacatccaatacatagaaaacaagtaacagcaacagtaacgaattttta

SEQ ID NO: 25776 - DNA, 2300 bp, Homo sapien
tggaaatcctaatactgggggagggagggaataaggggcaagagggctgagggagttgtggatttgttgtttttgtaattatctgtgggtttttggggggatgctgtaagtgaaataaaaaaactagatttcttctttttctggcgtattgcatcttgcaatttcaagacatttcagaaatgtctgtagcagaatagctccttgtatgcctaatcctcagtcttgttgaataaatgctaaagtcaaagtgatgtgaatgatctttctgaagccaaccaaaagcttccaaggtcctcgggcacagacagcatctgccttgtagctgggagaagaccagtggtgtagaagtttgtaacctctcagaggaaattcaggatgctggtgggtgcctaggggaggtctctgctcagaaatgaacagagcacaaaggctgcaagctggggctgggtgctgggaactgggccctcagccacgccctgaggggcagtggctcgttcggcccggcacttgggccagtagagttcgctggggtgaggggctttcaaaaggagcgactcaccaaaatcaaattgatggactatgggcatcattttgctttgaaaattcagaagaaaatagaaattttgaaaatatcattttaaaatgtttgagcactatttatttatttatttttaataaattgtaaagacctggatcaactgcttggaagtgagcattatttttgaataatgctatataatgaaaaagaagctatataatgaaaaagaagaaatactcatcaaatgttacaatgggctattacaactcagcgtgtgagcagagccaaaacttggtttcatgaaatgacttaaaattgagtagttcatacaattaatttcaattctacacacaaggtagaaactggatttgaattcggtttcagtcacgggctcttgaggactcagttcttccttttgtggtctaatggcctgctatcccttcccttaggaccacagtgccaggctcaggccaagctgaaatgtgtccctcccactgggcttcagcatgcctacatcccctttctagagtctccgcaggcggcctctggcctgagcaatgtatcactgagtgctgctggactctcatggaactctagcatgtctcttttgggaggggccaggccagattgttggtttgtagaggagaacagtgtccccttgtctcaaattttccatggaaggtggccaagatcttccgctgaagcaggtggcattacagcgaataatggcaaactggtcaccgcagatcactgggctggtccattggaagtggagagtgaggttcctaggttgatgtagcagatgactgagccccacaacagagctagtcggtcacagcctctgcaacaccaaccctaactttgcaaagaccgcctgggacattcataaagtcccaccccaaacctttctactgctgaggaaacaattttgaggtggaaattaatggattacttgtgaagtaagcccacatgtttgaactaaaggtcacctctggagcatccaggaagatgttgccaagtcgtgagccctacctaagtacacgagacgtttaggtgcacatgtgtgtgcttcagatattttacttaaccgagtgtgtgttgtgtttggccgggatcacttggagaacctgggactcccttccattataattaatgtatttcatgacttctcagtacagttgggaaggtggaagaaaaatagacaggttgacattcccttttcacattcctcatttgaaactggctgggatcgtgcagccaaaaggagtcattattttgcttggcaggtctgcagtaattctcaaaacttccattgggtgattaacaggagcagcaaggaagcaaaacttcacccggatgagggtggaggaagggtgtctgtgtgtgcgagtttccccagggctgatgaggtgtggtttctggttcttggcacgatgtgggtgcttgggaagattcccctgagtaaccgcagaataagagggtgaagtctgaaagagctctaggccccatgcccagcgtcccatgctccccctcacagtttgtgggactttttcttccacagggtggctttggccgaaggggaccccccggagctaaggtgagcctcatgcagtgccccctggagactctcttcaaacagcccagatgccgcccagcccaggagtgaaaaacactctctcctgtgaacccaaagcttcggagacagataccaatcaatttagaaagttgatttcgccaaggttaaagacatgcccgtgacaca

SEQ ID NO: 25777 - DNA, 2300 bp, Homo sapien
tttgaaccacagttggttaaatccatggatgcagaacccatggatacgaggtcgactgtaatagaaactttcaataccaaggaatgcatctgcctagcgattttgcgaaaaagagtgtatttgtatttgaaagaaaccgtggagtggaaacacctaaaacgtgcttgttcagttaacctcagtttgctgagctgcttggagcatggggttgtaatcaaagattgtcttcttcgcagcagacaatgttctgggagaaatagtcctccttagtgctgaagttgcagactctaaccaagggggtggcagcaagtatccccggtctctgtaggggcttgagtcaacgcctgcactgtgcagagaggatgagggcagagaattggatgccgctggaggggcgtgttgtccttctacatgtcatgcaggcagcgcggttctatactcggagcctctgctcagcgtgtcttcacctaagaaccccataattcaggttccatccttgttccctactccagtgctctgcaagtgagccctttggtttagagatgggttgggcttctttatgggagaggaagggagccctggagctgcagaggggagcaggcattctctctggggtgctgtctcctttcttccctaaattggagggagataatccatggaaaggagttaatgatttctttgctcttcaaacttggtttggaaggatctctcagtcaaaaagaacctttcggatgtctcttgatatttcacattaatggacttttcataaggaccacatgatgggagagcagtgagaagtttggggatggccaaagctgggttgtcatttgagctctgttactaacccagactggacaatgacgatgtcacttactctctcggaacttcttttcttttcttcttttcttttctttttttcttttttctcttctcttctcttctcttctcttctcttctcttcttttcttttcatttcttttctttctttcctttttctcttttttggagtctcactctgttgcccaggctagagtgcagtggcgccatctcggctcactgcaacctctgcctcctgggttcaagcaattgtcctgcctcagcctcccaaatagctgggactacaagcgcctgccaccatgcctggctaatttttatatttttagtagagatttagtaggggtttcaccatgttggccaggctggtctccaactcctgaccttgtgatctgcctgccttagcctcccgaagtgctgagattacaggcataagccaccgtgcccagcctgtttctttcatctgtaaaatgggaccacaatttcacctaataaaagaagacatctttctatttaaaagggcttagggtgttgatgtttgtgataaaggagagaatgtatattgaagtgttttgaaatgtgcaaagctttctagaaacagaagttcttactcaagtattttcccgaagctttggcaagataaccatttttattaccccgtctgtgcctagaatgggcctataagcgccacaatcagaatcattagatatagaaattaagagaaatgtagcctccttttttttgccggtgaacagagctttggttaacagaaaaccaaggcgattttaattgctggtttttctatttgaagggggaagttattagtagaagtctcaattcagaaacttcaagaagaaatgggagggtgtggtgagggtaagcgggggactgcatttcctgttttcctttcagatggtgttggaaaacattgcaggaaaaccatggatacccacgaagaaattccaaaatttattctttttgacgccaagggcccagcccaaaaggtgacgagtaggagtggtcaatttttttttttaagagttggggcttgcaggagtccagctaaacgcttgtagggtgaagacagaattcagagggtgacatcagcctgagcgggggccagaagaaacagagtggaggagtctggtttcatttacagttttgggtcagttctgcagtgaggagggggagaggaggggtccgggagggaggaggaggaggaggaggagctggaggaagccctgactggtatccctggccccagtccagtttggagctcagtcttccaccaaaggccgttcagttctcctgggctccagcctcctgcaaggactgcaagagttttcctccgcagctctgagtctccacttttttggtggagaaaggctgcaaaaagaaaaagagacgcagtgagtgggaaaagtatgcatcctattcaaacctaattgaatcgaggagcccaggga

SEQ ID NO: 25778 - DNA, 2300 bp, Homo sapien
ttctgcaagatgattctcccaaccatgcaaaacctgagtataatcatgggaaacagcagaccaacccaaatttagggacagcctaaaaaataagtggcttaatatttaaatagcaaagccatgaaagtcaaagacagaggaactgatctgatttgaaggagacttagaaatgacaactaaacagaacatgagattctaaactggatcgtttggcaacaaaaaattacggagacaactggcaacatttgaaaggactccgatgattagatgatagcaacatatcatgtacagatgttgatggttggattgcagtttaatagaaggttgtccttgtttgtataaaatacactaaaccctcatgtcagaaactccatcacaaatggctaggggaaggtagggttctttgtgttatacttgaaactttctgtaatttggggattgtttaatcattttaaatgtttataattccagggccgggtgcagtggctcacacctataatcccagcactttgggaggccgaggagggtggatcacgaggtcaagagatcaagaccatcccggccaacatggtgaaaccccgtctctactaaaaatacaaaaattagtggtggtgtgcgtctgtagttccagctactggggaggctgaggcaggagaattgcttgaacccgggaggcagacgttgcagtaagccgagatcaagccactgcactccagcctggcaacagagcaagattccatctccattaaaaaaaaaaaaaaaagtttataattctagaattttctcttaaaattgtatacatcctttgactcagaaaatccaaatctataggcttttagtctacagatatatcagtatgtatgtacaatgatattcatgtgtcatcctatgtatgataggtgtcaataagaattatctaggatgatatttatggcagaatcatttaaatagcaaaaaatcaaaaattaactgtccatcaatagaagactggtaagtaattatggtaactcacacattggatactctgcaaccaaaaaaggatgaagtagatcaacaggaatagtaattaatatttaccaagcactcaccacatggtgtctcacccaagctgcagggatattgattcacaacacccttatgtgtaactcccattactattctcatcatggagaagagagaaaaaagtcagtagaagattcagtaacaggtccaagatgacacagcttgtgggccacactcctagttggaattccgactcttgcagttggtttgagcccacatgcttaacctcacacacacacacaccattcagaaagaatatagaagacaccattaataatgattgctttctggtcatggaggttagtaatggaataagagagaatttggcttttcattttatactccttatattctttactatataccttatatatcagcgtgtgtcagttgtatattttttaaaaccactacttcaaataaataagcactaaagtattaaaaacatttttaaaaacttctgcccttaaggaacttaagtccctacatcaactcttaagggatttattaatcttaacaagtaacagtaaagtatatggcaaggaggtaaggaaatgaaaaacataagcaccagatcatatgggatgtggaaatactggcttcagtgtaagcttcactctattccagggttcacactcaacaattgatggtgtttggtaagagcacctgtctcaaagcagcccaggggcctgaaataccctgattcacctacagtgttcccctgggctcagcaggcaacaacattcttttttgttcttttgcagccttttgaaagctgtttacaaataatctaatgtgatatcacaacaatcctataaggttttgattcctcttctgttaaatggagatactagtatctattcattcacctaatggctttattcctatcattttgcagataggaaaactgaattgcaaaagcggttcctggagaacagaatgtgagtttttaagtgacaagggagagggagggggagggagagaaaattctgaagcgcccagtcttggaggatgagggaggagggcaattccctaatgtccattggaattcggaaggacaggcaggccgggcggactggagacggcggctcgccttgggaccctctgagcttgcgggccccgctgagcacccaaaggccggccctagagtccaggagaagagcgcagcggcgcggagctcccaggcgttccccgcagcgcgtcctcggtcctggaaccaccgcgccgcgcgtcctggcttc

SEQ ID NO: 25779 - DNA, 2300 bp, Homo sapien
tacagatatatcagtatgtatgtacaatgatattcatgtgtcatcctatgtatgataggtgtcaataagaattatctaggatgatatttatggcagaatcatttaaatagcaaaaaatcaaaaattaactgtccatcaatagaagactggtaagtaattatggtaactcacacattggatactctgcaaccaaaaaaggatgaagtagatcaacaggaatagtaattaatatttaccaagcactcaccacatggtgtctcacccaagctgcagggatattgattcacaacacccttatgtgtaactcccattactattctcatcatggagaagagagaaaaaagtcagtagaagattcagtaacaggtccaagatgacacagcttgtgggccacactcctagttggaattccgactcttgcagttggtttgagcccacatgcttaacctcacacacacacacaccattcagaaagaatatagaagacaccattaataatgattgctttctggtcatggaggttagtaatggaataagagagaatttggcttttcattttatactccttatattctttactatataccttatatatcagcgtgtgtcagttgtatattttttaaaaccactacttcaaataaataagcactaaagtattaaaaacatttttaaaaacttctgcccttaaggaacttaagtccctacatcaactcttaagggatttattaatcttaacaagtaacagtaaagtatatggcaaggaggtaaggaaatgaaaaacataagcaccagatcatatgggatgtggaaatactggcttcagtgtaagcttcactctattccagggttcacactcaacaattgatggtgtttggtaagagcacctgtctcaaagcagcccaggggcctgaaataccctgattcacctacagtgttcccctgggctcagcaggcaacaacattcttttttgttcttttgcagccttttgaaagctgtttacaaataatctaatgtgatatcacaacaatcctataaggttttgattcctcttctgttaaatggagatactagtatctattcattcacctaatggctttattcctatcattttgcagataggaaaactgaattgcaaaagcggttcctggagaacagaatgtgagtttttaagtgacaagggagagggagggggagggagagaaaattctgaagcgcccagtcttggaggatgagggaggagggcaattccctaatgtccattggaattcggaaggacaggcaggccgggcggactggagacggcggctcgccttgggaccctctgagcttgcgggccccgctgagcacccaaaggccggccctagagtccaggagaagagcgcagcggcgcggagctcccaggcgttccccgcagcgcgtcctcggtcctggaaccaccgcgccgcgcgtcctggcttccacatctgccccatttgcccgcggatcttgactttttcttggcgggcaaggcctcggtctcctccccgcagcagggctgcccgcggctgcgggaccctcctggtcctgatgcctggcagaatcgaaggggtgagggtacgctctctgcagcagaaagccctgggcttaaagtcctatttattatttggcgttgccacttactggtcggtggctttggtagggcgcgtttctgagcctcagtttccccatttgtaaagccgaagtacatagcgctttccctgcagagttagaaatttcgacgatgtgccgcgcgctctagagcgcgctcagcaagcgggtcccaccgtgcccaaggcaggaccgcggcgcgatgtcacctatgcaaagtcgccgcaactcacgggaatcgcagctgtgtgctcaactttcccctccccgccgccgtctttctccccaaactggcttgggggtcgagtatccggggctctcccccgcactggcgcttcccgcgcgggcgccccaggtgtccgttccgttccgccctctgcctggcagggcatccagaggtgtccgcgctcccggagctgggcggagcggggcgcagcccacgtggttcgggcgggaggcgccgggacgtggccagttgcccgcctgccccggagagccaggcgctaaccagccgctctgcgccccgcgccctgcttgcccccattatccagccttgccccggcgccctgacctgacgccctggcctgacgccctgcttcgtcgcctcctttctctcccaggtgctggaccagggactgagcgtcccccggagagggtccggtgagtgcactga

SEQ ID NO: 25780 - DNA, 2300 bp, Homo sapien
tcctcctccaagctcatcaggcagaatcctcaaaagacatggactgggggccacggttcaaaaagactcataacttttagggtttcatcaaggtgattctttaatgaaactgttttttcttctcatttctttttcttttttttgagacagaatctcactctgtcacccacgctggagtgcagtgacacaatctcggctcactgcaacctctgcttccctggttcaagcgactctcctgcctcagcctcctgagtagcagggattacaggtgtccaccactgtgcctggctaatttttgtatttttagtagagacggggtttcaccatgttggccaggctggtcttgaactccttacctcaggtgatccaccttcctcagcctcccaaagtgatgggattacaggtgtgagccactgcacccagctcatttctttttcaatgaaggatctaatgactgtcagagcagttgggcccactgccctgactcgtgctaaagcctcagcagtttatccaccattgtttttacaccttcagtgcaggcatcaaagagcaaagaaaaggcaaatgatgtctcagcattattacaaaaatagctttggccttgtgactcacccccctaaaggatcttaggaacctccagaagagaggtccctggaccacactttgaagaccactcttcgaaatcattggatctaatattccacggtagaaattgtgcccatttccccctccattgtgagctgtgatttctcgccatctctgtcttaaccagttcttctccacctccaccagcatagccggtggtgctcccatctcagcctggtttcctcctgtgtctcctctgtccctctcattgagactgcacgtacttgcttatgccccattcagcacaccaagctgacttgtttcgagtctgtttctgatggtaagtcacattcaggagggtcttttattcctgaagctaactttaaattggagccacgtgccgggctcttgcctgttgaggagtgacttctggtcaacccaattagcagagtgcatggagtgctctggccccattcactcctcaggatcggaagctccgggtcttgttgatacgtcctggagtggctggcagatgtcatttggtctccccaaatggagtcttctctgccctcccttcctggtctctggctatgaagaagggaagttatgttttaaagaatctaaagcacagtacagttctcctttcccctaatttcagcctctgaaatatatcagcctccagctgctgccccaggacacttctgggctcttatttaagaggactcctccagcctggaatgcagggcagtacacatgtccttgtctttcttcctgctgtgctggccctcagggtaccgttctgcctggatacagaagaagaggttctccctgggacagaggctaacaagccctgtccagcgaaggggtggcctccaggttttctggttggtgcagagctggcaagggtggaaatggagggagtgaggcccttcccatctggctccagggacttgtgctcctctgtttgggacaaagactttaccttgtcaatgcagctttatctaaactgtagtctgtggatggcggtatccccctagattcctacaactgcttgaccctttttctcttggtttttgaagctatgacaagagcctgatttcgtgtccatctcagtgaacatttttgtaaatagtggagagaggaaaatcgtgaagttcagccaattgcacttgaaaccggaggtggcctccccctgcctggtgggactcctccactctcttcacctttgctgcactctgggtgtccgcctccaaatcagtgtgcttcagagttctcagaagacaatggcacctagtgtccttcttgtttttgtcactaagaatggattaattttatctcatctgaaactgaaaatattacgtttggcagacattctctgaaatctagaacaaaagaaatgtgttcattatcatctaaggatacactttccaatcagttcaacttggcaggttcaccaggaagctgtgttatttaaactcggatggtctaggagaactgtagacttccgggtgctagatgattcctgctctggaaactcaccgagccatttcagctgcgctctagaggagcaaacctggggcgttagctcaactcttgcccccctgctgaaggagaccaaaacaatgcttgatcaggaaacaccatctggctttgcccccaggattctgtgactgccctggggagggcgcagtgacctgccaaccaaaattggtaca

SEQ ID NO: 25781 - DNA, 2300 bp, Homo sapien
aggaaggaggaggggtgcctgcagcaggtgtttccaggtctcccatgatggatgctgtttaggcatttcagcacctccactccagtggggtggaaggggctttccatgcacctggtgtcatccacggcagccccctcctcccatcaccgataggaagtggccctgccttgtgagaagaggtcccagatgctacaggcttaccttggagcctcagaagactggatctagcgtcatggcaagggtgagtgggcttacttagggcagaggatgcagactcattctacgacacgcagctgtcggctgacattccccagcagggctgggctggcaggctggaaccaggcattaggaggcgctgagatgaatgtgggaaggggccgtgcaccggattccagcccctgagcctggtccaggcttggcactccccagctccccaaccatgtctgaggttgagcaaggggctgcctccacctgtgcagctccctgggcacctccccacaaacctgctgtcctgggtgtgcaacatgcacagccgtgcagaggcctgctgcaccttctgatcccttaacacaggcggacagacggacccaaggctgttccatgacagcccccctttataacgcgtagctcacacctcctgagggctttctgatcatgagcatcaatgtacatgtgaccgatcccgttagaggctgacgcgcacagaagcatctcacttaacacctcattgcgcagaggagagaatggggtcacaggcgggtgggggaccatgcagagagccaggtttaactgctgtttctgtgcttattcccacctcagcacagatcagaggaacacgtggagatctatgtggctatgtgcacgcgcacatctacacacatacatacacatctacacactcacacacatctacacacatacatacactcacacacaactacacacacatctacacacatacacacacatctacactcatacacatctacacacactcacacacatctacacacgtacacacacacatctacacacacatctacacacatacacatctacacacatacatacacacatctacacacatacactcacacacctacactcatacacacatacactcacacacacatctacacatgtacactcacacacctacacacatacacatctacacacactcacacacacatcgacacacacacatctacacacatatctacacacatacacacatctacacacatacacacacacacagctacacacacatctacacatacacacacatctacacacatactcacacaactacacacacatccacacacatacatacactcacacacaactacacacacctacacatacacacatctacacacacacatctacacacatacacacaaacctacacacatacacacatctacacacagacacatctgcacacatacacacgcatctacccaatacacacagacacactacacacatacacacacatctacacacacacacatctgcacacatacacacatcacacactcacacacatctgcacacatacacacacatctacacacatacacacaaacctacacacatacacacatctacacacagacacatctgcacacatacacacgcatctacacaatacacacagacacatctacacacatacacacacatctacacacatacacacatctgcacacatacacacatctacacacatacactcacacacatctgcacacatacacacacatctacacacatacacacacacctgcacacatacacacatctacacacatacacacacatatctgcacacatacacacacacaggcacccatgtgcacacaccacaccctcttgtacacatatacatacacagctgtgcactcacatgcacacaggctcatgcacatacttctctctcacacacagtgctcactctacccaaggtcccagctccgtgcacacgcaccctgatgcctgtgtgacgctgctcctgccccttctcccccaggccgtgtcctcctcatttggatctcccctccagcggggcctcctcggaggagccaagggatgaaggtgctgagggcctggctcctgtgcctgctgatgctgggcctggccctgcggggagctgcaagtcgtacccatcggcactccatggagatccgcagtgagtgcctggacccctgtcagcctcccttaccccaccctgcctcaccccagaacctagtgcagcctggtcgctcgagaacctggcaggaacggggtgc

SEQ ID NO: 25782 - DNA, 2300 bp, Homo sapien
ccaggaacaccagggttgccggcagcccctgaagctggaggaggcctggaatggattctccttcagtctccggaaggaaccaacccagccaacgcatcagttttggacctctggcctccagaactgcaggaagaaatttgctaatttgagccactcggctcatgggactttgttttggcagccgcaggacactcatgcactgtccttggagtgtaagtttttattttaaacatgtggctccatttgccagaatctccccaacagaccccaaacccaatccagggtctaggcagggtagcagctttgacaggagcctgtcggtgctggtggctcctccatgccccagacaccttgccttcccccgccccgtcctctccagttctgtgtataacacattcctgacaagccacacacaatggggcaaaacattttggagatctataaaataaccattttaaaatcatataactttggaaagcaaagggtagaaaatctttaaatgaacagtgcattgcccaatatgttaaagtgcttgggagtagttgtgtgtgtgtgtgtgtgtgtgtgtgtgtgtgtgtgtgtgttaagcaggtacatggctgagtaagacaaagcccctgccttcctgggggagacaggtggagaacgcaggaggccttgcctctgggtgtgtatggggtgcagggaggcttccgtggaggcagggggcccagcagcccttccggggttgccgctggaagatctcagaggatgcctaagagttttctaggtgaacaagaggaaggataccatgcagaggggacagtagagaagggtgttggtggggagcagcattgggaaagtggggaggttagcaggaggcgaggaaggccttggaggagcctatgcaatcgtgactgcctctgtgcaagatgggtctggcaggcgaggggccggtaggccgggggtgcccagggctctaggggttcccagagcccagctgcatcgctggaagctggcagggatgcatcggactcccagtaagtggagatccctttcacggcatatgtagcccagagcttttgtattaggtcctggagagatttatcttcccatccaaagcctctccaaaggccccatagcaatcactcccaacactttgctcgatgtggaaggctccatctcccagaagaactgtttgctcaacctcctggccatgcgggcgtgggagatgcatggccagctgtccctctgagcccattgctgtgcctgcggcttgccgtggtcccacctgagccgcatgtggcaacctcgtcctctgagtaagccctctgggcctccctgtttcaggtgcgttcttcacaaaggtggtggatgtgggtgccacctctctgaagcttgagatctgggacacagctggccaggagaagtaccacagcgtctgccacctctacttcaggggtgccaacgctgcgcttctggtgtacgacatcaccaggaaggtagggcccgccttgaggcacgtcccaccctccttcccaagcacctgccttctggtttctccagtgcaatgatgccatggcgtaatcacaaggaacagagactccattagtgagcaacagtcacctcctccaggatggcctcctgacaaccccccatcctcctccacagtggggttctgctcctccgtggtccacaaagaacatgccgttgccatctgccactcagtagttcctggtgctgcattagggtcagggtttggggtggtggccagtcccccagactctcttgcacaaagtggtcctttgaggacagctaggcgtgggagattcaggagctcgaggcctgacctgaaataccccgtggctggcagtctcctgggcctggtcagggtgaaggatctgatgtgtgtcctagcagttttctgcctggccgcacaggtcacccaggacaggaacgtgccctcctcagaggaacggagcagccctgcaggtgcgcccatggccagttggattctgtgacattttacacaacgtgatcagcaacactggcttccccctcccggaatagctaatgaccacctataagttttgtttgatgttactttttttcttcttttctaggattccttcctcaaggctcagcagtggctgaaggacctggaggaggagctgcacccaggagaagtcctggtgatgctggtgggcaacaagacggacctcagccaggagcgggaggtgaccttccaggtaccgcccaggagaccctgctctgctcttccacagcaggagagagccctgcccgcctgtgtcaagaccttg

SEQ ID NO: 25783 - DNA, 2300 bp, Homo sapien
ctcagggcctctctgcaccgtcaccggtcacttctgagatcttacgcatgtgcattgctcaaagggtggctggggtgccacgtggcacagctctgtgctgtttggggactggcttggggtctttgaggggttttcgccttctagggagtcgggaccctctctaacatgagcgatgggctgtgacataatcacagttgagcttagctgattccaaaactcccttctccacacaaggcctggctttcaaacctgttgtctgactgtaggtacaaacctcccattttgggtgtaaaaagctggttcttaaccattttgtctttttaatttttttttttttttttttttactttttgagatagtttcactctgttgcccaggctggcatgcagtggcatgatctcagctcactgcaacctctgcctcccaggttcaagcaattctcctgcctcagctaggattataggtgcatgccaccacacctggctaatttttttttttgtatttttcatagagatgaggtttctccatgttggtcaggctggtctcgaactcctgacctcaagtgatccgcccagctcgccttccaaagtgctgggattccaggctcgagccaccgcgctggcctctttttgcattcttgctataaaattggtatttgtatcttcctcccattctgcgctcccccaaccctgcaggaaggtggattcttcaagggaactggagagaagagaagcacattcatgtatttccacattcagcctccatctcacgagttacaccattcccagcacgtcaccacccccagacctttggttaccagcctgggggcagaggataaggacgtcattcaaaaatagagagattctcaagcctccagagtgcgggggcccagccgagcatgctggcggcttccagggaggtggccacgccccaggggaagtggttgcatggaggaagaatctcagaggaggcttggacgtggtagagcaacgctagtcctgtgttaggactggctagtccgtcctgcagggatgaggggcagagcctcagcagaagtccaggccagtgtcccccctccagcataagagccccccactcccacagggcggaggaaccactgtggtggcggagcttatttcccagcagccccgcgggatgagacccaaacgagaagttagggtgagtttggaggacataaagtgagctggcttcccgtatactggctgtgtggagtaatgttcacggcaacagatttccatctcctcagcctcaggcccaaccctgctaccccagccatactcagaggctctggaaatcttacctggaggagactcttctgttaccaccaagccaggaagtttcatggcttgggaagaccaagaggaagtccacctccccctctcctgcacctggagtctcccatgtgcacggaggccacgcccccaccccgccctcaggtggcatcagcccaggatctgaccctggactggctcacactcagttgcctctggccagtgcagggctcagccagggatggcttctagctgacagtgggaggaattaattcatctgaccggaatattcttttctcttctgggctgttggtttttcaagtgcaacaaagattccatacagctccaaggaaggagccaagaaaaacattctgtgccaaagtgagatcctggaagtgaaaccccggaataaagctgaaaaacgggctccagttgggtgccaggaaatgcaggactggaatgtgacttgacttccggcagcgcgcaggtgctcccgggtcacctgctttgaggtccagcctcctgccctgcctcaggtgaccacatgaccactgtggactttgccctgaaaccttctgggaggagaagaggcctgaccttggcgctggggtccagtgggcattgctctggtccgaggctgctgctcttgacctctgctctgcggctgttttccattggagtagaggctcctcctgtcctgtcctgcctgtggagggaagcaaaccttcccctggaccagagagaggagaaagcggagacaggtagcaacgctgtggactggtgatgacaggctcttcagctccctgcaagtgaccgggcctggggaacaggtgagtcattgtttaaacctctgtgccctttgtggagtgtctgcctgtgtgtgtgtgtgtctctgcttctctgtgtgtgagtctctgtgtgtctgtgtgtgtgctcacgtgtttgtacccatgtctgtatttgtttgtgtctgtgcatgtgcccatgtgtgtataatcaaaggacaaa

SEQ ID NO: 25784 - DNA, 2300 bp, Homo sapien
ccgccgagtcagtgggtatgtgttacacatccagagataactacacaggcatcgaccctgtccacccggggatgctagaggggctgtgctggttttactccaggccatggtgagagccactgtgaacacagggctctctcctctgagctgcagaagctctgtgccctgtcccctgccacaagtcacagactttcttcatgtgttttacctcatgttaatgaaggagatcttctccaggggcttgatctagtgggaaacagaggagggggggattttaaatttcagtccgtccaaccctgtagatctgctgtcctacagtaacgtaaaggatcaccaggtaaaacgctgcttctcccggacgccgccaccttgcccctctctctcacatggacactggtgcctgggttgggagtatggccggtgacttcgtggcagtgtggggaggggatgtgtgtccttacatctgtgagaggtcctcgcttccccgtggtctctgctgaaaatgtctgcctggaccgccagcctctgaggcaccttggccctgcctgcaccagctcctgagcctgcctgtcttggtgtctccttctgctgtcccgtgcctggccctcagggcctctctgcaccgtcaccggtcacttctgagatcttacgcatgtgcattgctcaaagggtggctggggtgccacgtggcacagctctgtgctgtttggggactggcttggggtctttgaggggttttcgccttctagggagtcgggaccctctctaacatgagcgatgggctgtgacataatcacagttgagcttagctgattccaaaactcccttctccacacaaggcctggctttcaaacctgttgtctgactgtaggtacaaacctcccattttgggtgtaaaaagctggttcttaaccattttgtctttttaatttttttttttttttttttttactttttgagatagtttcactctgttgcccaggctggcatgcagtggcatgatctcagctcactgcaacctctgcctcccaggttcaagcaattctcctgcctcagctaggattataggtgcatgccaccacacctggctaatttttttttttgtatttttcatagagatgaggtttctccatgttggtcaggctggtctcgaactcctgacctcaagtgatccgcccagctcgccttccaaagtgctgggattccaggctcgagccaccgcgctggcctctttttgcattcttgctataaaattggtatttgtatcttcctcccattctgcgctcccccaaccctgcaggaaggtggattcttcaagggaactggagagaagagaagcacattcatgtatttccacattcagcctccatctcacgagttacaccattcccagcacgtcaccacccccagacctttggttaccagcctgggggcagaggataaggacgtcattcaaaaatagagagattctcaagcctccagagtgcgggggcccagccgagcatgctggcggcttccagggaggtggccacgccccaggggaagtggttgcatggaggaagaatctcagaggaggcttggacgtggtagagcaacgctagtcctgtgttaggactggctagtccgtcctgcagggatgaggggcagagcctcagcagaagtccaggccagtgtcccccctccagcataagagccccccactcccacagggcggaggaaccactgtggtggcggagcttatttcccagcagccccgcgggatgagacccaaacgagaagttagggtgagtttggaggacataaagtgagctggcttcccgtatactggctgtgtggagtaatgttcacggcaacagatttccatctcctcagcctcaggcccaaccctgctaccccagccatactcagaggctctggaaatcttacctggaggagactcttctgttaccaccaagccaggaagtttcatggcttgggaagaccaagaggaagtccacctccccctctcctgcacctggagtctcccatgtgcacggaggccacgcccccaccccgccctcaggtggcatcagcccaggatctgaccctggactggctcacactcagttgcctctggccagtgcagggctcagccagggatggcttctagctgacagtgggaggaattaattcatctgaccggaatattcttttctcttctgggctgttggtttttcaagtgcaacaaagattccatacagctccaaggaaggagccaagaaaaacattctgtgccaaagtgagatcctggaagtgaaacc

SEQ ID NO: 25785 - DNA, 2300 bp, Homo sapien
catttccccatatttccttctttcctgttcctcaccctgatcacgcttgatttattgatggcagttccaccaggcctaatcgccacacaccagcaaaggcaggctatgctatagtacaagccactagcccgcctcttagaacctctcatttcctttccatcatggaaatctatcctcaaggaaataacttctcagtgttccatctgctattctactactcctcagggattattcaggccccctcccttccctacacatcaagctcgaggatttgccccacccaggactggcaaattagctttactcaacgtgccccgagtcagataactaaaatacctcttagtctaggtagacactttcactggataggtacaggcctttcctacagggtctgagaaggccaccgcagtcatttcttcctttctgtcagacataattcctcagtttagccttcccacctctatacagtctgataacagaccagcctttattagtcaaatcagccaagcagtttttcaggctcttagtattcagtgaaacctttatatcccttacggtcctccgtcttcaggaaaagtagaacggactaaaggtcttttaaaaacacacctcaccaagctcagccaccaacttaaaaaggactggacaatacttttaccactttcccttctcagaagtcagacctgtcctcagaatgctgcaaggtacagcccatttgagctcctgtatagacgctctttttattaggacccagtctcattccagacaccagaccaacttagactgtgccccaaaaaaacttgtcatccctactatcttctgtctagtcatactcctatttaccgttctcgactactcatacatgccctgctcttgtttacactgccggtttacactgtttctccaagccatcacagctgatatctcctggtgctatcctcaaactgccactcttaactcttgaagtaaataaatagtctttgctggcaggactatgctgaatctccttaggcactctctaattagatgtcctgggtcctcccaattcttagaccttttatacctgtttttctccgttattccatttagtttttcaattcatacaaaaccgtatccaggccatcaccaataattctacacgacaaatgtttcttctaacatccccacaatctcaccccttaccacaagacctcccttcagcttaatctctcccactctaggttcccacgccgcccctaatcccgctcgaagcagccctgagaaacatcgcccattatctctccataccagcccccaaaattttcaccgtcccaacactttaccactatttcgttttatttttcttattaatataagaagacaggaatgtcaggcctctgagcccaagctaagccatcatatcccctgtgacctgcacatacacatccagatggccagttcctgccttaactgatgacattccaccacaaaagaagtgaaaatggcctgttcctgccttaactgatgacattgtcttgtgaaattccttctcctggctcatcctggctcaaaagctcccctactgagcaccttgtgatcccccactctgcccgccagagaacaacccccctttgactgtaattttcctttacctacccaaatcctataaaacggccccacccctatctccctttgctgactctcttttcagactcagcccacctgcacccatgtgaaataaacagctttattgctcacacaaagcctgtttggtggtctcttcacatggacgctcatgaaaccagccacagctgaagagtacctggcaccaagtgtaaccaacatcgataatgatcacaacacaaatgcacgttcaccgtgtgttgggtgttgtgctccaagtgaccaactggaccaccatattttctggctaagcatttggccatgatggcagaaatcaataagacagacagagaaaaggaacaggagtggggttgtgacagcggtgacactctagagaggaggtggattataatttggtacctagaactgaattgcttcacgctggctcccatgagacctaggctatggctagaattccccaacaggaaagtccccatcactccttgcagctgaagctgcagctgggcagaagggggctgagctgacactgcaaacctgcatgggtgggctttgggctccaagcaggggcctttgcctggggatcactccccaaccaccacctggtctcccagccctgcgggcagaatgggctccagggtagctctcagaacaacagagccctctcctctcccctctgc

SEQ ID NO: 25786 - DNA, 2300 bp, Homo sapien
gggaaagtggggaggagggttgggaactgaactctgttccacaagttcaaccactgcactccactaagcaactggcacagccagtccctggtgaaggcttaaagatgaggaagatggggtcagcgcctgccctcctggcctcaacacatcaggatggaggatttaggtgttagcaaaaagtggctcaaagttccaatgaaggacagggagcaaagggagacttcttttagaaaggagacgttggaacttggatatggctttagttaaggagctccaggcatctcaagtcagccctgagaggcagcagccgtgtctgcctctcggacagctatgccccagcctccagctcagcagctggcaggcagcaggtgtgggtgcaggaatgagtgaactcatggggaccagcctcggcaaagacgcacagtccccacagtgccccaggggctgggaaacagtgagcagccaccagcaagaccaaggcagtgcaagtggccacggctcaaggtttcccccaaggaggactatgtcacttaaggagtatggcctctgaagtaatgtaaatatggcctggaagattcagtcaacacctatttccttagtgcctacaatgtgcaggtgcagtttctgctcccggagttcagtcatgaacaatgccacagtcagccctgccaacccacctgcgtcagctcaggcacccagagcaatgtcacctggatctgccctccctcccatgtcactggactcgctgtcttttccctgcaatgaaacctccaacagctttccctgccactgtgggtggaagggccctcttcctcttcccaccttcatacagcttccaggccacctccttaagaatccaaagcaatctggtcacaccacttggtgggaaatacaccgaaatgttaactgtccttatcactgggggaaaaaaatcacaggtgacttcagtacagcctcctctcctctaccatcactaccctccctcccatccttccccaggtccagccacactgaagttctccccataccccaaacacaccagtaactttcccacccggtgctcctgccgtgccctaggcaggggcttttaacccctacctaatcctccgatttgctttacttttaaatccacctctggagcatagactgtgagcttcagagagcacaggtaagttcattactttttcaacaactaggagagagctgcgacgcacctgccccgatcctagaggctggggacccaccagagaagtgacaagtccttgatctcagggggcagacagcggggagaaggatggatgctagcacggagaacacgcgtgtaaagacagaaacgcacacatccacaccatgccgctgtgaagccggcgcccaggaggctggccaaggtcacaggagcggcggtggcgggcggatccgagcacctctcggcctgaccccagagcctagctctcaccccggcgagggacttccaccccgactcaccgcggaatggggagcgccaggctgaaccaaatcctgtgctcacccctccgtgcaaacccctcaaggcaactcaggcctctgaaagccttcctacccccccgctctccgctcaggtccccactcaaccggtgcccaccgccctggcgcgcgtcgctccgcgattaccggcccgccaaacagtccccgcaaagtccaccctccggggctcccggtccctcaggtcccgcgtgcccggccctgggcatccgcagcgtccccgtggtatcggacccccatcgtccctgacacctggcgtctccgccccccgcccccgtcccccgccccgccgtccctggcccctgcagtccctggcccgcgctgcggacctccggctctggcttcccccgggtccccgcggcccccgtccccccgcgtccccgcgtccccggcccagcgcccgctgacgccatgacgccgcggcggagggaggggccggggccggggccgggccggggcggcgcgagcggctggagcaacgggccccgcggcagctgcgggcgacgcggtcgatggacatgggcacccagggatcggggcgcaagcggctccccaaccgggagcggctcacggcggaggacgacgcgctcaaccagatcgcgcgggaggtgagcgctccgggagggcagccggggggcgccgggcgggcgcgggggccggacggctgtcagggtctctccggcgtccgtctgtcccgctgtgcgtctgtgccactgcgcgtccggctccaggcgggtgggccgggcaggcgcgcgccggggcgctgatccccaggcgct

SEQ ID NO: 25787 - DNA, 2300 bp, Homo sapien
cagagcccacttcttaatcccttccctgtatggttttcagaagctggtaactagcaattgactggcagcctgggggttaggaaaatgtgtcttgtggcaattacaggtgtcttcaagcattgcctcagggacatgccaagggaacggaaaccagtcccagtaccctgctctgggagatgtggtcacagggttcggggtgttgagtagctttagaatctgcctatctagatcagaatattcaaaatcaagtctcagaagaagagggctgttttattaatgggttatcattctcatcagtgaagttgtgaccactggtaaaagtctaactgctttctacaataaattcccagagaacatttaaaattattttctccaaataattgcactttaaacaatcaagaattgtgataggccaggcgcggtggctcacacctgtaatcccagcactttcggaggccaaggcaggcagatcatttgaggtcaggagttcgaaaccaggctggctaacatggtgaaaccccgactctactaaaaatacaaaaatgagccgggcatggtggcaggtgcctgtaatcccacctactcgggaggctgaggcaggagaatcgctggaacccgggaggcagaggtcgcggtgagccgagatcgcgccattgcactccagcctgggcgacagagcgagactccatctcaaaaaaaaaaaaaagaaagaaagaaagaattgttataacaacatttaaataagcgttacagggagaaaacaagctattgaaaggtaggcatttcattatctttgaaagttgcttttgtgagcctgagatgctgtcaatcaaagacagcttggcctctgttcatcttaagttcaacgtttcttccccagcggttctctaggcctttgctcggcccctcttttccttctcccctatccctcccaagtcgtccttcggctcctcagcacccattttccctgctgcacaccctcctgacaactcctgccctgaagccctgggcccgggtcacggcgggaaggtgagtgctcacaggcgcgagctcacgttaccaagttgggtcagcgtgcagagaaaagggaattgggaattggagggctgtaaaatgtaaatgtgctttaaattttacatttcctggcgtggccaggacaggctgaccttccgattacaatccgcgtcatcccgtcgcttctgcccccagcctggcgaggtcgggaaccgtttcccgcaggactttcattgggagttacgagggcgccctgtgcctggaggtggcgcgggctggagccctcccggaggagaccggcgcctggcagggggtcgtcgcggccgcagcctggacggtgtggaccccgggttctgcgacgccagatcggccccagcggcccgcacccgcaccctgcaagctcgttctcccctgcgggccgccgcaccgggccaaggggggctgtgtgcacgcagctgcgtcgtcctggaagtcggcccttctcgggatgccgcgttagtggggtgcccggccggcaggtgcagcggtgctggggcctaggcttccgcgtccaggaagctcagcgtggcctgagggtgatggatgtgggggagccgggaactcataccctcgcccagccccgggcaggtccccccccggaggggaccccctcttcgggtcgacccctactgggcgcggcatcctccccggagcgcccgcttcccacggcccctgcgggtggagctgcggccggagcctgaggggtcttttcctccaggtcctctttccggcgggggccggaggggtggtgatggacagcccgggaggggcggggcaggaccaggaagatccttccgagacggagcgcggggggcggggcggggctcgcgttaagggagcgcggaagggcgggacaggccgtggggcggggcctgggtggggcggagccggtgggggtggggaaaggggcgtaaccgggagggaccctccgaggcggagcggcgcaggggggcggggaaggcgggtcatggggcgggggcggtggggcgagtcatggggcggggacggggcggggcgtagccgggagggcccctccgaggcggaactgcgtggggggcggggcgggccgtgggacgggcggaggcgcccgagtcccgcttccccggcgcccttccaccccgagcccgactcagcccgcggccacctgcgccccgcccctgtcggccgcgcccgagcccagcgccgcgagccgctccccggcgggctggctcctggccccggaagcgcgagcgttcacttagcggcga

SEQ ID NO: 25788 - DNA, 2300 bp, Homo sapien
caggagttcaagcccagcctgggcaacatgatgaaagcccatctctacaaaaaaaatatacaaacaattagccaggcatggtggcatgtgcatgtagtcccatgtagtcccagctacttaggaggcagaaacacctgagcctgggaggtcgaggctgcagtgaattgtgctcacaccactgcattccagcctgggtgatggagtgaaaccctgtctcaaaaaaaaagaaagaaaagaaaaagaaagttgacttagctatactccatataagaaggtatagaaatatatagagcaatttagaaagattatagtgtcaaaagattcaaactcagaaaagaattgaaaggttgcctgccagccatatccccagacgaacctagaccactggggtttcactatcatacagaatagagaaaaacattggttactgacacctgaaatcaaaaagcttggatatttttcagtcccaaaccagaacatagctcccgtatataaatgtaaatcttccttcaaaagtataattaagtataattatgggtgtatgtcaaaaatatagaggaagatggatttttacttataggttgttatacaaagttgggacagcaatcaaatttttaaacagttttcaagaatgtatgaccttaaaagaaatgtgtgaccctgatcactttccatatttgtaattaaccggagacctaatggtctgaacacttaagtttccactatcactaggaccctgaatgctaattctggggagtttagatggtttggggctcctgttttctattcatagactccctttctgggagaccaccccccaaccctgtacagcgtaccacccgtggccaccagccaagggaacacaacagtaagatttgttctaaacgtctgggcccctaagggaaagggaggggtgtttgtgtgtgcatgtattatgttcagaatatgtacttgttcagtgtgatagttgtacgtggagaaaactttgtctttcaagaggaaaatccttttgttctttttgtccctatctactgcctctcttaaatatttttcaacatgtgaatggctggtggctgatacagggaaaaatttcccagctatacagacactataagtctaccggtgatgtgccactatttattcaacaatatagacttggtggtttttaacgctacgaaaactagtactctttattttcttcatgtcaaattattttgcttcatttctttttccattttcttcaaactctttcgttcttgttttcttgtccaagtctcctttagaatttctcttcctgaaaagtttcttctctatttataatgttctcactatacaactaaatgtcagattacctatatcaattttgcttgcactcttattacattttaacacttattttctagtgcttatgtagaatatttgaagttttctagaagaaaacaataacaattgtacaatagatacttgagcttcaagatcacattctggtgtattcagtgtttcttatgacgcctgtagtttttgtatgtaggagtattaaaacatgtaagaaaatgaaaagtgatattgggcaaaagaatcaggttcataactgcaaaaatgttttgtttcaatgttgggtgggttatgggggggagcgagtaaaacatctgtcagaagtaatttgactgtaaattaaaatagaactcaaaaggatgataaatttaatttatattgtgcttaacattatctggtgtttactgtgcctttcaaaacaacttaggatctttggaaaacataattagagaaaaatgtaacttggattagcatgtggctagatgattttttaaatgaaaatgaagatgcattttatatgaattattttcttttcacatggctaatcaaggttagtttttcattctatgaagaatctggaggtaggccgcatgacagcagtgtcctagtgagctaagagctttgagtcagggtctgactcgggcgtgtgagtttggatctggaaaaacagcgggtgcagtgtttaggggagtgttcccgtggctgggccgcaaggcctgaagaaacttgcttagtggttctgggcctctgagcctcatctatagaaggaggctatgatgaagcctacccatagggcttctggggctgaaacgagctaatgatgtcgaagctgctagaactgtacctgtgtcagagcgagtgtgcagcatacgttatcatcactgtcatcactccagcattctgactgtgcctttaaactagtgtgggattttgcccaaacctctaaaccctcccctagccgtggt

SEQ ID NO: 25789 - DNA, 2300 bp, Homo sapien
aatgtgctgaaaggcgcggcacgcggattcacctaaacctgtgtctttgtgatttctttagatattaggttgaaaaagctggttgatgaacgggaatgcttattggaacaggtaacaatctttttattactttaccggttcatgaacagggcacctgaaaccacctgcccatccttccttcttgcttactcagaaaacccctaagttaatcatgtctgaaagtctttatcaagccaactggtgttcttaagattgctatccaaatagaacatcaaagttaatattttcatccaaagagaacatcctgagtcatatgaggtttaataaggatgtctcaaagacccaaagccatggaattgaatttggtacattttactgaattgctgcttaaaataaatataaatgttgattattaataatattaatgattaactgttgagagacaagagcattactgagtcattccaaatagcacttctcttgtccatatgggttgtttgtccataaaagtcagttttgtactcttggtgatcagcacccctctctcacaggtgtttctttgttacagctaaacaaagttgttttaaccatgtttatcttcattgctctctcctacctcaagaagtagcaggccaggtgcagtggctcacacctgtaatcgtagcactttgggaggccaaggcgggcggatcacttgaggtcaggagttcaagagcagtctgccaacatggtgaaaccccgtctctactaaaaatacaaaaattagccgggtgtgatggtgcgcgcccgtaatcccagctactggggaggctgaggcaggagaatcgcttgaacccgggaagcagaggttgcagtgagccgagatcgcaccactgcactccaacctgggtgacagagcaagactccatctcaaaaacaaagaaacactgaacagttatcctatctgatctttttatatgcaggatagtgattaaatcactctacaaccactttcctctaatttctcctcataagcctaatcaaatgtatttgccttacttcctaccattctgttgaagattctccgaaaattggagaaagcactaaatatggtaggaagattctcttgaagttcctgtgatcttttgaaactgcattcctgagttctatccttacttccttaaagcagcatgcacttttggtttgttgttaatcaggggtctcctgtgcttggtgtgtggggtaggaaggcaggtgatcacctgcaacaattcttcacagattggaagttaaacatgaaaagcccccggagaccccacgaactagatgccagaaagttctgcagtcattgactgttaactgcaattccaactatacggtcagccctccatatccatgggttccatatccgtggattcaaccaacatggattgaaatattccaaaaaaaaaaaaaaaaaacccataaattccgcaaagttccaaaaagcatagcttgaatttgccctgcacggagtcctgcactgaatccacacaaatgaagtgagttgtaggcgttgggtattaaaaggaatctagaggtgatttaaagtgtaccggagaatgcaggtaggtttctgcaaatactgcaccattttatatcagggacttgagcatccacagatttggtgtctgaggggtcctggaaccaatccccccccccccccgcccagataccaagggacaactggacatgtttctgtcttgcttagagaggggaaagctagctagagaccaactccctgaaagctggcaaaccgcctctgaacacacctgcagctggcctggacgctgagaaagcactcgacttttgggggacttaattacaatatattggagcccagaaggctccaagtggccctttctggtttcttagtaaataaagagaaagtgaatagcatggtgacttactgagtcttaaacattgcaggtatttcatgtacagtctcctcctgagtcctagaagaatttcactttagaaatgacttttctctcagagttacagtgtaattcatttttcattcattgtacattgaattgtgtttctgagaagagtactgatggacacaaagtgccttctgtcatttgacatgctgcttcctttctgatgggctctaacttcagcttttcggtctcattcagagtagagaaattaacagattttactggcgggtgttttcagattaagaaactcaaagggcagctggaggagagacagaagattggcaaactagacaatcttcgatctgaagatgatgtcttggaaaacgggacagacatgca

SEQ ID NO: 25790 - DNA, 2300 bp, Homo sapien
aggagaatcgcttgaactggggaggtggaggctgcattgatccgagattgtgccactgcactccagcctgggcaacagaacaaggctgtctcgaaaacaaaacaaaacaaaacaaaacacctcaaagggcccagaggaaggcaaaacaaggacactggatcccacagttaaacaaaaacagctgaggtcacttaagtgggaatgtttcttccccttgccgtagcaggaggcttggtgtgtctcatgcaaacagcccatttgcccttcaacccgcctccctgccaacaaccggcagcccctcctgccacctgctcagtggcttgcctgtaagcacagcatcactgtccggcacagcttaccttttctgtagcctggtgacacatgtgatgtctgtgctcagcccatccactcataacacaacatttcatctctattccctgaatcccaataatcctccctaaggatggcatgatcactgtcttcgatggtttaaaaggttgataaatgaaagatttgactctttctgtgttgtacccacccacagggtggagaggagactaacagtgaaatgagcatttggcaaatggctgttcagagaggaatttctcaaaattctaactgtggtggagcagtcaaaggagaaacgccaagggtctagagtagaacgtggtttccagctgtcttgacatcagggctgctggcccacagacacacttccagagccaccccttccagggtcaccatggcccagtcctgctccagatgccatctgcccagcagcccaggggagagtgtccagccttctaatgtgagcctcaatctgaacccctttctataacagaggccagacctcataatctcatcagcagctctggcctgctgctgccgtggccgccctctccagccactggcgttaacttccaataacatagggacttctaaatgaaatccactgtaaaaggacaggccatatcactttaaaagacacttgaaagcacttttggtaatggcaagatttgcgataagtgtattacattatcccaagatccatgctcacggtccactgtccaccactgcaccctcagcccctggcccctggcaggccaatagcaatctgcagaatgaatgaatgaatgaatgaatgaagtgcatttcagagactgcagcctcatttgaggggataatttgggggtaggtgcagttttagagcccctcctctatctgccacctatccaaagtcctccgtggcccaacaatcaagtgcatgtttagactaataagcaaatgaagccacctgcagctctatcctgtccccaccccttcaggactgtgtcattttatacaggtttaaattccctatcaaggataagactaggcacaaaacatggggggcaggggaggggatgcaaaaactcagtaatcttttaatgcaatcttttaaaaaatcgaaattaatgcaaaaaatccataataaaatattcaaatttaatttaatttaatttatttattttgagacggagtcttgctctgtcatcatccaggctggagtgcaacagggtgatctcagctcactgcaacctccgcctcctggatccaagcgactctcctgcctcagcctcccgagtagctgggatcacaggcgtccacgaccacacctgcccggctattttttgtgtttttagtagagacgaggtttcgccatgttggccaggctggtttcgaactcctgacctcaggtgatccacctgccttggcctcctaaactgctgggattacaggcgtgagccaccgcgcccagcccagaatattcaaattttaaataaagacaggaccagtaacaatgtaccctgtggagccattttaagagtctgaggcgaaaggaaaaaataggactgaattttttcattacttttgactttttttagagactgcattaaaatattatttatcttgattgctattttggcagcctctgaaatcctgtgctcatgacaaatgcctcactggcctcaccctagtcgcggcccgaccctgctaacggtatttctagaagatgggcagaggacaagccaaaccccgggagggaccacgcggcctgggaaacagttcggcaaggaggccgggcccctgtcccgcctctgagggcggaggactcggcctgcaccggacccaagcgaggggcagtctggcctctgctggcagaagcagcgcttccaagtattttcatatggtgactttgcagagctgcgcggtccagacgagggtttcaggctgcaaagcgggaaagtcttgggggccgc

SEQ ID NO: 25791 - DNA, 2300 bp, Homo sapien
ataggttttcttactctttcttgttcccgcaagaaagtgtttgtcagatgacaaccaagaaggaagatttaatctacgtaagaacactctgaaaattacaaagtgttatggaaacattggttatattctattattgagcaaggaggcaattgaataggaaggctggggtttagtctgcttttctgaccttggttttaaccctgaggtttctttatttgagtaatattaatcccccaagatgaattccaaagttaaaagtgaaatacttgagtaaaagtaaattactttaacattgtctattccattgttaaattcttttttaaaaaatctcagttatccacaaagaattaacaggtcaaaaactagatttttatgtatttaatggtaggaatggtataacctgtttatttagggagaacaataaattattttttaaagaacaagataaagatataacgtagttttataatcttggttttggctacaaaacaatattgattttaagttgagatttattttaagttgagattacattttaattcctgtctcattaaattaactggtaattcatgaaactcagtatagtgtttctaaatttcagctactcatgtaccatcttcacagtttaccgtagccctgtattacctataatgttactttgtctttaaatgattctcctttttacataaatttaaatgtaaacaataactattacatataggaaagaaatattgcttctcgtaaataaaatatacacataagcatacgctaaattaaatatatagctgttaaaggttaatgtgataaatatttgtgtatatatataatatatatatatacacctccaaaaattatctcgattacttctcatgtgtgtatgccacactttgccaaatagtagtgttagcacagtcattatacacagactggattcaaagtgtaattcttgttaactgtgtaacatgaagcaacaagttacttagattctgttctctcacatgtcaggtcaggttgataatgttttcctttcagagccctcattactgtaaaggctgaataatgccagtgaagagtacctgtcacatagtaagagcataataattatttgcccttatttattgtttttattatcttaatcctcagatgtctttatcatctgacaatagtcatgctacacaaaacatatcacccaagaaagatgactttaaaaatggtgatataaatgcagactttagtcaactgaaacttggtgataaaggttagtataaaaatgtgttatcttgtatagttgctggaaaacaaaataaggtttaaagtattggtagtgtttattcattaaataaaaataaattttcttaattgatggaaaggcatcattctgattataaatgtcaagtatgttcttattattgctacttgacatctttaaggttgcctaatatagctgacaatgctaaataataatatggactcttattcttctggttcatgtttttagtatgaaaattctctcttgtatctaatttgtatctctgtaaattgtgtgcatttttagcacatgaaaagagattatgatcattccaaaagattattaatttaattgtaatgaaataaagggctgcaacgcggcttaattctttcaaagatgtttcatgttattgcatatataaagataatatgtctttttcactaaagtacagttcaaaatgccaaaaattaagggtttcaataagccgggaatagtgttttaattaaaggaaaactaagaaacagatcagtcagactgaaagcaactttttattcaaggactgctgaaagtctcttctcagagaatctttttgcttggttctcttattttgctaatatttctctttagatttatacataaaactctagtagtcatcatcgtactgattcatccatggttttaaggtaacttttcagtgtgttggacgttacgtgtcattcatagctcactgtgttgagtgtcttagactgcagacattaccaagagacaagcgaagactggtctgatgctaaagagagcctgacaggagttgacgtctcagggacacagggaaatcaagtagaacaagacacatggaatttggatcttacaggaggttggttctcaagaatttaccgagaaatcctaacctagatcatttgtaaaatagtgcttacctgcttctgtgttgtgttgggcaactgagttgttttaatattttattcctgttttggcttttctttataaataaaaaaagtgaggaaattgttcagttggaggtcagttttttaaa

SEQ ID NO: 25792 - DNA, 2300 bp, Homo sapien
tctaggtgtgtgccttacttcagcattctccagagaactgtgaatttctaaagcatgtgaacttgagaaataggctttgtcttcttaggaaaatgtatcctttagggggtgttgagaaaacagcagtgacaggggcctctggccttgcctccttgcagtcaagcttcaaagagaaaacgttgggaagaaagactcctgctgagcctgatgaaagaggagtcccagttgccaaccaaaaacatgcagccaaagtccacaagctacaagtagaaagggtggctcaagccagagtccctggatatggagggcgagtgatggctgcagaaagatgcaggttcttctcccccactatgactggccatcgcctagtgcaggatgtacggtggccctgtcccagggctgtgctggcagccacccttccccactagctgtgctgctctcacatggcacggcctctggctgccaggcctgtgctcgggcctgcatttcccttgtgcccttctctccacccagccctcaggactgcctgggctgcattttgtccagaatcctttgtctccttacttgcactgcagctgaggcgagtgtcccttgttccgggtggctcctgtattgtggcgctcatgttattgagagtcttagaggtcaccccctagattcaccaattgaagggcagggcttgtcgatctaacagtgtcttgcacatagggacacaaatgtctgttaaatgaagaaagtagggatgccaggccacccaatggggtgtatctcctagggttcaagaacaagggctaatcaagtcaagagaatgtgtgccctcccccaccatctcacccctcactctcagaacacttggggcccctgcacaggtggtaggcatgctggccctgagtgccctcccagcctgtgttagaagaaccagtggatgacctcgctgtcagctgtctccccttctctgagcttactgcaggtggcagcagcctctcagccacagactgttccctttcctaggagaaaacgatggtcactcagcaatgctgtgcgcttgcagcttccaccacaaaagagacagctgtggccgcagcaccagggtggtgattcttccccctccaagggcagtggtgcattccttagcacaagtataaatttactgttgctaagagttctcggaacaggataatacaagaaggaaccactgcaagtgaaatccagccaccagtaatgccgagaggccaggcctgtgcctcccaaaacctgctcctccgcaggcttccccggcccatctccagagcgccctcctctcaccactttacataaacgaatgtacccaagatcccccatcagttttccatgcagctgccagagtgccaccaaagcaaacctcatctcaagactctgtggccaggccctcacaacctcctgccaggctctcgctacctacccatcaacagcaagactcccaggccatctcaatccccccaaagagccctgttcctccagccccacggcttctgttcacctgccgtgctgtccccgcctctgcccacccactcatcctgcagatctggagcagcattccagggcctggtaagtgtgcgccattttgggttactacgggtctcgccaggcgcggtggcgagttttgccccccacgctccccagcgcctgcacctgggcggagaggtagataaggctgggagatcttagccttttgcaaggcaaacaccaggcaggaacgcccagaacctcggaggaggaggaggggaagatccccaggtggagaccaaggtgcccctcacgctgagtcgtctaggagaccctccctagtttaaaaagtgtttatttgctcggagaacatttcaggaggccttcctgggaccccaagtgtgccgccccccgggaggggcctggagacgcccgcgcggcccccctgcaaagttttaccggccctgggcgcccccggccctggcacccacgcggggagccgcagtgggccgggccgcgcggccgccgcctcccaccgctcccgcgcccgctcccgcccccggcgcgtctcctccgggcccgcgccgcggcgggctcagtcctcagcggggcgcgtggcgagcggactcgactcggcaccgctgtgcaccatggcccgggccctgtgccgcctcccgcggcgcggcctctggctgctcctgggtgagtaggtccaggggtcccggccgagctcccttcccctggccagccggtgtcctctaggggagaggaggggagcgggtgggagcgggtgggagcgggtgggggcgggcgcc

SEQ ID NO: 25793 - DNA, 2300 bp, Homo sapien
tggggttattgtttggattaattgagttaataaactaggaagtcctaaataagtcttagtgaaagaattaggcagcctcatgaaatggagctagaaatgacttcattcatccacagcggtggaatttgggcctacgtgggccaatgtgtggtgcaatccattctgcagacagtgacgcttatgagtaagacaagtgctcacgccattccggctgcaccttcacacactgcaatcttcaagcccttatctcctctcaccaggactcatgccgccagcgcatgcaatctctatccagcagatgtgttttaatcacctgcatgttccaggatgggaaagggggtggcaggaggtgacgctggaggaagaaggaagaggagggctgaggagctgagcttagtcagggaaacaggccatgacaataaggaagagggaagtgcagggctccaaggaagacacagagggcacctgcactgccccaccccacccccaggctttgaggcctatcagaagttggtgtcttagcttaggaaaacttgagagttagccgggcaaaaaagggagagacatggtcccaaacacaagaaataacacaagttgtgttctttcttttttcttttttttctggaaacagtcttgctgtgtcacccagactggagtgcagtgtcagctcactgcaacctccgcctcctgggttcaagcaattctcctgcctcagcgttccaaatagctgggattacaagggcgcaccaccacgcccggcttttttgtatttttagtagagatggggttttgccatgttggccaggctggtcttgaactcctgacctcaggtgatctgtctgcctcggcctcccaaagtgctgggattacaggcctgagccactgcgcccggctgagttgtgttcttgaccagttttcctgactccattcccaccgactcacttagagccaaagcctttattattattatggggacagggtctgccctgtcacccaagctggagtgcagtggtgcgatcacggctcactgcagcctcaacctcctgggctcaggtgatcctcccatcccagcctcctgagtagctgggactacaggcgcgcgccaccacgcggctaattttttttttctttttttgtagcgatggggtcttgccaccatcaggaggctggtcttaaactcttgggctcatgggatcctcccactttggcctcccaaagtgctaggattacaggcgtgagccaccgggcccgccagcctcctttaggaagaaaacctgatagtcactccactgttagaaacctctcagtggggtttttcgaaatgaaagtctaactccttgtctctttctgaccgtttccatgctgaacctcatctttctaatggcccactcctccaggggcctgcctgacgcccaggacggcccctcgtcaatcacacaggacgctaatgggcgcgggatgaatctgggcgcccaaaagaggacaagttgaaatggatttttaaggtactttaaacacatttaagagagaaaagaaggaataaaagggacatgacaagaacagtggggcctgtgggcgcagcacacggtttggggttggtcgtggcttgcgtgtctgaccgcccggtctccctcaccgcctgcactgcaggctgcgggggcctgtccagtcctttgcactccaggtgcggcgctggacagcgggagctccagccacggaggccgctccttcagggaaggatagcccgggctcctccgtgcccctaaaccctgcagaccacgaagtgaacccgtgttggaaccaggtgcaaaacccccagccctccggcgctcgggctccagagccaactcggaatccccgcccctaacgctactcgccaatcagcggcggttgcgaaatccgtgcccgccccctggccgcgccctctgccaatgagcgaggtccgagaggcccgtcgcccagcccagtcccgatcggcgcacgccgctgttcgcgtgtctggttccaaataaagtttttcgcgactttgaattttttttttaaagcgcccgctgctgtctcggctgccgcgggcgagagcggccgagtccccgccccgccacttccggtcccgccgccgggagccggtgcggctgtgaggggccgcgtctcgcagcagccgcccggaccgggcatggtgttgggcgccgggcccgcctcgcctgtctcggggagcccaggtgaggagcgaccgtgcggctctgcggcggggcgaggtgcggccgccggtgcacgggctggcctgcgggccgggcggaggg

SEQ ID NO: 25794 - DNA, 2300 bp, Homo sapien
ggggtcacttggcccagtccacttctgtgcctgtggctacactagccagcccagggagtggccctgtcacctcccaggtgttctggttggggtggatgattttgtggttacccagccttgagggcttttcatgagtccagaacctcagagttgttgtctttttgtcagtgatgagctgctgaagtttgctgttctcaggaaatagcatttctcagacaatggccctagggcaggaagaggctaaatggactcagccaaaagctgttggttggattttttttatacgatattatacgttcctttgaatttttacttttcgattcataaaggcgcttttaaagaaataagcttcagagatctgtttgtgaaaaaatagtttttgctacttttgataaaacctaaggtgcctctatgatcttggatggtccacccaggccagtgggctgttttatgagcatcctcctggccaggtgtcatgtgggtcactagctgttgcctacagcagaggcacctgcaggactcagttaaactaggggcgggtctgctcttacttgtcctgtcatctgagggcacagtgttcttatcttcagcaaaagcagagcctcaaactaaactgagtccctgcccaccttttgtctttctgtcagatgttagctggtgaatgtctatcacacaagcagagaaatcaagcacttccagtgatttcaggatctccctgaatctccatgggaggtcatacctgatggacacctggacttgacagtttctgctggtcttagccactttgttctgcttctgtctttggctttttcattgaagtgaatgaagttttatttctggagcctaatttgaaatctgtctggcagttgtgctgcattgtaatattgagccttggcatctccagatttgattgagagagccaaagctgtgaactcaggcccttctaggggcccatatgccgtcattgtcatcagccaccataatttttttctggagcccaccatgtctgtcccaggctccttggctctgaataggttttaactggcaacttgctgcaggggaattaatgggaggaaagaaacactggctccttggacttaaaaaaaaaattgttggctaggcgcagtgactcacgcctgtactcccagcactttaggaggcgctgaggccagcagatcacctgaggtcagaaattggagaccagcctagacaatatggtgaaatctcacctctactaaaaaaaaaaaaaattagccaggcgtggtggcgggcgcctgtaatcccagctacttggcaggctgaggcaggagaatcgcttgaatccaagaggtggaggttgcagtgagccgagatcacgccattgcattccaggctgggcaacaagagcgaaaatccgtctcaaaaaaaaaaatttttttttaagaaatctgctacagccacactagctccccatctctcagtgctctaagtaaattctaaaagagccaatcaaaattgctaattaagtctgtaatggttattctgatcaactcatttatcttaggtctaacatatagtaaagaagataagaaattctgtgtgtctgataacagtctttatctaatatgtactttatatttttgcctttttctaggacttggaatctgattttccaactgtgaatgactatagagatttacagtttttctttgctattttgtaacattttaatggtcacagccatattaatctccaggaacatagtccccaaatttaacatcattcctgaagagaaatatggttgtcttgacaatgatccatcctacagcctgcgttggaaagccatgactcatcataaggacaaattgaggccccctgattttttctttttttttttgtttttgagaccgagtcttgctctgtcacccaggctggagtgcagtggcgccatcttggctcactgcaacctctgcctctgggttcaagcaattctcctgcctcagcctcccgagtagctgggattataggcatgcgccaccatgcctggctaattttcgtatttttggtagagacggggtttcaccatgttggccaagctggtctcgaacttgtgacctctggtgatcctcccatctcagcctctcaaagtgctgggattacaggcgtgagccaccgtgcccagccaggcaagccccctgattctcaacaagagggctgagcagtgtgaagataagatgcggctttggtccaaagtccagagtgcttcttggggctgaggggcgtagccattgcagtgcttttccaggggagaatgggttggg

SEQ ID NO: 25795 - DNA, 2300 bp, Homo sapien
gtcctgttggctaactccctttagcctatgaacatgttcagtctctatttgctcttaatctttttttttttttttttttttgagacggagtctcactctgactcccaggctggagtgcagtggcatggtttcagcttcactgtgtaacctccacctcccaggttcaagtgattctcttgcctcagcctccccagtagctgggattacaagcatgcaccaccacagtcggctactttttgtatttttagtagagacggagttttgccatgttggccaggctggtctcgaacccttgaccttaggtgatccacccacctcagcctttcaaagtgctaggattacaggggtgaagcaccgcgcccagcttgcctgtaatcttatacgcctttttaattcctcctttctcaaccgttttaagagttgactgcattcttcattttttcatatcccatctttgcattctaacttccatgcctctcccatcactgagacttctctcgctagtttatcagtgcctcctaattgttacgcacagtagacttcggattgcctctcagccacactttacactattatgtgtcttcttgacttttttgacattccttctcaattccctttcctttcctcctcttttgactgttctcatgctcctgtgcatccatttgcttcttaaatgttggtgggccctttgctattggctgcatttggcaagaaatgagctgcgtttatagggaagaatgagagagaatgagtccagaaatttgcagatttgctgtgctggaaaagccaagttattctggaccccaacaggacacaaaatagagaaagcccatgaaaagccaattaaaattcaacctcttggcaaagcatgcttgaaaccgaattttggctccagccactactcgtgtgaacttgggcaagatgcctttctgtatcttggattcctcatacataaatacctaccagactgggttaatcatcaagattaaattagtgaacacacgaaaaatacctagaacactgcctggcatagttcaaggctcaattaaaggtagacactattatgccaaaaaaacaaaaaacaacaaaaaaagtgacggtaggatggcttcgtgaggatttttgctcatttctaccactttctcaactgacttttcttaatggttggcgggacaccaaccattggtggatgtttacacttgtgactgtctcacagacaactcaacatgtccaaagctaaacccatcatctttccccctcccgtcttccctcttacccagataaaggcactaacatcttcccagtcacttgtctaatccttgcttccttcctgtccctcatgccccaattcctatttaacggcctaaacagatcttgaattaatctttcctgcgtttccacgcccacttagagtccctcatctctggccctattttctcaatgccctcccatcctctactccagatcccctcaagtccatcctcgatgcgtgactcttaacttcacgccatccaggtcccctatggagccgctccgactaacggacgcgcaggtccagcggacctgctcatcactgtccagggtggcctgcgggagacccccggggccctggccctgctgccgcggccccggcacttcccctcgagggttcgcggggaacaaggccgcgcggccccggctctcccggagtgcacggtcccgcgctcatgcggctagagggaggcacccgcaggactgcccagccgcctctgctcctcaggtccagctcgggccccgcctgctcttacgccgactaaccggccgcggcccgatggcggccctgccgcagacagcaaaggtcacggggctcccccggaagtgaaagtgcggggatccgccggcccaggagacgcggcttctagcgcccggttcccgggaagctctgtgacgcgctaagccccgcccccacccgtcacctgacccagcgcagcctcgcctccccgctgggggctcggcggccctctgaagcgggtggattggctggggtgcttcgctcagccaatccggacgcgcccgggcgtcgcggccccgcctcctccccggcgctctgggcccgtagcgctccgcgggaaggaggctggatgcccggcagcagtggggcggggatggaggcggccgtggcgccggggagggatgcgccggcacccgcggcgagtcagcccagcggctgcgggaaacacaactcgccggagaggtgcgcgcctttagggcagggctggggagcggccggcgcctgtcgccgattgtcccgcgcgggagga

SEQ ID NO: 25796 - DNA, 2300 bp, Homo sapien
tgttttagtatgttgtgtcttcattttcattcatctcaaagtattttctagtctcccttgtggttttttttttctatgacccattagatatttaagagtgtattgttctgcggaaggccgcagggtcctctgcctaggaaaaccagagacctttgttcacttgtttatctgctgaccttccctccactattgtcccatgaccctgccaaatccccctcggtgagaaacacccaagaattatcaataaaaaaataaattaaaaaaaaaaaaaaaagagtgtattgtttaatttccatatgttttttaatttctaagatttctttctgctaatgatttctaattttcttccataagagctagaaaatactttgatttaaattctttaattttttttattttgtggcctaggatgtatgtagacatatatcctagagtatatgtcaagtgcactggaggataatgtatattctgctgttgttgggtggagtgtcttgtagatgtctgttaggtctacttaatttgtagtgttattcaagtcttctgttcccttgttaaaattctgcctagttgttgtatccattattgaaaatgtgattttgaatgatcccagtattattaatcagtggtctgattaatagttgatcacactattaatcagtttctcccttcaaacctgtcagtttttgcttcgtgtattttggtgctctattgttaggtgcacatacatttatatttgttatatattatggatgaactggttcttttatcattataaaatgtccaactatattgctggtaactttttaaatcccttttattttatgtaagtatagtcattccaactgtcttatggttgctgctagcataaatatctttttccatccttttacttttaatccatttatgtctttaaatctgacatgttgtaatacactgttagagacatattgtggctataagattaatgatagccgtaaggcccatgcaaacatcttgcagggctgacactatgtgtcaattagcagtatgatgcaacatggtctagggatttccaaccctggcttgggaatttccaggaggtaagaccacctcagcatagatggaactctcataaaccataaatacaaagctttcccttaccaaaatagcttaactcccttatggaagaaaaacctggtaactgacctggactaaatacaagataagaaaggggaagaatccccaaaactctgagaatgttctctggacagagactttcccggccaggcagtcatctgatacctgaatgtatctgacccttgccacctgcctgctcctgctagctatcttgtaagagcactgccagaataaactgcttgaacatcacacagcatctaagacttatctttgatgtgaataataggaaaagggaaaagtcacctttggggaaggttaactaggcccagcccaagatccctgaacaagacacatgggtctcctgtagattctctttttttttttttttttagacggaatctcgctctgttgcccaggctatggagtgcagtggcacgatcttggctcactgccacctacgcctcccaggttcaagctattctcctgcctcagcctcccgagtagctggtactacaggcacctgccaccatggctggctaatttttgtatttttagtagagacggggtttcaccatgttggccaggctgaccttgaactcctgatctcaggtgatccatctaccttggcctcccaaagtgctaggattacaggcttgagccactgcacccggccagttctttttaaatctagtctgacagcctctgcctttttattagattgtttaatcattcacacttaatgttactattgacatagttggagtaccacctattttcactttttgtttcctagatgtctcatatattttttgttctcttttccccctttaccgttttcttttgcattaacgaatattttctaatttaacatcaaaattctttagtgcttttttcactttttaaattagttatttccttagtggttgtcaagggcttactatttatgtataaacttaccagtatatacttcaaatttatactaatttaattccagtaagatgtagaaatgttactcctatacagttctgttccttcttcttttttgtgcttttattgttatgggtattacatctatatatgttacaaactcaacagtgcattgttacaaatatcttttttttttttttttggagacagagtcttgctctgtcacccaagctggagtgcagtggtgcaatcttggc

SEQ ID NO: 25797 - DNA, 2300 bp, Homo sapien
caatatacagttacactgccctttttttcctttacttttttgagacggaatctcttttgctgattgcgagatagtttctctgtctttggctttcaacattttcattatcatgtgtctgggagtgaatgtctttgtgttttatcccacccagaattcactgagcctcttaggtatgtagattagtgttttccattacatttgagatgttttcagccattatttttcagagacatttttctgcccctttctcttgctcctgcccttctgctactcctgttttccctatttggtgccttatggtgtcccacatttctctgaggctctgtttatctttctcatgtttttcctgtcttatatttggatttcgtaatctctgtaaatctaccttcatgttgactaaatgtattttctgccagttccaatatactctggagcccctccagtgaattcttcatatcggttgtactttccaactccaggatttccttttggttctttttcataatttctctcttgtttatcttgaggactctctatttgatgagccattgtcatcatacttttctttatctctttaagtacagtcataggcagtttttatcacttgccttttttcctgcttttccacacactgaagataccagttagaatttttttagttttcctgttcctgggattgcttctatgtgatctagaatcagtcatttacctgttcatcctggtttttcctcaggcttggggatcctggattgttcctgtggatggatgaagcatttcgttgtttgatgtaggggctagggatggctcatctccagttctcaatgcgtttccccaggaggtgtctcccaggaaaggaaggcccacggtgggctctgcataaggtggtggcagcagagcccggcaagccgggtggacccccccaacttttctcgtgacttccctggacggagctgcctttgctttgctcctctgagttccctagcagatgcctcaagctcctcccccttttctagatccttcccccatcctgggagcccaccttgtgcccgccctctctgggcgtgtggtgctgtctcagtctgaggtcagcacctctgccgctgacttggtgtacgggagcagggcgtgttcggacattgggaagctgacctctgccggcctcggtagctggcccgtgccctgcgcttcccgctgtccaccctgaacttgggtggccactggatactttcagattggcctttaagtgttcttttccctgttaatctaatgccatcatcttgctacattttagggactcctcaaaattcctagtccacataccccctcccacccccttttatttgagacagtgtgttactgtgtcacccaggctggagtgcagtggtgtgatctccctatgttgcccaggctggtcttgaacccctgggctcaagcagtccacccacctcggccttccaaagtgagccactgcgcctggccagataccctttgttggtgttgttttgatttgattcttagtcggagaagtagctgttttctctttcatttcagtaggatcctgagtgggcagtggatacatttgtttttcaccattttaaactcaaagcactaaagctaaacaatgtagtcccctctgctcattttccatctgcagtagtgagactctcagtgcccggggcagtcagcgcctggcgcgtaggagcggcttcatcagcactggctcggtgccaaatgcatggcagtgaagtgctgtgcactaggaccctccccaaaagcaagagcctgcatccctgttgcctcttcctcttccgtctccgtagaagcagaaaggcacacagcttccacgacacagattcactgactgcagccgcgttaaagacacgttcacactgaagcacctgacagtgactctgggccagtgatgatgggcggcttatattcttctttatagtcttctgaacttggacaacaatttacttttatagttgtagaaaactgttaagctctgttggaacgcagttttgagaggaatcaatttgtgcagctcagttcggtactcatgtttgtttcccagcggtcacctttgtcccggtgtccaaggtgagcgggcaggcagaggtggacgacatcctcgcggcagtccgcccgaccacacgcctcgtgaccatcatgctggccaacaatgagactggcattgtcatggtgagtcggcctttgtttctctttaaggagagctcatggggaagaacagcagcttagactcatggcgtttcaggtttcccagctctggcctctcccgt

SEQ ID NO: 25798 - DNA, 2300 bp, Homo sapien
ccagggccgaggtggacctcgtcgtgcaggacctgaagcaggccgtggcgcagctggaggaccaggcctagcactggggccgccttccccaccccgcttctgggaagcccgtggcagggcacagggttgtccctccagttccctcctgagggctgtgccaggatgactgtctcatgccccctctgcattttgtcctggagtgccagcgagtgtgcacccccagtttccttccctggacccctgcagagctcacagggcccaggacaccaacgccgcataggactgcccacatgggaccgcccacataggaccgcccacataggaccgcccacatgggaccgcccacatgggaccgcccacatgggaccgcccacatagaaccgtcctccagtggtgaagcggaaacacttagctttatccaccctccccactgggaactgggcacgcctgttgtgagtgccctttcctggaaggtgtttttatctggaagatagaatccaagtatttataactcattgtcagccaaatgctatcatgaacgtaggaaacttgatttttttgttttgatcatggcctctacatgcacctttccagagtggtctcttctcaggccctttttagtccctttccaaagctgcccccaccaccctgctcctctggcctcagtgcacagtggcccccagcctcggccaggcctgctctgctcagcgcccaccgcccaccacccctcctgcttccccgagcctgaccctgttccgcccactggcaatcagggctgcgcacttccctgtccacggtccccaggccttcctgtcttgtcccttttgatcattattaactcagggtttcagctccaacctcgctgagttggtgcagctccaggtcattcctggggtgggaatcggatcatccctgactcagcttttaccttaattttatttgcagaggattcttttctcaaaatgctctggcatttggacacacatcacatgtcgatatttgcataggagtcattttcagtggaataacatttttaatgtgtggttttacggttcaaggaactacttgatgattttgaggaaacacttgccagaaactaaattaacgaataaaagatttcagtgcccgacttggggatcctgtggtttctctagtgggcactgcgcttgggcacaaagtcatctgacagagcctgtcggggggaagccaggggtgcagcagcccccaggtcaccattgtgtgatgatgcgttagcccagaaatccagcttgaggctgtgtctccggaagcccctacaaatgtaatgggtcccccatctgcagcttcccattgctgccaggaagaggctgtggtggtcctgacttccctaaagaagaactatggattgtccagaacaatctggaaaggggttaaatgtacttgggcccttggggctgcagcccagagacttggtccgtgtagttggagagggggccgaggcaggggctgacaccttctcgcctcagaggcctggacacacccaagtcagggtcctgagcccattgcaggccccgtggagccactgtgtccccagagattcctaggagcctccagggccgagggccgggacccagaggcggggcgctcagctctgtgggtgtcaacacagccaaacatgtagacctactgggcaccctttacttcagacacactgtggtggcggctgggggtctgcccttctgtgagagttgggggaactgtctcccaggccactcggggctcctgtgagaagctcagtggcgtgtatcctcagccctcgctccacagatgaagttcctgccatctggacagatctgagcagcctcagggccagcctcctttctctgctggccatacccagccctgacctagcctggtgtgggcctttccctgtgccctgtactccatcctcccagctccaggcacctggcaccctcacactgtgggagtggcttgggcaggtcctcaaggcctgtccccccacccgaccccaccccaccgcctcccatctgccctgtggcagcttatcgggtaaccagagccggcagcttcatccacgtctgaaacaggaagccccagcctgtgcatgagtcgccactgagagcccgggccagaggatggagaagcagcgggcactcgtggccgccaaggatggggatgtggcgacgttggagcggctgctggaggctggcgccctgggcccgggcatcaccgatgctctgggggccggcctggttcaccacgccacccgggctggccacctggactgcgtcaagttcttg

SEQ ID NO: 25799 - DNA, 2300 bp, Homo sapien
actggcatattggaaggtcactgtggctgctgatggagaagtgagagctgcctgcccccagacctcccatgcttgcctggggcctcctgtctcctggctcccacccactcagtccagctccttctccagcaagccaggctggctctgcccccggggcctttgcatgcactgcaccctgtgcctggcacacagctccccagctgcccctggggccttccctgcccagctggtttatggggggagccgcctgccccgaccatcctcactcctgctttcctccccaccggcgcaccagcaccaggcacacggcgtgtctgactcctggccttggtggtggtttccaccagccggcgtgtaggcgccaggagctccgtgggtgcaggacttcaccacctgctacgttccccgcacctggcacgcagtcaggctcgggagatgtttactgaagcaatgggtgggcaagtgaaggaacagggggcctggtcccttaggatggcgcctgctgctcaccatggccctgaggcccttgggacgggtcccgcctgctcaccgtgtccccgggcgctcgggatggcgctggcctgctccccgtggccccaagatcctcaggctgctgcctgcctgcccactttgtccccaaggccgcctgaattggcctctagcctcccttcgtggagactgcagcccctcccggtgcctcgcctgcaagtgcgcccctccccaccccggggctgcctctccagctcctcctgctggagcagcctaccccaaaggaagctctctggacctgggtcccaccctggccatcctccctttgcccctccagcagttctgacccattcactccagacctcagcctcccaaactatgcctggctcctgggatgagcggcggctgcacacagtgggcagagcagcagcagctcaccacagggggtcctgagggagggaaacagggtgtccactgaacccctaggactgtgctgaggcatgagcggccttcctggggagaaagcgggcaggcctcggggtctcagggccagagaggccactccagatgcgaaggagccccacggcagccctgtccctgtctctgtttccagctcattgtgctttgcccaacagacacttctgagtactgatcagtcaggagcgccctggctgcgctaggaggcactcacaccgaaggcgacgggctgctggcggctctgctgttctcgtggcctccccagtggggaaagcgggcacactcaaggcaggaaggagggtgaaggcggggagccagcacgcccatcacccgtctgtcaggaaggcaggctgtcctaggagacccccgcgtcccactggcaggcccaggccccatgtctgtcccagctgcacaggtttccgcaagtcagtgtagaggactgtcacctggctggtgctgtggaccacagcaggggcccttcagaaggcagatgaggccccagaggcagggctggcctcaagtcgctccagcggtggtggccggcaggtcagggccccaaacctcattgcctggctcgaatccaggccctggagggaggccacaggacccgctgctccagcaaaggggctcagtgcaaatgcccaacgaggcagcgccaccctcgggccaaatgaagttcttccctccccgcccctccctcccttccttctctcctctccttccttcatagcaaacacatgtttactcttccctaggtgttttcatttgccatgatgtttgctttcagatttgggaccatggtgtctgcaaattaagctactgcgctcacttcacccccacctggaccccagaggtcctgctgccccagggtgacggggacgcacgtgctcagccagccctgtccggggtttcctgaggttgtaccctgtgccccgagaggtacagccagagtccactttcacttctgctccaagcccctcccactctgtgtgcctcctccctgggaggatggctgctccctctgcccctccttccccaggtcacattcaccgacatcggactcacggcacgggacaatgagggggccacggccctgcactttgcagcccgaggcggccacacgcccattctagaccgactcctgctcatgggtacccccatcctgagagactcctggggtgggacccccctccacgacgcagcagagaacgggcagatggaggtaaggtgggcgtgagggagacagggtgagcagtcacaagtgccagccatgcccagtgctgtgtcactgaccctcacagcaaccctgtaagagtgatgaccctcttttacag

SEQ ID NO: 25800 - DNA, 2300 bp, Homo sapien
cccaccaccaccgttccccccacctccactgttggccacgaggcgctccctggaggatggaagaagaggaggcccagggccagggaaccccagccgtgagtgcacagccccaagtgggccacccagggcatgggcctgggagagggtgccactggcctcccctccgaggtcctggaccggtgggcaagtctgcgggcagccgggcaccccatcaccctccctccccagttgcttccaggtttccttgactgtctttggtgctttggaaacatgaggattagcattttccgtggtgggcacttacagctacagcaacttatccaggggtaaaagcggggagacgggccggttgggcccaggccccttgtggatgggctgctgtccctcagaccccagcacacctcgcatgcatgggctagcagggcaagcaacagtcctcacgctgtgggccaccaccattaggggtctgtgaccagcttggagtggagtggagtggagtggagtggagtggagtggagtggaatggaattatcaacaggtgccacaggtagtgagggcgagcttcctccacgggccctgctgcggccctgtactcacatgtgggagtgtgcttctgtgtgtgattgtgtctgtgtgttctgtgtgtgatacacatagatacggggacccttctctgtgtgtgattgtgtctgtgtgtgattgtgtctgtgtgtatctgtgtatgttgtgtctgtgtctgtgtgtctgtgtgattatgtctgtgtgtatgtgtgtgattgttcatgtgtgtctgtgtgtgactatgtctatgtgattgtgtgtctctgtgattgattgtgtctgtgtctgtgtgattgtgtctgtgtgcatctgtgtgtgattgtgttcgagtgtgtgatcgtgtctgtgattgtgtctctctgtgattgtgtctgtgtctgtattgtatgtatgtgtatggtgattgtgtgttctgtacatctgtgtattgtgtttgtgtttctgtgcatgattgtgtatctgtgtgtgattgtgtctgtgtgtctgtatgtgattgtgtgtgtgattgtgtctgtgtgtgtctttgtgattgtgtgtctctgtatgattatgcctgtgtatgtgtgtttgtgtttgtgtgtctgtgtcagtgtgtgattgtgtctatgtgattgtgtgtatctgtgtgattgtgtgtctgttctgtctgtttctgtgtgtgattgtgtctatgcatctgtgtgtgattgtgcctgtgtgtatctgtgtgattgtgtttgtgtgtgtctgtgattgtgtctgtgtgtatctgtgtgtgattgtgtccgtgtctgtgtgtctgttctgtgtttctgtgtgattgtgtctgtgattgtgtctgtgtgattgtgtgtatgtgattgtgtctgtgtatgcttgtgtctgtgtgtctctgcgtatgattgtgtctgtgtgtatctgtgattgtgtctgtgtatctgtgtgtgattctgtgtgattgtgtttgtgtatgtctgttctgtgtctgtgtgtttctctgtgtgtgactgtatctgtgtgtgattgtgtctgcgtgtgtgattgtgtctgtatgtctgtgtgattgtgtgattgtgtgtgtatgatcgtgtctgtgtgtctgtgattgtgtgtgtcactgttattgtgtgtctgtgtgtatgtgtgtgattgtgtctatctgtgtgtgattgtgtatctgtgtgtgattgtgtttgtgtgtctgttctgtgtgtgtttctgtgattgtatctgtgtgtataattgtgtctgtgtgtatgattgtgtctgtgtctgtatgtgatgtgattgtgtctgtgtctgtgtgattgtgtctgtgttgtgtgtatgtgattgtgtctgtgcatgtctgtgtgtgattgtgtctgtgcgtgtctgcctggctgtgatgcagacgtgttcttcactcgaggttgaccctgaagtgtgtgttttcatcggggcagggagcattgcaggcagcaagggaaccagctttggggcctgcagagctgcgttaggggcggcctcaagcccttcccagctcctcccctgctgcaggaggggccgcggcgtggcccagcggtgtgccgcaggctctcccatcgaccaggcgggggcgggccccactgactccccagagaaggtccagtggggcccccgaggtgttctggggcagggtgggctggggtcagctcccagctcgcagatcgttcaggaggtcagctctgcccccagggccggatccccgaggctctgggtctctgctccccagcccttgc

SEQ ID NO: 25801 - DNA, 2300 bp, Homo sapien
tgtgattgtgtctgcgtgtgtgattgtgtctgtatgtctgtgtgattgtgtgattgtgtgtgtatgatcgtgtctgtgtgtctgtgattgtgtgtgtcactgttattgtgtgtctgtgtgtatgtgtgtgattgtgtctatctgtgtgtgattgtgtatctgtgtgtgattgtgtttgtgtgtctgttctgtgtgtgtttctgtgattgtatctgtgtgtataattgtgtctgtgtgtatgattgtgtctgtgtctgtatgtgatgtgattgtgtctgtgtctgtgtgattgtgtctgtgttgtgtgtatgtgattgtgtctgtgcatgtctgtgtgtgattgtgtctgtgcgtgtctgcctggctgtgatgcagacgtgttcttcactcgaggttgaccctgaagtgtgtgttttcatcggggcagggagcattgcaggcagcaagggaaccagctttggggcctgcagagctgcgttaggggcggcctcaagcccttcccagctcctcccctgctgcaggaggggccgcggcgtggcccagcggtgtgccgcaggctctcccatcgaccaggcgggggcgggccccactgactccccagagaaggtccagtggggcccccgaggtgttctggggcagggtgggctggggtcagctcccagctcgcagatcgttcaggaggtcagctctgcccccagggccggatccccgaggctctgggtctctgctccccagcccttgccctttctgcaacacccttcttcttcttggcagccatgtccctcagcccggcctggcctggccatcctgaccagcctcttcccagggagcagatgaccagcccggcccctccgaggatcatcaccagtgccacggctgaccccgaggttcgtcctccacccctgcattcctgtctcccggggcccctagccagcctccattcccatcctcttaggggcccagagaagcccccagcacagccaggcctttcctgaagggtggatgccaggctgcctgcgtcactccgctgctctcgagaacaccctgagttctgaagagacaggaatgtcagggcgacggcagctgtcccccccaccacagaaacacggggacccttctctgttatcccagagggctgcagtggcccaggcccctctccctgacctctgagctcaggggtgctccgtgcccgcttggagtgcggagatcgcagcagccatccatgggcagggccccgctgccaccgtcctcctcctcagggcctcggccagcccagaccagcagaagggtcctgctcccccttactctccctttcctgggcgccgggcccttagaaagccagcccagactttccctgcgtggtactgcagattctcaaccattgaggtgttcggtgggagtctgggaaacgccacgtggcgctgctgcccgtcgtggagagctggagcgcgcacggcacattgaaggctctgacaagccctccgcggcacaggattggctgccaggctttgtctatgtagctgtgcccagagcaagtttgcccagggatacggtgcgctccgcgagcatctgctgggcttgcacaggggacggggagggacctctggtttcatttctctgccgacaatcccctcacacacatcttaccccgccccctccagtccctcccctctgaggcctcactcttaagctggggatgagggggtggggtgctgtccgtggcccccactgtccctcctctcagggcgccctgttagcgtgccctgggcggagccaaccccccacgtcctctcggatcttccctccactcagggcctgggtccccttcgggcctgtgtgacccacccccttctgcacaggggacagagacggcgctggcgggggacacctcagatggcctggccgcactacagctggatgggctgccctcaggcgacatcgacgggctggtgcccacgcgggatgagcgcggccagcccatcccagagtggaagcggcaggtgatggtgcggaagctgcaggcgcgcctgggcgcagagagctccgcagaggcccaggtaggcccccggcaggggcgggaccagtgggcggggcggggccttttccaggtaggtggaagtggaagtcagggcgcccgaagcccagaactgaatccaagacccaggggcccctctcctctgtggcctcagctgctgcttccgccggaggatgaagtgaacctgaccagaggactctgagcagagccccttcacctgctctggaggcatgggtcccacgtatccttccacttggcggatttg

SEQ ID NO: 25802 - DNA, 2300 bp, Homo sapien
ctccgtgtcccctggctgccggctaggcagtcctgctctctcgggtctgtgttctcagcttcgaggtccaggctgagtgagaggtaggatccagggggctctggggcaggggacagcagagagggcagggggaacccagccaggagcagcggggagggtgggttaggcccccgaggccagggatcacagcagggtgctttggagacgccccctggcccttgccagcggccaagccaggctcctcagggtgggggctcaggagacaggtttccctccatgtcccagccggagaggtgggagggggaggctgggccacccctcagatggcagccagggccactcagccacagtcgccagcctggctgggctcaggccttttgttgtcctgcccactcggcttcctcactccgggcctgggcaggcactggggtgaggctctgagaccctcaggaagccccgacccatgcagggactgcagggtgacaggtgtcagcaggcaccccgaggcccccaggggaagtgggggcgctcatgcgtgcctgcccatcgcccggcagcagctggcccaagggagcacaacaatgacgggaatgtgaggcctgcaggcggtggcccagggacagccctgtcacctactcaggccccagctcatctcccggctgcccagggagggcagagccgccttcaccggggccagcgcctcctggggaggggccaggcaggaaccccatgcatgcagtgttgggtgggtacttcgtgtaccggccgggatgctggggtgtggggccccggccacgtgagctgccctgtgcgcgagcccgggttggtccgcgaggccctgtgggctcccaggtgcttccccgctctggggtcaagaggtggcaccggggtcgggaagtcggggagccctagctcccatcgcctgcacctgtacctgcaccgtggctgcccgggccagattcttggcctcctggttctccagctgagctttgtcatttccatgcgtggcgttcccacgcattttgtacctgtggacgcgcggccgcctctcctgcccgggatggccccgcgaggcgccccctagcgggcgaacggcctctccgctgcgcagcctttcgccctggggtgacccgggtcgaaggcttgtgcacagacttgatctctcctagggatggttgtcttagggtgcgataccagaaggacataaaccacatgcacataattacatgagcctgaaagcggccttgctgacttcaaccatgcgggcgtggtgacgcgaaaccctccagaacgctgcctttggctggccgtttctgtttagcagcctccacccggccacgtggaatgcagggttcagagcctgggcccccaagcctagctctgagttcaaattccagctccaccacttcctaaatgtgtgatcttgggcaagtgactgaaaccttctgtgcctcagtctccccagctgtaaaagaggcaatgattgcacccaccctccaggactgttgtggggctgagtggtgaatgcacagcttctctgcatgcttggcacgtggcctggcacctgggagcaccgcgggagcaggagctgctgcagcccccaaatggcctccccagcaatgtgggatctgggacggaggacgcctcccgggagtttgggtgtctccggggtccctggggggtgggctcagtgtagcccagggttgcagatgacacccagggcatgggttcttttgccaaccctgttctgccctgaatgcctggccatgggtaggtctcccaccctctctgaacctcaatttcctcactgcaaatgggaatgacacctgccctaccttgcagggttctgggggtggcttgaggcagatggggggtaaagtgactggcatatggtcgatgcccatcctgtgtttatcaaggggtggaaagggctgatggacagaccgggtgggttgctcaggaggatgagaccatccccacttggctgaccctgctctcttctctcctaggagctcgggcggctccaggcacttcttcccttgagtgggtggactactgaggtcccctgggcacggcgtcatggtgcggaacgtggatgacctggatttccacctgccctcgcatgcccaggacatgctggatggcctgcagcgcctgcgctctcagcccaagctggccgacgtcacactgctggtgggcggccgggagctgccatgccaccgcggcctcctggcgctcagcagcccctacttccatgccatgtttgcgggtgacttcgccgagagcttctctgcgcgcgt

SEQ ID NO: 25803 - DNA, 2300 bp, Homo sapien
gccagccccagccccaccctacccctggctttgttatatcgcatgcccttttgactatctgccccaccactggacgctaagccgaggagggtcgcacacttggctcgcttgccccacccccgaggcacctgcccctggtgggtacacagtgctttttgttaaagaacgggagaaggctccgctggaaaagtaccttacactcacaccgagggctgctgttcccggggaactcttttgagaagagcccgctggggaaaggaggccttaccctgtcctggttcacaggatgtggcagcagggactgaaaggggcaccagcagccgcaggtggtgccccccaggcttggggatgggccaagttccgtcctcagatgcaagctggcctttgtcgcctgccttttctggccactcatgcgatgttccacctggctggcctcatgcctggcaggtggggaaaccaggaaatacttcatactttaggaaaagcatgggatcagaaggtaattattccctgtgattccaccccttttcccataggatatgggaatggtgtagagttgggtggggaggacgtttaaagaaaaacataccctgcccagcatgagaatctgcccggcaggggtaagtcccatggacttactctgtgaagatgtctttcaatggcaggtgaggacacaagagggaagtcctgcctttaaaagccacaaatgggccagacacggtggctcacgcctgtaatcccagcactttgggaggccgaggcaggtggatcacctgaggtcaggagttcgagaccagcctgaccaacatggtgaaatcccgtctctactaaaactacaaaaattagccgggtgtggtggcgagcgcctgtcatcccagctactcaggaggctgaggcaggagaattgcttgaacctgggagatgcaggttgcagtgagccgagatcacaccactgcactccagcctgggtgacagagcgagactccgtctcaacaaaaagccacaaatgatttttttttttaaaaagaccaatacaatgaaaacatttgaattcctataaaacatgcaagtctttaagacacatttgagaaatatgagaaacactggcttaggtcatatgtgcccagcaagatatctgaacttatttcacctgcaaacattctgcaggtttgtcacaattaaggacatttgctcccaaaatcacgcatatgagggagatgtcttaaggccctcagagagtgaagggtttctctggtgggttttcatgtctggttctattggaatgtctgttaagaagcctgatgtgtggaactttgtcatgacatgtctgaatgtgacatgcacattcggtgtaatgtgttaacatttcattcggtttcacttattcagagggactgtatctgtggaccacaggaccctggcgtgccatgttctcctgtactctgctggtagagaggggctcctgtccccaggagttgcagctgtgtgaatggcaccttcttgcttctggagaagctcatccacaccagcacctcatttgattccccaccaattagcccagagaggtgggcggcttgcccaggacgcagcccatgggcagagccggcgtggggctgcagaggccctcctgcccactggacaggttacatcttcacggccttatgtttggcttgttagggttcctcctattctagttggtgtgaaataagaggtgcgtgatgagttggagcattactgcagaaaacatagccccatcttttccctgtgaggaatgggcatcccacaggtctgaattccctctggggccctggctgcagctatggctcaaggtggatgctgtttggccccacccgagccctgggaaggtgatgctcaggctctgccaccgtcggcaacactgaggatacgcagggatgaggtgccctgatttggggaacattacccttaagatactagtgtgatgtcattccacttcgcagtggggggccccagctttcaggccagcattgaggacaggagccgttgccatgtgaaaaagttattttcccaaacaatgaacaatcctcatgatgtcatgggccctgccagaggcccaaatccaatcggttctggtgctggggcagcctcctgtaacactatcctgagaggatgactccgcctgggttggggacagagagcagagaggccgggggtcttcaggtggggcccctgcatgtgtctgcgttcacatttcaaagtggctttcactcagaggaaggtggagcttagcaaagaattgcgcagatcaaggagcagcagaa

SEQ ID NO: 25804 - DNA, 2300 bp, Homo sapien
tggtcccaaccatttccccacacccctaaaatgccaggctctccctcttttctcctccctctgcatccaggccagggaggctgggctagcccaggctgtggtgagaaccttgtccacactggaggggcctgcaggagtgcctggctcccagggactaggggcacagggtccctctcaccctcactcagccttaggtcttggcctgggcagaaacttggtgcttggtcctggtgctgcctcctgcttggagcccccaaaatggaaaatacggggtgtgggcttctctgtcccctgggggccagtatcacctgcctgggatctgaacacacgatggaaggccagctcggagtgcatgaggcaggtgcacaggccgcgctgtcctcgtggcctggccttctacctctgcccagcctcctggccctgccctaagcttctccccacagggggctcactggcttctggttcgggtcccaacccagcctagtggggacctgctgatggtggactcgggcccagtgcagaccctgagatgcaagtccccaaaagcagcctagagtcttcttccctccacgaggcctggccgcaggagcgggcttcagccctctgcctccccactcagagcagagtccttccctgccaaagccccgccccgagggcccccacctccagcacagtccttgtactcactccaggagaagctttcactgaggtagatccttggctggaggttggagcccactggggagctctgttgcctgcctcttagtggcaagagcttgcacaggggatgctgtggctcccagcctgctcctcacatgtcctcactgccaaggttccctttcagttcggcttgccagggccccctgggcctcccggtccccagggccccccaggccccatcatcccacccgaggcgctgctgaaggagttccagctgctgctgaaaggtaggggtgtgcaccggctgggacacacacaccccgctgtgagcagggcctgggagggtgtcccgaggagctgacagggccaacctcaacacttcggcgggcacccaaggaggcacctgctctgggctggactcaaggacagtagagctggccaggtccagtctctgccccatcttggcccatgtctgccaagggtcagggctggggatggctgggggttgggaaccatggccaggagaaggcttcacagaggaaggtggacctggccactcagtatggcgggtgctcagggaccagcgcctatgccctgcctggaagtcaggagagcccagcgaaaggcagaggctagtgtatggggcagcaccaggtggagctcagcctggcacccacagtcaccactggccagggctggggcagcctgccctggaggaggcagggctgagtggagccgcggagtccacactgaggcctcctgcagagcggcggctcacattagtcattagaattgagccgttttttccttttagttcaatgtcctgttcgtttaaatatagcaccttctgcgctgaagaacctccttgtacttccagtaaagctgcaatcgcttattttacccccagcgtctttggaaaatgtgggtggggtagaggtgaggctggaggccaagggcgctggggcacttctgcccgagcttcccaaatcttgagggaaacgggagccgctgcagggtcaggacgcaaagactccgaggcccttcaggccgaggggacgtcgccctcgccccacccctgcgcccggcaggcccctggtctcgctagcacctgtcgttcagggctggacccacgcggcgggcgggtgaggggtccctggcgcgcggccaccgctcgctctgtgccaggtgcggtgcggcagcgggagcgcgcggagcccgaaccctgtacgtgtggccccgccgggccggtcgctgcgagcctcgccccggtctcggccaccgccggggaggacgacgacgacgtggtgggggacgtgctggcactgctggccgcgcccctggccccggggccgcgggcgccgcgcgtggaggccgctttcctctgccgcctgcgccgggacgcgttggtggagcggcgcgcgctgcacgagcttggcgtctactacctggtgagtgccggcgcgcgggagggcgggtgagtccggccgggcgggagccggggtgaccatccgtgcccctcgcagcccgacgccgagggtgccttccgccgcggcccgggcctgaacttgaccagcggccagtacagggcgcccgtggctggcttctacgctctcgccgccacgctgcacgtgggtgaggcc

SEQ ID NO: 25805 - DNA, 2300 bp, Homo sapien
gctggaggccaagggcgctggggcacttctgcccgagcttcccaaatcttgagggaaacgggagccgctgcagggtcaggacgcaaagactccgaggcccttcaggccgaggggacgtcgccctcgccccacccctgcgcccggcaggcccctggtctcgctagcacctgtcgttcagggctggacccacgcggcgggcgggtgaggggtccctggcgcgcggccaccgctcgctctgtgccaggtgcggtgcggcagcgggagcgcgcggagcccgaaccctgtacgtgtggccccgccgggccggtcgctgcgagcctcgccccggtctcggccaccgccggggaggacgacgacgacgtggtgggggacgtgctggcactgctggccgcgcccctggccccggggccgcgggcgccgcgcgtggaggccgctttcctctgccgcctgcgccgggacgcgttggtggagcggcgcgcgctgcacgagcttggcgtctactacctggtgagtgccggcgcgcgggagggcgggtgagtccggccgggcgggagccggggtgaccatccgtgcccctcgcagcccgacgccgagggtgccttccgccgcggcccgggcctgaacttgaccagcggccagtacagggcgcccgtggctggcttctacgctctcgccgccacgctgcacgtgggtgaggcccggggcgtgggaggatcgcccgctctgtcgcccaccccgccgcccgcccgcttgaccacgtcccaccctcccccgcagcgctcggggagccgccgaggagggggccgccgcgcccccgggaccacctgcgcctgctcatctgcatccagtcccggtgccagcgcaacgcgtgagtgtaccccggcccggaccccacacccgcattcgctcggcctccacaagctggaggtggttaaacaggcactggacggggcttccgcccgttcacaccccaccgtggcctaggtgaccccacaccttcttccaggtctcccggtctacttctgcccctatcaggccttcccttcacagcaactgggagctgttaaaaatgacctttccagctgggcgcggtggctcacgcctgtaatcgcagcactttgggaggccgaggcgggcggatcacgaggtcaggagatcgagaccatcctggctaacatggtgaaaccccgtctctactaaaaatacaaaaaattacccgggcgtggtgggtgcctgtaatcccagctacttgggaggctgaggcaggagaatggcgtgaacccgggaggcggagcttgcagtgagcagagatagcgccactgcactccagcctgggcaacagagcgagactccgtctcaaaaaaacaaacaacaacaacaaaaaaaaacctttccaggccactccctgcccagaccttcacctcctccccaggtcctaggaggccgggctcctcctagcctcccaactccttcccacctcagggactttcatcttggggctcgaagcaccagtgttacttcaagaggcctctccagacagctttctggaggccccctcctcagtcgccctcccactcctcacccgggaactttcttccccatgatcgcatcccttgctcctgcaccatctggcccacgagtgcagtgactgtgagctccctgtctccccacacccagaagggagcccaggtacagcggagataccctgcgggtaggatagctggagcagacttgaatgaatggatcaagtccaaaacttcttagtctgcctttgaacccccagagtgtgttggcctgaactaacttagcatcacctgccaccacatccccacttccggctgcatcagccagtgtcctgtttcccatcagagccagggctttgctgcctcttgctgggccctcgccttgcctttcccaatacagcaagcatgcctctggccctgtgtccttcctcctcttggggactcggttcagacaccacctccactggaagacctggccagggtcaggcactttgctgggcatgtgttggctgctggcaggattgtgtgtcgtaggtgaagttggtggggtctcatggggcaggctgaccctccctctgttttgggtacagctccctggaggccatcatgggcctggagagcagcagtgagctcttcaccatctctgtgaatggcgtcctgtacctgcaggtgagtgcggcaggcttgggcatcgaggggcaccgcctgggcatggccacgggtggctgggtgcagaagggtgctgttagatgctcaggatcactgggtcgggtgcag

SEQ ID NO: 25806 - DNA, 2300 bp, Homo sapien
tttagtagagacggggtttcaccatgttagccaggatgctctcgatctcctgactttgtgatctgcccgcctcggcttcccagagtgctgggattacaggcgtgagcaaccgtgcctggcccgagctgtgggattttcattgactgcattgtcctttgtcacagattacctcagtgaaagctgtatgatgcaggcagaggtatgtgaaaaaacccacttgtagctttgctgggaagatgtcatcttcaacttagcttgtcacttcccagaagacagctcttcacagtgttcattttattatttgtctggcattaggtatcagaaaataagcttaaatgagtctaaccattaaatgtaaatagatctctgcctgcattggaatcttttatccttttcttcctcagttgaagtaaaagcagctgatcttactgtttgttcaaattcttcaccagccttgagcatggaaatacatattttcagggcatcttaagggcttttgagataaactctcctgacttgcatttgtccttattcaattatcacaagactaatttgcacatgatccttttgcctgatttgaatctcacttctctgggatggcagcacatcccttgccctgatgctttgacttacaccctagacagagttgttttgtgctcactgactcctcttttgtgtccctgtgcaacctcttagagctcaccctgtccaacagtgctccgatttgagttatagacttgcagctgggggagatgccttaaggggtattgcttatttgtttgcgccattaggatattgctgagtcagacagtcatagttccctctcatttgctctgggactagggtttccagagggttgggcacagttttgtattggctcttttgttctcttttccttagcctcttcggtgatctttggtctgaagggctatgtggctgagcggaagggtgagagggaggagatgcaggatgcccacgtcatcctgaacgacatcaccgaggagtgtaggcccccatcgtccctcatgtgagtctcatgtggtaggaagcccggctggcattaacatctcctgggttctgactggcattttggactggctagtttgtatttactagaaaatctaacacatcacttgattgtacatcagtgattctcagctggggttgattttgctccccgcccaggggacatttgtcagtgtttgggtacatttttgtcacaactgcgggagggagttgttactggcatctggtgggtagagactagggatgctggtaaacatcttagaagcacagggcagccccacaacaaagaattgttcagcctggaatgtcagtagtgtcgcggttgagcagccctgctgagcgggagatgacgcttcatagcatggctctgcagcgtgtgttactccttaccagcaactgagcggcttctggcagagaatatttttaatccatgacctagaagataagagttggaagccactaattaaagtatgaatggtgatcaagcagagctagtacagataatcagggcccaggaagaacaaaagtcaaaatgatgtcaaggaaaagacagacaatgaaaaattagctgcaactatacaaactaaaatgaagccttctggataagctcttgggcctggaaaaaaaccagaaggtaggacattaagttggctgtaaacatacattatagtacatattacataggttacataattcagaattacataataaatacattacgtacctttactgacaccagttggtcattaacatacagtgtgctggagccgtttgggctgatggcgtttgtccagtagatgaggtctgctcatggagatgaggtgatggctgctgcagagcagctgatcatatgtagaggggacgagatacacacccattgagacagggtcttgctgtcttgctcaggctggagtacagtggcacaatcatagttcattgcaggcttgacctcctaggctcaagcagtcctcccacctcagcgtcctgagtagctgggaccataggcatgtgccaccacagccggctaattttttgaattttttgtagagacagtgtctccttaagttgctcaggcttgtctcagagtcctgggctcaagccatcttcccaccttggtctcccaaagtgccaggattactcgcatgagccaccatacccagcctgggatttgcattaaaaccaggaaagggacctctggagcccaagaaggcagatccattgagtgtaaatttaattgggaacactacatcatgccttgcaaataacaggcagta

SEQ ID NO: 25807 - DNA, 2300 bp, Homo sapien
agtcgcccaggctggagtgcagtggcgagatctcggctcactgcaagctccgcctcctgggttcacaccattctcctgcctcagcctcccaagtagctgggactacaggcacccgccaccatgcctggctattttttttttttttttgtatttttagtagagacggggtttcaccatgttagccaggatggtctcgatctcctgacctcgtgacccacccgccttggcctcccaaagtgctgggattacacgcgtgagccaccgcgcctggccacctttttcaaagatttttaaccagcaggatcatggccatctcacagacaattacccaaaaacatctacagacagcgttactcctacaatcaatctgaaaccaaagaactctctgctcactcccccagcaggaagtagccagaaaaaatgcgctgccccttgtccttttcataactatagagactggattgatagagcaggagcattgccatcttggacaaacaccacctttctaagttccccttgattaaaaaaccacctaaatcctaccccaaaacatcagcctaacggctaatgtcagcataaccagaaatattccaaccctaagataaacctctcttcaaccagaaacatgctaaccctgaaataacctctcctccaatagcctcccctccgaccagagacattccaaccctgcaataaacgttcccccacttccaaaacccttaaatatccttagtctgtaagagagaatgcttagtctgtaagagagagcgctcctgatcgaaattggccagaatcccctctcaggtttattctctgaaataaaccttttaatgttgagccgctttttgtatttatttcctctttctttaacggttacaagcattgttacttgagtgtttctgctgtaatggaggaggcagcatgaatatctcaaacggttgctagtgagaagccacgcagatgagaggcatgaagccttgttgggctccctccatgtcctacagccagagagcgtcagaaatacatctgccccagaatgaactgggctgaaaactctttgcatggagggagaccacataacctggggaacttgggtaaacgatgttggaacggaggtgtaagatttgggtttgtgttagttgatttggggaaacatttatggaaacgggcctttgctccggattggatgtcaggaagaggaggattccatgattggatatcttgatgaagcttatctagacggcaggaggacgagacaaaggctaaacatgtaatggtaaagaagcagcaatcactcttattggccaagacgaggggaatgtggtcacttttgtggcttggacagtgttcctgttttgtctgtgttcacacttgattacacagtggtctgtttttttctcttgatctgtatcacggcctgatgttggtgttttatgaaattgttcacattcaaagagaacacccaggcctagctgtttgtgccagaccaaccccaagtcctggctgcagaaccaggccagctccccgatgtcagtggccgcctttctctttacaggcatggagggggacaccattaaggaggagcccctcttctccgctccccacagacaccagtgggtgcagacaagtcagggaatgcctcctttccctccggcatcttttgaggtttccgtcctgacgcccagggccgctccatccaagcctcggtttctcagtctctaaaacaggccagaaaccaggcacgccgtggtgaaaggacgagccgaagagatggcaagagctccagaaagccttcccaggcatcaggggctgcccttgagctcagacgtttctctctggacagggcttcttggacaggaactcaacgaaacttgacagaaatcggacacccccagccaaggaaaagcaggaggggcccggggttcgccaaggcgggaaacaccgcggggcccagacggcgccgtccgcccggctcgcagtcggggcgcgggaggggcccacgcgcatgcgcaccgccccgcccccagccgccccgcccagcccgcgcgcagccctctggggcggccgggccacgccgcgcgccgattggtggcgtccgggactctccctgcaggtgactgacggcgccggccgcccctgcccgtcgcccgcccgctgctgccgcccgcccggggtgtggagcccggccgctgctcgcgggctgagtgtctgtcgctgctgccgcctccacccagcctccgccatggacctcttcggggacctgccggagcccgagcgctcgccgcgcccggctgccggta

SEQ ID NO: 25808 - DNA, 2300 bp, Homo sapien
tcacagccttgcgttcacagcgttgatacgactctatgaaataaagagtagcagataaaaatgggacacccaccgtcaaagacgcggcctgtgatgcgtgatgacgaattcttgaatgagaaggcatgtagacagaagtgttcctatggcagaatatttacagcactactttcaaccaagtgcttcttccataaacatttgaaatgagatgaactgcagagattaaatgaaggcttcatattgtacttttgtgtttgaggggagacaagtgttaaaaaacaaaacaaaagaaccaaactgtgacaccatgatcttctaaaaggagattttcttaaggaaaaaaatccatatggtggggttcaaattaaaacaaggaataaagaatgtagttctaattcatggcttccattttgaacatgcaaagaactcacttgacaagtccagggataaaatattacaggagaaaccttctgatatcaattgtagtgtgttggtttaccaatcaggcaaacagcagttcactttcaaccactcaatatttcaacctttcatgtaacaaaacttataaaattcctttagctgttcctttttctaaagaaaaatgtcaaaaatactactgaatatactccacactgaagaaaccaattttgaaaattcttagtacatatgtattttacaatatacttaccatgagtttagaaaaatttgaattccaaccattctataccaaccaaccacaaccccactgtctacgttcccagccagaagacttagaatccatgcttgagccaaagccgccattaaaaccactgcccgaccctgcattggatgctgatccccaaccaattgttgcaccaaaattagaaccactacaagagttatttccagaaccgaaggcctggtttggctccctctgcatgttgccttggctttggttatcatccgatgggcctggctgcttcgctggctggctaacacacccatcgtacaccaactgctctgcagcactgcctggggggcagccatcatggctggattaatgctgaacgcaccaaagtttatcccaccacccatattactaccttgattgtttcccaaaccagctccaccccctctactcttaccaaatccaccctgattcccaaagccacctggattaccaccaaatcttccacttcttgctgtctattgctattgcgcttgggttcggcattggatatgtgaacgctgattcctttcatcgagtcctctccacaaagagaccgcgcaatctgatcatctgcaaatggaacaaaggcaaaggccctgaacggcttggggacgaagacatccatcacatccccatactgagagaagaactcccacagctcatcctcagtcatgtcctccgtacggcgccccacaaacacttttctgcttctcaaaggctcatcttggctttgccgcaccataagaacgtctccaaaggtactacagtactctttcaggtcctgttcagttgttttccatgggagacccaacactattaaatcggactggtcttttcactttcactgctgatgaagcttctgtctcacccatttttcttttgttatctttcggatagttgacaacatacaccggatttctccagccagcatcgggggcatgcagaattccttctaccagccggacacctctcatacattgagacaccggattcctgcagcgaagcccacacgcccctggaaactgggctgtaaccgtggacagcagcaccgtcccatcgtcttccgatggtatttcaatgggctcatcgttctcatcttcggttacccgaatatattcagacatcttttacttttccactaggccgctgctgggaagcccgacagggacaccgaggcagcgacggacccaagcgccagtgtttttttgtttgtttgttttttgtttttttaaagaggccaccacaagttgaggcgggactacaactcccagaggccgccgcggcccggaggccacgccccttggcggcgagctctgagccctttgccgcatttgacactcgacatcctcgtgcttcttaaagcacttgcccaacggtgagcaacggcctccaacggtgcccgagggactcgcgctgcccgttaagcagctttgcggtggcggaggctgggctgccgtctctccgacatcccgggacggaggaagagatgaaggctctgcagcccccgccgcccgatttacgcttgagaaagcgaaggcgagagaggtcgtccagcccctgggggcccagccctagagagcggggcgcgggc

SEQ ID NO: 25809 - DNA, 2300 bp, Homo sapien
ttcttctctcagtatggggatgtgatggatgtcttcgtccccaagccgttcagggcctttgcctttgttccatttgcagatgatcagattgcgcggtctctttgtggagaggactcgatgaaaggaatcagcgttcacatatccaatgccgaacccaagcgcaatagcaatagacagcaagaagtggaagatttggtggtaatccaggtggctttgggaatcagggtggatttggtaagagtagagggggtggagctggtttgggaaacaatcaaggtagtaatatgggtggtgggataaactttggtgcgttcagcattaatccagccatgatggctgccccccaggcagtgctgcagagcagttggtgtacgatgggtgtgttagccagccagcgaagcagccaggcccatcggatgataaccaaagccaaggcaacatgcagagggagccaaaccaggccttcggttctggaaataactcttgtagtggttctaattttggtgcaacaattggttggggatcagcatccaatgcagggtcgggcagtggttttaatggcggctttggctcaagcatggattctaagtcttctggctgggaacgtagacagtggggttgtggttggttggtatagaatggttggaattcaaatttttctaaactcatggtaagtatattgtaaaatacatatgtactaagaattttcaaaattggtttcttcagtgtggagtatattcagtagtatttttgacatttttctttagaaaaaggaacagctaaaggaattttataagttttgttacatgaaaggttgaaatattgagtggttgaaagtgaactgctgtttgcctgattggtaaaccaacacactacaattgatatcagaaggtttctcctgtaatattttatccctggacttgtcaagtgagttctttgcatgttcaaaatggaagccatgaattagaactacattctttattccttgttttaatttgaaccccaccatatggatttttttccttaagaaaatctccttttagaagatcatggtgtcacagtttggttcttttgttttgttttttaacacttgtctcccctcaaacacaaaagtacaatatgaagccttcatttaatctctgcagttcatctcatttcaaatgtttatggaagaagcacttggttgaaagtagtgctgtaaatattctgccataggaacacttctgtctacatgccttctcattcaagaattcgtcatcacgcatcacaggccgcgtctttgacggtgggtgtcccatttttatctgctactctttatttcatagagtcgtatcaacgctgtgaacgcaaggctgtgatatggaactagaaggctgtttgaacttttgaaaccttgtgtgggattgacggtggtgctgaggcatgaaaggctagtatgagtgagaaaaggagagagcacgtgcagagacttggtggtgcataacggatattttttaacttggcgagatgtgtttctcaatcctgcggctttggtgacagtgtgcagacagcaatgatagcaaataatgtacgaatgttttttgcattcaaaggacatccacatctgttggaagactttgagtttttgttcttagataacccactttatttgaatgtgttaagtgaaatgatacttgtactccccctacccctttgtcaactgctgtgaatgctgtatggtgtgtgttctcttctgttactgatatgtaagtgtggcaatgtgaactgaagctgatgggctgagaacatggactgagcttgtggtgtgctttgcaggaggacttggaagcagagttcagcagtgaactctggtgtctcaaagaagggtagaagttctaatgtctgttagctacccataagaatgctgtttgctgcagttctgtgtcctgtgcttggatgctttttataagagttgtcattgttggaaattcttaaataaaactgatttaaaaaaaaaaaaccaaaaatctaagtaaaggggtcggaactacatctcccaggaggccccgcggctcgcctctggcggggcggggctggagggggcgtggtcaaggcctcggctcctccgagcgcctcccagctcacggcgccccccgaacccggctccaagggactcggtattccccagcgccggctccgggcagtcccggaagggctcaagggctgggcgactggctgatcgagaccgtccgggtcctggctctcgggtcacttgcagaggcctgagcagagcgtagggagggctggaagggaggagcccc

SEQ ID NO: 25810 - DNA, 2300 bp, Homo sapien
ggagtttgcaaatgtgattaagaattaagctaaagaccttcatacagggagattatcctggattctccagggggctggtgtcatcacaaggatctttaaaagtagaagtaaggaggagacgtgaccaaggaagaagggtcagagagacgcaatgcttccgaggaactctgaggatggaggaagggaccatcctccaaggaatgtgggtggcccctgaatgaagaggcaggagaaggcacacagccctgcctgccaacaccttgatcttagcccagtgaatcctgacagacttctaacccgtggaactgcaagacaataatcgtgtgtttgaagccaccaagagtgtggtcgttggttttggcagccatagaaaagtaatacagtgggtcagggatccgggtgggaaggagacagccctcagagaagggatccgggtgggaaggagacagcccttagagaagggatccgggtgggaaggagacagccctcagagaagggcttgtggggagcctgggggtgctgggagaggagctggtgtgaaacaaccagctggctgggaagctggtggccccaggctgcaccgcaggcaagagcagctctcagccccaggaggccaacagtggtcactggtgtgggagccagttacatttccaaaagaagctgcacttgaggattactgtgaagctgactttagggctggaggggcacagggccagagttctgggttagtggcttctgactctggtcctagcaacgcttttactccaggtcagcctcctgcaccttgcctcctgggcttccccttgaccccctcctagggcatctgggaaggtgtgatgagtggacttgagaggtgaaagttgttcctttgaagcagtccatggctgatgctccctgaatggcatgagagctcattggcatggcctctgggtgctactggaaaccagggctttcaggatggcccgttatccatccgtgtcctggtgggtacatcctacatcagcctgtctgaggacattaaaataatcccaggaatgatatttccattgctcaagacttcttctgtggcactggctcccccactgccccaatagctcggctccagatgataaagctgcatctggttatagcccaatggcttctatgattgaattgaggtgagccagagtgaacctcaaactttgaaacacccctggtggccaggacctgcttgggggcttttgtaaaggggctgctgggaaaggtgttcttaaggcaaaagcacatgtccagagaggagaccccgacgtcaatcctaagttgtcacaccttggccctagcctggggactgccaacccacagtgagaagctgctgctttggggtcctggagcaggaggagggggctaggctaactgtggcggtgacttcagccggctgaccacgtgctatctgcaggtctggccgagcccaagagggcaggctcccgcaccccagctgcccatcctgccaccctccatccctgagggttctgacctcctggacccagtttgacctaacgctcaagccccctggggccttggcgctttcatttcaggccacaaactgggtgggtctccttgaccctgaagtcaatggcagcagtggggaagttccttcttcagtcaagataagcaacaacctcacacaagtagactcatgtctatgtcatgctcgtgggtcctaaaacaggtctttaaaagatactttcaaaccaaataggtagcaattaggcattattttattattcctgaagctcatgaacaagaaaatggcacagagacaggtcatctccctattgctgagttaccctggagacaagcctcatgcaaacaaactccttctccaggacacacaatgcccaagaacaggctgggtctgaggacctgcctagcatggggggcagaagcactgcctgctgcagagacagccacggagtgcatccccaccaccatcacactgctcactctgctgagaaagggtgaggttttaaaggacattcaccagcctcagatgcaggggaaatgtgcttagtttagcatttacatatcttgacacagtaatgacacatcactcaacaatacttcaagggtaactaactccaaaattctttatttagtaaaattgtcacatttgatgtcaatggaatacacaaactcaagtgtgctacaaacaagatgtacagagcatcacagctctgggcagtgcagctcagtgcacctgcctctcatctccccgctgaagtggcaagttcaagcttttgtttagcccagggctgcctgga

SEQ ID NO: 25811 - DNA, 2300 bp, Homo sapien
agcagatgttttaggatgagagcatcctaaaacatctacttggccttgttcgtttggataatgagaggagtgtaaatcagtttgcaaacttgggagtacaggaaatatcagtgagtttatttttccctatcacagtttctcgaagtagtggaaatgtcattgtagccacttgggggagtggaggttctccttccctggggtgatgtctaagtggtgaaggagagtaaagtcacaggctaataatccacttccttgggatccaccactccagccccaccctgccagccccactactgggcaggtggggagtgtgtgaagtaaagcggtagtttcacacccaggtgagtgatgctgggctgggggaagtctcaggaccctgctcatagagcaaccaagagccagagcagggacagttgggagccagcgggagggggtcccaggtaattacagaggtcagtgaggtgactttgggagctttcaaacctctcaccaaactcacccagcaggaagcctgcaggggtccctctggtggagaggcgcaagtaaaggggccatgggaggcctgtcagacctctctaggggcagtggggcggtcggtctgcagcctagtcctgccgctccgctcagctgctgcggtcccgtgatgttcccctcccacgcggccttccagcccatcctgccagggccacccctcaccttccctacctaccagcgcttctgtgaggccaggctctgctgggggtgcggggaggtggacagggggtcctaggtcagactgtgcccttgtccagggacgcttatagcctggaggggctcagaacagaccctgacgatcccagcccgggtgagtagtggggactgaggaaggcaggtgctgtgcggggcaggctggtagtcggccggctggggtccgagaaggcgtctcccgttccggctcctccacacagcgtctggactgacgccggggcaggagccgggcaggggtccccaggacgctgcccgagggcgcggccccaccgcccacgcaccccgcccgcggccaagaggaacccagcagatgggcggcccgccgcgatgggggagtcgcgggcgtctggccgggacaagcgcccgccgcctgcccgccggacaaagggtgcgagacaaaggcgcggccaacacctgtcgctcttggcgcggccgccgcttttctcgcttttctccgccgaagcggccgcagctgccaactgtcacgggcatcaagttacaggaccagacggcagcttcggcgggcctgggaggcggggcgcggaggacgaggaggggaggagggaggcgggcggggggcagtggaagggagggagggggccccgggggccaaaggggactagagggagatgggggagctcagaggggggcggggctggtgacccgcagagcccagggggagagcggcgcgggcgggagcacccgggaccccgccccactaggactccagtgctggcggagggcggcgtcgggggtccggcccggcgtctggacgagtccggaagaaactcaggggccgccccgccaccgctgcccaatggaccctgcctccccggggcttggcagccaccccagccgggacctgaaacccctctaggtccagagaccgcggacttgactgtggctctgcacaccagggacgcatctcctggggccagtggccccagcgctcaactctggaggcgccatcggcgaaggagggaaatgaatgaattaatgggtgaatgaatgagtggacggacggacggacggacgggtggacgcctgctcgcacgcgcggcagatcagtggtcctagagcagcagacggagagaaacaagcgcgggcagggccgcagctacccggggtcgccgccccggtgccgcccccgcgggggtctagggaaggccgggctgggggccccgcctagctcagccagctgcccgaccgccagagccgctgggccggacaaagcgcgctgccccgattggctgcagcgcgcctcgcggtcggccgccccgggcccgcgcggccaatcggcgcattgagatgcaaataagcggctataaaaggggcgggaccgcggcgggccggaagccgcgaggagcgcggacggctgggctgctgctgggcggccgcggggcagcggagggcgccggcactccggtccccgccgctccccgtccccgctgctcctagcccctgccgcgtccccggcggagcgggcatggcgccacccgcggcgcctggccgggaccgtgtgggccgtgaggatgaggacggctgggagacgc

SEQ ID NO: 25812 - DNA, 2300 bp, Homo sapien
caggagtcaaggccacttggttttcagagactggtagttcccaagacagagtgagctgccgtgctgaaccctcaccggcctcgaagggttcctcgtgctcttcctggggtgacatagaggaatcagaatccactctttaagaaaccaggtacaggaggagcagatgcctgagcttcctgcaattcggagtagctcagtccctgaccaccggggagctaggaggctgacacttttgcctttatttgctttaaagtcttgtagttctaaaaatgtagggatttaaaagtctgaattgagatcattgaaggtgtcctagtgaggccaagacaatgcctccccggtgcacctccttccctccatatttggatggctgcggtcacattttcctcagttacccaaccgttgccatggagagtgcggctgtttatttagcaggacaaacattttctcaggattacagcaggctggcctcagggagttggctcctaccaggaagtagaaaacatgttagaatatttggggttgtaaaatcctgcagggcttgcagagacagtacatgctgtatgagccctattatgtaaagttcgaaaacaggcagaattcactaggctgcaagaagccaagctagtgagtccccgcggggtagatggtggctgggagggccaccaggagcctctggggggctggcactgtcctgcctctggtgacatgtgacatggcatgttgtttgtggatatacatcaagctgtgacctcatgaggtgggactcctctggtgattgaacactgatttctgatttccacaaaaaatgcttttccgccttaggtttgcaggtattgagtacagtaagactttaccagtcctggcagtggcagtggaggctggaactgggtcccaggcttgctttcgttcctaatttttaaacactattatggaaagtatgagtatctctgaaagtggggaggatagggtaacgaacccatgcgaccccaccagccagtagtctctgctcctggccccactccttccccacccccaccagctgcttttcctcctgatcccaggctctctgttcttgtggtggactgcactttctgaatggtgctctgtcaagttgaggcaacccagctaccaaaaatgtggccaggtgacctggtcaggggtccgagcttaacctctttctttgagtctgactgttcttaggggcagagccagtaggcggacatgcaaagagggcctcaagggcaggttcacgcccagaggctcatgttggcttttggcagccccttttcaaccaggctgccattttccctcctgggctttggtaccctgagcacataagtgcatgcccaccctccctccccctacccgccttgaggtggaaacaggtttcctaggagctccccaggaacagctggtccagctggctatgggcacacatctgtggagggcaggaggcaaagtccactttgacagggacgttggttttgccagcttctcaaaatgaggctggtctattagagccgctgaggctgagagacgcattttctggaatgacgaagtttctgataatttggctttcacatttctgccaagcttactctaccctctttgcaaaaatacttatcttccacctaaggtaatgtcggggcaccagtgaatcgtatttagacaggcttacaggggatggacttaggggtgaaaaccaggagagctacgtgcaaagcacccggggcccagacagcatggtggcttcagatacctgatgctcctctaaggactgcctgggctggaggtggcactgagttcttagtcctttaaatataagaatacaagccagagacagctgccatgacaattcattctctctcttccaaaattacgtttgttgcccatctgtttttctttttcgttttctctctcttttttttttttttttgagatagagtcttgctctgttgcccaggttggagtgcagtggtgcaatcttggcttactgcagcctccacctcctgggttcaagcaattctcctgtctcagcctcccaggtagctgggactacaggcacacaccatgacgcctggctaatttttgtatttttagtagagacgggtttcaccatattggtctggctggttgcgaactcctgacctcgggtgatccaccgcctcagcctcccaaaatgctgggattacaggtgtgagccaccgcgcccagccgccgtctgtttttctgtagtgattagcagtgataagctaatattacattccagatatcttgcatgggttgtgtcatttaat

SEQ ID NO: 25813 - DNA, 2300 bp, Homo sapien
ggaaataaaaaaggctacatttagggaggaaatgtgacatcaggtagcaggctgaatatggagcaagacccagcaaaagcatgaagaagaatctcggtaaggtgtggatgagctgtctgtttactcttgtttccagaacaatggagctccccattgacgtcaatgggagggaagaaacaaaagagcctttgggtgtgtgcagggcgcagcagccgggcctgggtttgcttggcatttgtgtgtgtatgtgttagggagagggggcggggagtgtgtcgaggtgtcaatgtcagaggaacaggaggaggggccacctgactgagtgtgtgaacagcatgcaggcctcccggggcttctgtgggaagggctgccccgatgaacttggtatttgccctggtttgcatctgagaagttgcacacacaccttgtcaagtagaagagaaggagttatcacactcaggaattcctgatgtgggttcataacttttccttctgtcccatccctggtccccaggtgagtccaggtaaagaagaacaagaagagtaaagagagatgctgcgggctccagcttcttggacagtctcgccttccccatgagagcctacacattcagagcctgctgcgtgggagcctgaaagctccttcctgtcctgtaagtctcaggcttctacccagacccggggaaattgtactctttctcctgacactttaaatggaagtttagaggctccacatgccccacacaatgcttaccgaaacaaggtgatgcagggtcccgcgctgtctcccaggacaacctcctacccctggctcctgcgtctctacggcttgcaccgttgtaaggcgtccctttctcagggcccatcttacccgccttggaagtgctgcctttctcacggagcctgtggggatagctctggttaatttatagcccacatcgcccaatttagcatttgattaagtttcctttttatgagatagtcctttctccctagtgatgcgcttgggggcagggacaacatcatttctttcttttgtacctccccagagtaacaatgactctatttcctgaaccaaaaattgcaacacgtggtctcaaaaataagaaaggtcacttggtagctgccgggacaagtgtcgaccacaggcacctcagaggcccgggtgggcgtgcccccggagctgctgcagggcggtgctgccaccttctcctgggctgctccggggccccgcgatgaatgagtgagtgaatgagtaaatgaatgaatgtgaatgcgtgaatgaagcatgccgcgcggactttcccgcggccctggccgctgggggcgcgcctctggccggtggccggaggtggaggtctccctcgtccggcttcggcgcgccgggtctgccaggccggccggaggtgcgcaggagccccgcgcccagctcccccgcccgcaatggtacgcgccactccgcgctccccgagctggcgggcttgagggcgtagtgaatggaaggcgccgacgccggaagtggatgagaccactagggaggacgacgggtagcacgaacgcgccgcgtctccattgaggaaccgacgaggtgaacatggagttccatgtgcgtcttatgtaaaaagagcgacgggcgcggccaccaatgggcgcgcggcgttcgtaggccccgcccctcatgtatgcagatgagacggagtcgcggccaatggcggaggccgggggcgggcgcggcgcgcgcggtcacgttttccactatgtgacagcggcgactcggccgcggcggaggcggcggcgctgaggggatacgtgcagctgtgggcggcggcggcgggcgcggggccgggcggacagagccgcgagtcggcggagggaccggcggacgggctgacgcgggcgcggccggcggtaagtggcgcggcgcggccccgctgcggcttacgtaaccgccgccggcgcgcgggcctcgggcaggtcggggtcccagcgccggctcgggcagcggaggcgccgccggaagttccttgggctgctggactcctcggcttgaaacggcgccggcgtgggggcgtgtgcccttggccctgtcccaggtggagagtggtcgagccgcgcgcagggtgcgctcgtttgaactgcggtgacaccgagggttggggactcgaacccccgcttcgcagctcaggagcctgaggtccgaaaggtgaggcagcgtgtgtagggcaccgagctaccgagtgactgcgcgcgggctgcggttccgtgggcgattctcttttgggaaccctccctcccctcgc

SEQ ID NO: 25814 - DNA, 2300 bp, Homo sapien
attaccaaaatgtatcaacctgcacacttaaaatgtgtgaattttattgtatgtaaataataaaatataaattttaagtagaagagacccccacatctagatataccatgtgcaaacttctggcaaaccaataataaaaataaaatcttgaaggcagccagaaacaatagacagaagaacaaagaattacggaagacttttattcagaaactacgcaagccagaagtcaatggagtaacatccttaaagtactgaaaaacaaaaacagtcagtctagaatgctacacttttctttttgtttgtttttgttttttaaagacagagtcttgctctgttgcccaggcaggagtgcagtggtgccatcttggctcactgcaagctccaacccccgggttcaagcgattcttgtgcctcagccttccaagtagctggggttacaggcacacaccactacgcccagctaatttttatatttttagtagagacaggctttcaccattttggccaggctggtctcaaactcctgaccttaagtgatctgcctgcctcaggctcccaaagtgctgggattacaggcgtgagccactgtacccctagaattctttttttttttttttgagacggagtctcactctgtcacccaggctggattgcagtggcatgacctcggctcactgcaagctctgtctcctgggttcaggtgattctcttgcctcagccttcctggtagctgggattacaggcgcccgcctctgcacccagctaatattttgtattttaagtagagacggggtttcaccatgttggtcaggctggtctcgaactcctgacctcccaactctagaattctatacttctatgcttaataaatatttgtggctgaatttactggaggtggttatagggggacatggaaggaaaactataaaaatgcaatttagtatttgttgataaaccatacagcctgactggcattgaaattggttgtctgtataacttttccattaccaactgaactgtgctagaagaaatattaaaggaagttcttcagacaggaggggtatgacaccagatggcgatttagatctccacaaaaaatgaggaggcctgaaaatggtaaaaatgaaggtcaatttaaaagttataatgggggcggtcgcgcacacctgtaataccagcactttgggaggccgatgcggacggattgcctgaagtcaggagttccagacctgcctggccaacatggtgaaaccccgtctctactaataatgcaaaagcgaggctggtgtggtgtcgggagcctgaagtcgcagctactcatgaggctgaggcaggagaatcacttgaacctgggaggtggaggttgcagtgagccaagatcgtgccactgcactccagcctgggcgacagagtcagacttcgtctcaaaaaaaaaaaaaggttataatggtgttctcattagaagaactacagaccccagagctctcaaatcgccggaaggatttctgcggtaggcctgtgcatgatggacagaggacaggtggtaaagaatcacggacacctagtaggacaactaggcatggctttgtcccggtttcagagcaccgacacagcatttagtcaccatttaccttcttgggaggtgggttaggcagcgggcacactagtcctgctttgtgggagcagaagtgaagtctcagagaaaacaggtgacttgcccaagaagccttattaattaccagccaggacagcgtattttctattccgtgtgttttgggataacttagtgccgtcccctccgatgaaccagtgccttcgaaagcccttgagatttgggaaacaggcggcacagatcttggaggttaccttgttcttaatcagtcctcaggcagtcgcctctaacgcgagcgaacaccggcttcccgaggccgtcgctcggcagaggaggggccaggcgcccgatcccagatcccctttccccgccccgccgcgccccgcctgctctggcacagccgcactcccgcaaatccctcccgcggaacccccactcctgcctgcgcgggcgctggaaggcgggcagggggcggggcgccgcggcgcgtccgttgctaaggccgcgcagccctagtgaccgaacgccctgcggcggccgcgcaggcgctgtggtgggctccggtgcactgtgggatggaaaccggagcggcgcgtcctggcaggaccgggcggcggcggcggcggggccggcggcggccagggacccgggcttaggctcggccaggccggctgaggggcgcgggcgg

SEQ ID NO: 25815 - DNA, 2300 bp, Homo sapien
tagcaccaggcccccagatctcagggtcctgagaaatgggggtgatggtattggcagagtggccagcaattgagtgtccttccccctccagcactgctggctctgtggacactgccctgcaccatgtgggcatttaggaggcacggaggtgggcatgtgaggccacctccccgctacagaccacgtgcggcctcaggttcttctaagaggcaggatcccaagggcaacacgtggcagggaaggtggaggtgcaggtgcaggagggccactctgctcagggactcaataccttgatgcaaaggctaccgacacgcagaacgctcactgtgagcccaccgggaccaggcaggcagagcagcggaggcccccggagacgtggctctcaccaggctgcactttagaatcacctgggtgctctgaaccacccaacacccaacccgcacccctgactgactgcaccggaacctcttttaaaaaattctttaaaacaattgtggtaaaatatatagaacataaaacttaacctgctttaaatgcgcagttcagtactgttaatgcacaattcacattgctgtgtgacccgtctccaaaactttttcatcttcctcaactgaagctctgtccccatgaaaaactaactcctcattccccactcccccagcccttggcaacccccattccgctccaccatttcactgctccagggacctcaaataattggaatcacacagtactgtatttgtctttttgtggctggcttatctcactcagcataacgtcttcaaggtcatccgtgttgtgacgtgtgtcaggattcccttcctttctaaggctgagtacgaatccattgtatggacggacagcatttcctttctaaggctgagtacgattccattgtatggatggacggcatttcgtttatccattcatccatccaacaacacgtgaggcggcttcaggcttcggagttgctgaagctccgagttcgggatgtgcagctgtggtggagccaggggctgggcacacccctggctcctggcctggcagcgtcatcatcggagtcacctgtccctcatgccagtggtgctctctgctgtcatcaagaccaaacaccactgtaggaagtacccccactcccgcctccaacccccacagggcctgccaggtctgcccccagtgggccccctggtgcatctgggccacccagggccagcctcagcaggggcactcgcggggctgcgcctgcggcttcccttactccagtctggaatgttgtacacacggatgagccagcagctcacgcccacgactgctggggtctccggactccctcatcagcctcctgctgtgctgtgtacaaatcctcctcctgcatgaggccccgctgtctaactcagcaggggagaatgggaggagccaagggaatccgtgctttaggaccaacaccaatactcatggtgggacgacgctgcgatatttgaagttgggagtgtgcaagaaatgttactcggttgttcacgaatgcattcatttattcaatgaacttcgcgtcagccactggctgtcatcagttaccgacctgattgagggcttcatggaagggatttggaggagcattcatctaaaaccacagcacgctgcgacgctcagccctgcagtgggccctcaccagtccccgcgcctccgaatccaccctcccggggctgctcgtggctagcggggggcacctgcggggaccaagccagcccggccgaggcccgggtcccgcccgccacggccctcggggccccgcccacatctggcagaagccacgccccgtccgtgtgggtggggacggcccgccggaccgaaattcccagactgctgcctcaggcaacgggctttccgactccttggcttcttatgtgaggaaaccacagcgcggccggcatccagagagtcggttagccgcgaagttcccgccggacgaagggaccagccagcgccctgctagacagcgaggccggaagcggaggcgtggcccctgcgcggccccggaaaccagtgaggccggcgcgcgcccgccggaagccgcgaccccgacgcgccccccattgccctcggcgccggaagtggtcgcgggtcgttctgcttcctgcccgaggggcgtgcgcgggtcaggggcggccgcggaggcggaagcatccatggcggagggcggcagcccagacgggcgggcagggccgggctccgcaggtaacgtgcgcgcggccactgggccgcggggcgtgtggggatggcgaagggctggctccggcgtc

SEQ ID NO: 25816 - DNA, 2300 bp, Homo sapien
cgacctgaactgtgccactgtcagccagcagcctgtgctgggaatcgctgagatgaccctccacagtatcttggggctggtgacagctgggagttaccaccccagtcctgaaaggcaaggggctgccggagtagctaatggcagctggagagagacccgcctgtcgtgggttgggagctggagagagacccgcctgtcatgggttgggtttttcagaagcaggagttgagacaaagtcaggatacaagatgtttatgagggtccagcacctggacaggagggagaagcgggtggagggagacgttcaactgtggtacaggcctgtctggaagctcccaagtgcacagtacccatccagcatcccacctcgggtctcccaagaccctctcccagtctccgggtgttagctgggcatgaaaaacttggcccaggccggttggggctcatcactgggaagatcctgaagagctaacaggtggaagccatgttctgaccactccccaaagctgggagcaagtccttcctggaaggggcatctgggtggcacatctccaagtctgtcacacaggccgagaggagccgagagatcagcagaagggcagaagttgagacgtttgagtgtaggcagaagtagaaggcaaatgacagcaacagacagggtgggagccaggcggccttgcccagctcctgcccccttctactctctctccctggctgccaacctgaccagaagccaaagagcagagaagccgctggggtctggcccatgcagtcagcctcctgcaacacagagcgtggcgaggatggaggtgggtctggaccagcggtagacagccagcaccatggtcagcaaagcatggcactgtccctaaagatacagggctttgacagtcagcaaagcatgacaccgcccctaaagatacagagcttcgccagtcagcaaagcatggcactgttcctaaacatacggggcttcgttttcctttgattattattacttgcatttgaaggagcttggaaagcatgagaaagattacagaaggctaaaacacacacacacacacacatacacacacacacaccatgcacacatgcacatgcgtgcacagacaggaacacacacttgccacgtacacacacatcatgcatgatacacatcacacacacatatgcatgtgcacacatgcacacaggcacacacacacagcatgcacacacatcccataaatatgcacatgtatgcacacatgctcatataggcacacactctcacacaccatgcacacacacacaagctacacttcgttgcgttgattcttttacagctttctcaaatgtttctacagatgttggtgcatttcaatatgttaacacttcttcaattaattttaataatacatacttttcaaaaattaccttcttcaactacgttttcaaactcttttaacttagaatggtaagaattgttctctgtaaattctggtttatccaaggctagtcttatgaggggaatttgtgttttcttacatttcttcttggttaacaagttagtagattatctattcgatttttctagagtcagctctcaggcttcatttatcaattcacttgtttccatctttgaattcattatttctgctgttatctgtagtccttacttctgctttccttgggtttgtttgtctttcatttcaagtgatttcttaatttcctttaacagtttttaaactgtggaattattttctcagtatagtccaagctacatctaataagctctagcatgtaactttttcttttttgttcttttctaaatattgtgtcactgctgatttggtttttctcttttatccatgagatgactgttttaagttcccaggaagcgagtcttcttgttccaatttattcctgaatttttattttgactgtcattacactgtagttaggagatgtgacctctactgtctccagcatttagaatgtattgcggatccagggacacagcaagtcaggtgggctctgtcgcaaggatggttacaacatagactacttccatgtcagtcttccattatttgcatactcgagaccctgatgtgttggctaatttgccaagaaacccccgcagcagactgcgtccgcagggcagggctgagtagcaggggcagcacctctcacaggggcagggccgcttgcccagccttgaggaagggggacccagacattgcctttctcaatactgagcccctaaacaggatttctggtctggggtctgggactaggctatctggacagtcaaactcttc

SEQ ID NO: 25817 - DNA, 2300 bp, Homo sapien
caggagaagtttgatccagccgctcagtgatgcagcagggaccgagagcccttgggtgccctgctccctccacattcccaggggctcctcatgctgccctggcagctctgcagaaggcctccctgaagaaaggcagctggtcccagctagagtcccagggttcatgctggctgagcccccttcttgtttcttccccaacccagagctattctcacctcccctgaaggccttcccaggtgatgggggccatggagactgcattggacagctctgtgcactgtccatgaagcacttgctgcaggactcccttagaaacgtgaggctttaaacaccttgggaccccaggaggaggcatgtgtccagctagcggtgcccctctgtggtgtggagaacgttctactcagacgttcctgagtgggaacttggcagcacaactgggaaacctgttgcttccagccccgcgggcctgtagaccccccaccagagatgggccctcctgccaggcttcctaccttgtgcaacttagcctcctgctgcaccccatccaccagctctgccagcacgagaggtcatcccacacgctcctgcttccaggccaccagctgtcccccatggcccccatctcccctgtaccctctggactttgcagagacccctctgctctccttggggttacagagctctgcatctgtctcctcccctcccctgcagctgctcccaatcctgcaccccacacagagcctggggctccacactccttcaccactgaccacacctgccaggtgctgcctgcatctcaactcaggccacctgctcccgccctccatgttgggttcatgcagcgattctcccaggccactctgtgtctccctctgctccagcatcctgctgcctaggcggccgtgccactgcagcccttgctccagagtacctgcctggaaaccttgccccggctccccaaatgcacctcccttcccacaggacatccattcaaggccacatccaaacctccaaatgcctcctgaacacttcacctagaggcctcacctgcctggtggctcacggaggctggcgccatcgcctccccccgccacagccagactggtctgctccccctcctcttcacgtcccctcttggtgatcacctgctcccccatttcccacctcaagcagtctcaccctcctctgtgccccgcccctggctcctacctacgcaaggtggcagcctctggccaccctgcacgcccagccatgcagagcctgggaaacgacaggacatgtggctgtcctttcacggcccctgtcacctcccccaaatccagccagggctgagacgccccacactgtggcccccggcataaggccttgatccttcctgagggcaggatgggggcagttttgttctgtgaagttccttggccttgagcttagctggaccccgctcccggaaagcccgagaaacagacgttcctctgtgaaagccccttctgagcacctgcaaggagcactctgccatcccactcctggttcaggctttcatccgcgtggagggccttgtcttctgtgagtccccgcctcagcctcacctggctcctaggaggctctgggaaggttagctgggctgttccccaaacaaggggccacaggaaggtgggggctcctgagggtctgggaggcaggggagactatgtgtgccctttctcttccgcacctgaaacctgactttccctcactggagacctgaggatggagtgcagtggcttagctaagcttctgttaacagcatgctcactgttttgaaacagaaatgaaagaacatttgggagttggggtatgtgcagagaaaacattttccttgaatgtctttactgaatgggtgggaataggtatgtgtgaaggggaaaagttcagggtacagtggtcaggtccttgggagatgtcggggagggccgtctggcccagctcctgaggagggtgggcccaggctcatcctatacgcactagtcctgacgcctcacaattaatcaaatggctaaaaacaaacacaaaagaagccctcagcattgtgttaccagggcagcggtgtgatgtcatctgttcattccaagctgtcaccccgaagctgagtgaagtacgtggtgaggacaggcagattgtgccttacgtgcatagtgcaaataaggtttgtgtagagtattttgctcattgactgtggaattcattgattatgttattcactgcacgttcagctccgcaaagcgtcttctgtgtacctgggaggagcatggtgccatttccct

SEQ ID NO: 25818 - DNA, 2300 bp, Homo sapien
gtatgtgaagtcccaagcgcgaatgctcccaggcattggggttgtcaccccacctttctccttatacacagctcacaggatagcgtgtttgctttcactgcacactatcgtactgaattgctctgcactggctgtgcaccggtctccttcagacagcccctctgacacataatggcagacacagccacccaggccaagtttctcttttccagacatggcgagtgaggttcttgcaccatccacccaacgtctgcgtggtgcctcactctgctggagtgcctctcaggactcctgtgaggactaaatggcacgcagcaatggggctacccattccttctaatggaaatctactttttaaaaattacctctgcaagcattagatcccagagctcgtttcacgtgactttttgcgcaggcacttctctttgtacgtgaaaaactaactttggtagacttacaggcaggttttaatattttctcgtgattgtatgtttttgagaatcctgtcaaatgatactgaatcttatctagatgttagctagctacagaccctgtttcattctacatgaaaattagatagtgcaccgtttccatcagcagccaagtctccaaaaccccgtaattgctctccttttcttcagctgtatcttgttttaaagttctctaattcaccattcctttccttctaagtttagcctaagcatttcttgcaatgaccaaagttttctaattattaatgagatatttaaggaaatgtaaaattggcatttttattttgctaactgtatttttatccacataactagtttcccccaccaagaatcacaggtcgagaatgctgtaaaaacggatcctttctcagctcctaaaaggaatggcctacaatcgaagcgaacgcgcatctccgccaggtccgcaaccacaggcccacgccgtcgggccccacgaaccggcgcgcgctgtcaaaggcgcttcctccctggaacgcgggattccggggacagtgtgtgcactcaagttgaaaagttgtcatactcctgttggaaagaaacggaaacatcaccaccaggagggtggccactgaagaccctcgccgacacctgctggcaaccaaaggcgcttccggggatctacgggccgacctgtaactcaacacaagcctcccaagccctgcggccttaaaacaacgcccacccgggcggtgcgccgttcccgccacctccacgcctgcctggacccggactcgagaccctggcggcgggccgggctccctccgcctgagcagggacgcggcgagcgcatcccacgaccctcggcagccgttgcaggcctggcggacctacaccccacaccctcacggccgcgttcccgccgcggggcagggcgaggcccacggcgcctgcgcactcagtgaccgggccgccctgcgcctccgtgcgcacgcagcaccacgtgacccactgccagtatccaagatggacgccgcggcgaggcctggccggctccccgcgttagcctgcaccccattgtgtgccctctaagcgcgaattaggctcgcagacatgcggtgctgaccgctaggcagccatgcgggctaccgagtgcgaccggacacggccggggcccgtgtttacggccactactggcccccggtccctgcgcctcctcaaccgcgaagcacccagcggctggcgcctggagcgtcttttggtacgccccaccctctagaattggcagctccagcagccaatgaggtccaggacgcgtgcggggaggcgggcaggggtggagcctctctgccgctcatagggcatccggccccgcggttgagcagccgctgggcgaggggtgggagcagacgggctgtgcgcaggtttcagcgggccaatggaaggccggccaggcgcccggggcgggcgggcgggaggcggggccgagccgtaattgacgagctcttcattagaaaccaggcgggagggcggggcccgcaaggggaggtgacgcaaggctgccgcagccaatggttggcgagccgccggctggctgggcggggccgggccggctgacgggcgtgcggggtggcctatcgccgcctggctcgacgctggagtggggagaagcatcatggttcaacgtgggtcaattttttgtgaatgaggaggggaggttgtggggccgccgccgcggagcaccgtccccgccgccgcccgagcccgagcccgagcccgcgcacccgcccgcgccgccgccgccgccgcccgaacagcctcccagcctgggcccccggcggcgccgtggcc

SEQ ID NO: 25819 - DNA, 2300 bp, Homo sapien
ccagcctgcaaagctgcccattaagaacagctggagcacactgatcatacacatatcggctgggtatcagcctggagtcagtacatttgcttggggccattcctttactttctattattttgcattgatctgggccaatatcacgttgttttcatttcggagcccagataacatgtttttattttctggaagcacagtttctccttcattactcttctttttgactgctctcaaatctttattcttccagatgaactatttaacgattttcacaattcccaggaagttctgttggaacttactgttacatttaggtacttaaaatgtttttgctaattgagaatgtttcatattttctaacacatatgtaagtgcttagcacaaagctcaccacatactgaatatgcaacaattatttaattaccgattgaatgttgtcagttatctgaaagttactgttatttgtatattttataattggccagcttgccgatcgtagccagtctaggagttctaccaatttattggatccaccaaccctagattttaaaatttgagtctttgatgctggtttctttcaactgtgagaacacggagattcctttgagtgtgattcatttgactctgtcaaatacctgtatgtgaagtcccaagcgcgaatgctcccaggcattggggttgtcaccccacctttctccttatacacagctcacaggatagcgtgtttgctttcactgcacactatcgtactgaattgctctgcactggctgtgcaccggtctccttcagacagcccctctgacacataatggcagacacagccacccaggccaagtttctcttttccagacatggcgagtgaggttcttgcaccatccacccaacgtctgcgtggtgcctcactctgctggagtgcctctcaggactcctgtgaggactaaatggcacgcagcaatggggctacccattccttctaatggaaatctactttttaaaaattacctctgcaagcattagatcccagagctcgtttcacgtgactttttgcgcaggcacttctctttgtacgtgaaaaactaactttggtagacttacaggcaggttttaatattttctcgtgattgtatgtttttgagaatcctgtcaaatgatactgaatcttatctagatgttagctagctacagaccctgtttcattctacatgaaaattagatagtgcaccgtttccatcagcagccaagtctccaaaaccccgtaattgctctccttttcttcagctgtatcttgttttaaagttctctaattcaccattcctttccttctaagtttagcctaagcatttcttgcaatgaccaaagttttctaattattaatgagatatttaaggaaatgtaaaattggcatttttattttgctaactgtatttttatccacataactagtttcccccaccaagaatcacaggtcgagaatgctgtaaaaacggatcctttctcagctcctaaaaggaatggcctacaatcgaagcgaacgcgcatctccgccaggtccgcaaccacaggcccacgccgtcgggccccacgaaccggcgcgcgctgtcaaaggcgcttcctccctggaacgcgggattccggggacagtgtgtgcactcaagttgaaaagttgtcatactcctgttggaaagaaacggaaacatcaccaccaggagggtggccactgaagaccctcgccgacacctgctggcaaccaaaggcgcttccggggatctacgggccgacctgtaactcaacacaagcctcccaagccctgcggccttaaaacaacgcccacccgggcggtgcgccgttcccgccacctccacgcctgcctggacccggactcgagaccctggcggcgggccgggctccctccgcctgagcagggacgcggcgagcgcatcccacgaccctcggcagccgttgcaggcctggcggacctacaccccacaccctcacggccgcgttcccgccgcggggcagggcgaggcccacggcgcctgcgcactcagtgaccgggccgccctgcgcctccgtgcgcacgcagcaccacgtgacccactgccagtatccaagatggacgccgcggcgaggcctggccggctccccgcgttagcctgcaccccattgtgtgccctctaagcgcgaattaggctcgcagacatgcggtgctgaccgctaggcagccatgcgggctaccgagtgcgaccggacacggccggggcccgtgtttacggccactactggcccccggtccctgcgcc

SEQ ID NO: 25820 - DNA, 2300 bp, Homo sapien
ccaaggccttccctggagcttcactggggaatctgcatcactctccgtgcagcctgggcttcctcccaacatggcggccgggttcccatgcggagcctcctgcaggagagctgtgagtggaagccacatgaccttttatgccccagccttcctaaccacacagtcatttccagcctgttctacactgaggcagtcacaatggctgccccaagcttaaagggaggggacttggattccaccccttggtgtggggagtgcagaaagttactgaaaaaacaggtggaataaaaaatactgctgtggttatttttgaaaatagcttctgccctgtttccccaggtcactcagccagtggccatgagctgccctggagggacatgaactcccagggacttcagctgggaaaagtagctctggtggtccaaggtcagtggtgtggggtattctcagcaaaagcacagggaagttggggaaggggctcagaacccctcacagggacctgggggctctgggcagagcactgatggcttctgctacggggtaatcacactcgatacaaatggatcagacaattgtcctgccccttgtgtctcatgatcacaagcaggaagggtgaacccggtgtctccgtgcttccgggaaagttggtgaaggaaaatacaaactcaagaatggccagagcgtcatttctcaaaggcagccagcgctaccccatgtgtctactccaaatcttaggtctctgacctccaagtccaaagctcagccgcctgccttacatcatgccaccccttgtccataacttgactttggtcctgcaggggttggaaatgcaccattttgtgtacatgctggtcctcatgcatgtaaagtgaggatgcctgattatccactgaatatcttgtttaaataaagttttgctaatacctatgtagatatacttcaagatctttgttgggccactaagattggtgtttgggtgtagagactggggaagcaacaggaaagatttatttttaaggatgagcaagggattcctggaaggtcgcctaagagagctccagattgtcctccttgaagctgcagcaggaagcgggttttatatgtttgttgtgtctgcgtcatgggatagacttttctactgtaaaatgagattttttatgctatgctaaacacagatgtttttctcctcccgccaacacttcacaggcatagggacccctcccaatgtcactgtgagctgtgagcactgagatggctccgaaggcaggaagagagctcgctggaagtcccaggggagcagggagagagccaggtgccgcccagatgctacacatgccctgtggctctgcagggcgttctctggaagagtcaggcctcctccagctccaccagcatcatggaggctgctaagctgcctcagtttccccagtgcagctgtgacatgggcctgaagggacgtggagagaggcagctgatgtctccgcgctggctgtgtcacttgtgctgggtggtgaccaggggccacacccccatccagtcacattaacttacatgaaaacctccaggtgatgcctccaggggccactaggctccctcaggtccctggaccaaggctgtgacctacacagatagattctgccaatttctccttgagggtcatgatgctctcctcctggtccatctcagagtcttcactggagaaagaagtttccatctacaaagtgtgctccatggagacatggctcacctcattccagacttccatctccttggaaaagtgacaaaggatctcagaggtaggagaaaggccctgaaatcccagcacaggcactcgggctatgaagggtaggaggagcggagctgggagcctgggctttgaggccttgcgaaatccccctgtgccaccgcccagccagacacacgagcaacccaccaaggggcgggtggatgcggccttggaattcagagttcccgtttgtagaaacgaaatgtttatttcatgatgcagttgggggtagaaaatggggataaatctctaatttctcagatttccagaaatcgggattttccctaagtacccctggccttgagctaaatcccgtcactgtcttgggctgtgtgctgacgggagccagggccttgtaaggcccagaccctcctccttctctcccgtattagtcaaggttctccagagaaatggagttagagatgcattgctataagaaatggaatgggctcgcatgattacagaggctgaggggtcctacaccctgtcgtctgcaagctggaaaggcaggaga

SEQ ID NO: 25821 - DNA, 2300 bp, Homo sapien
ggagggtttacgggctgggtctgaagttgcctgaatgctcactcatgtcgggtggctgatgctgactgtgggcagggaccttggtgggactgtcagctagagcacttgggcttcctcacaacatggtggcttggttacaagatcgaggtcctgacagaaaggaagtccaagaagaagctgtctcatcttgcatgtcctggccttggaagtcatatggtgtcacttctgcagcattttattcaatgaggtggccatcaagtctcatgagttccaagagcagaagaaagagattcgcttcttggggggagtggtggcacgttctggatgagtgtgctggactggaacagtgctgtggggagacccaggctgccacgtggtgtgtgtgccaggcattctaagatgccccagtgaggtgattcattgtcgggacacatgcattagacacaactttctttttgcatggtgaagatatctgggggggtgttggttggagcaagtcaacattactttaaaattactttctcagggaatatcaaccctgacccccgttcttacctctgagtgaggcagccccgcccagatgctggactctgttgagagcctcagtttccacagaacacatgggtcccactcactcccaacagcccgatgtggaaaggcatgtggttccaagactcacctcccacctgagtagcagaggtcaggtatttgtgggggagcacaggcttgcctgataccatcagagtccttggttgagggattagaatttatgctgtgttccctggagggcatccatccttctgcttttgccccaataatctctccttctctgtccatcctccaattcaagcaggtggtcagcagcaccaggcttatagcctcacagagggtcatgacttagtcaaagcagaaatctcatcccccgcaagaatttatggattttgtttccaaaaacccaagccctaggtttgagtggaagagcgagaatccgaagtacaaactatcttagccagaagcatgaaggggaaaataccttccagcaggtgagacagagcatctcataggctggggggctgatgagggcagggagccttgcaggtcctggaggaagggagcttccacctggtgaggcagagcctgactgtggtcactcttctcaccatatcctgtggctcctgaacctccactagactgccttcccagcgtccccgtggtcagtcgtggtcacctgatgagacagatagcaaaagtgaagtgtgccaccccaggacaggtgaacaaggcacaggcctgcctttatgcctgtgagaggcagcctctgagatacccagcaatccccacttcctggcattcacaccctgtgggacccctctccttgagtatggaggggactacacagaacattgcagaagtaatgggatgggacataaaaagacagtggcttctgttctgctctcactgtcttgtcccagcaccctccctctctcccttcctcccttgctttaatgaggccagctgccatgctgtgcactacaccaggcagaggcccccctggcaagggcctgagcacagactggagccaatggtcatccagagacaaaggctctaagtccaagagtccatgaggatctgaattctaccaacaaccgtgaatgagcttagacatggaaccttctccagttgaaccttcggataaaacccaagcccttgctgagggcttcactccatcctcatccaagaatacaagatggaggcactcagttgagctgtgcacggatttccaacccacagaaactgtgagatcataacggtttgtggtttgaagccattcaaaccggtttgtgcttcagagttgtggggatgatttgttctgtgtcaatagataactgtcccatgtttcccatctgccggctgaatgcagcatcctcctgggagagggcaaaagtgcagaaggaaggcttccacggaccaggagcacctgctgtgtgggacagtcaggaggcaacaaagtcgactgtgtcgacagactgaaatttgttgttgctgttcctgcgtctatcgctcccctgagatggagtggctgtgggctgcatcaaggcagaaaagcctgcatcatgtgggaataaatgaggctgcatgtgatcaaatacccggaaaacaatggcgtaaaccagtaagtgtgtttttctcaccgggcaggtggtttgggggtcagtgctggttggtgtcagctcagcagctgcacatcccagcagaggctctgtggctctcccggcctttctctcgcctttgcgggatgt

SEQ ID NO: 25822 - DNA, 2300 bp, Homo sapien
tttcaatttcatgttgtcactaaatctgactcagtagatacttctgtgcagctgattatactactgaaacgggataaatgcagcttgatgattttcagctgagttatttgaaaaataaagtatttaaagctgttctttattcttcagagaagaccagactcttgtatctattattactgtgaagaaatatagtagcatgtatactatatacctgcaacatatatactgcaagtatatggaatatatttcagttcaaagatcactgaactgtgacctccatcttgcgtgacctacgtcttgcctcaggagcaaaagtgaacccttaaatgtggctaagatgtgctaaagatctgtcttttaggatgattaaggtcacagtttaaatgctgctgttttactctgtgtaagtagcttaatttctctgggcctcagacctttggtttgtaaatacagtggaggcgacaagccctgttttcagggttgtgggcaccacagctgctgtctgcacatgccccgtggcacctggagcacagtcacatgccatgtgtgtggtcagtgcttagaactgtgaccgagatagggtttgtagattggtacgtggctttgagaattgcgtgtatgtttgcccttttattcaaggaggagtgtgttttggaaacccgtgtggggactggtaggtgacagcgcccctttctcctatgtgccaggtgtggaccactacaacgaggtgaagagcgtcaccatctgcgattacctgcccccccacctggtgatttacatcgatgtgcccgttccagaggtccagaggcggattcagaagaaaggagatgtaatgcagttttcaatcaaaggccaagcatctctattttgaatgtagatcagcactaaaagccctgttttaatagcatttatactaattcctaccagtcctcacgaggagggtgacacacaccctgttcccacttgagagagggcatctgcaggggtggaggggagaccccatggctcggcctggtgccacagcctgcgggcctgccgcccaccagtgctctgcggtcccactgtggtccccgagtcccctcagctgtttaaacttgggaggctggtgagggcctcctggcagagcgtcctccatccctctgtcacgtacctttctgttctctgatgaggtttttgtgtcctatcgttttcttccacattggaagcaatttctaatatccctcatcacttcaatctatttaacgcaaatcgtgcctctccccctttttcttacttaccaattctagaacagtagagcagtgatatccacacacatccatttactctttgtagttttcattggatcttaattaggtggcctcgaagcaacgccttttgaagtgaccctgtggccgttggtagctctgttggcggcttgatggaggatcctgagatgaaacaaagaccgtctttgccctgtggcgagttctttgttttttttttttgagacagagtctcgctctgtcacccaggctggagtgcagtggcacgatctcggctcactgcaagctccgcctcccgggttcacgccattctcctgcctcagcctcccaagtagctgggactacaggcgcacgccaccatgcccggctaatttttttgtatttttagtagagacggggtttcactgcttgtttaatactatgttattttttcctggaggagaatatggtctcctttttgatactgtgatgaaaatgcagggctacctgcctgttcctcactctgatgcccatcctcagtgccggaattcttgtaggtgctcaggaaatacctctctggatggtgggttcttgtcagggcaacagtaaagctctggttattttttgctgctcctgaaagatccatgggactaactttccttctctgttgcaatagtagaaacagcgagatgtctatgtatgcctttctattgccactctggaacttttattgtttaagcatatgcttgtaagtatgttgtatagctagacttctaagaaccttccatcaagtggcaaaaggagggaactgcaagttcaaaatgtttgtttctcagtggactaactggacacctttgcttattatgctgacatttattgagaaaaacaaagtcatacatttaacattctctagataattcttttgttatctgggaaaacagtatttcaaaaataattctgaggtctaaagtagagctgtcaacttcttaatttttccaagtaaagtcttcaatactgtcatcaggtaaaattaccccattttataaaagacatcacatt

SEQ ID NO: 25823 - DNA, 2300 bp, Homo sapien
ctggggagggaaaacggaaaaaggggggcgagaagcggagggacggggaagtatatagtaatacttcccttgaaccagtaaaactgtaatgcccaacctggtttttactaactgttttcagactctcccttttcctttaatcacctagccctgtttccacctgaattgactctcccttagctaagagagccagacagactccatcttggctctttcactggcagcccctttctcaaggacttaacttgtgcaggctgactcccaccacatccaagaatgcaattaactggtaagatactgtggcaagctacatccgcagttcccaggaatttgtccgattgataacgcccaaagccccgggtctatcatcttgtaatagtcttaaagcccctgcaccttgaactgtttactttcctgtaaccatttacccttttaactttttgactactttacttctgtaaaattgttttaactagaccccccccccttcctaaaccaaggtataaaagttaatcaagccccttcctcggggctgagagaattttgagcgttagccgtctctcggtcgccagctaataaaggactcttaattcgtctcaaaggtggtgtttttctaactcgctcaggtacaacaaaacatccacgcaaacaggttgtgagaagttacgtctgcgtgctgtgatacctagaggaaccactacgaaaactatacataatgatatttcccaagacattatcagtaaatcaagatggaattctaaaaaaatgtactgtatccattggaaggcacaaaaaaaaaaaaaaaaaaaaaatgcaaaggaaacaaggcaaaaaacagcagacatgaaccctaaagcttgttaaatggatttcaggtgccctccaggatctaaaaaccagaccctcctgcgttggggaccgggaatccgtatttttgacaaaaagcaattcttcaattatagaaacatccatagaaccggccgtagtttacacagctgcattcccactgttttacaatcgcatgatcatttctgaaaagttgaaaacaaagttaaagaatatttaaggggttaagaacaaaaagcctggggaacacaaaagattataaaaacccttcccaacagcaggcatacttggaaggaaacctcacatgcaaggctccttcgtggagcccagagcccaggtcctgacgggagcacattttaagagatggacttgccggcgcggtggctcacgcctgtaatcctagcactttgggaggccgaggcgggtggatcacgaggtcaggagatcgagaccatcctggctaacatggtgaaaccccgtctctactaaaaatacaaaaaattagccgggtgtggcggcgggcgcctgtagtcccagctactcgggaggctgaggcaggagaatggcgtgaaccagggaggcggagcttgcagtgagcgcgatggcgccaccgcactccagcctgggcgacagagcgggactctgcctcaaaaaaaaaaaaaaaaaaaaaaaaaaaaaaaaaaaaaaaaagagatggacttggagcgtgtgcttttgttttctatgctattcaatgtgttcacagcaggtcccctggatgagaccacttagccttcagctccggaggcgacccaggccggccttgccaggtccctctccctgacaggcgccccgcgacaggggtcccaccccgtccctccgctcctcgccccctctttttccactttccctccccagcgagaacgttctgagagctaggaatgttctctaggaggtcgctttgacgtccacaccgcgcctgggggattctgcggggagcacaggaccctgggacgagacgcagaagtcgctccacgccctgggcggcctcagctcccgcgacaccgcagcaactcagaacccaggcaggggccgggcagccagcatgctgcccccacgttcacctccaactcccacctctcggccctcgccccaacccgcaggaccctggcagcgcactggctgtctccgcggaagcccccgagggcctcggcgcggccccgccccctggaaggttcccgacaggcgccgcgggcaccccggccgtgacgtcacggcagcgcgccggccgcgagagagggccccgtcgcgaccgcgtccccttgggtccttgatcctgagctgaccgggtagccatggccttgcggctcctgaagctggcagcgacgtccgcgtccgcccgggtcgtggcggcgggcgcccagcgcgtggtgagcgggcggcggggtggcagggtggcggggtggcagggtggc

SEQ ID NO: 25824 - DNA, 2300 bp, Homo sapien
tatctatctgacaagggattaataaccagaatatataaggagctcaaacaactcagtggcaaaaaaaaagcaaaaaacccaaatgatctcatttaaaaatgggcaaaagatctgaatatatatttctcaaaagaatacatacaaatggcaaacaggtttgtaaaaaaatgctcaacatcactaataatcacagaaatgtgaatcaaaaccacagtgagatgccatctcatcccatttaaaatggcttttattttaaaaaagacagggaataatagtttttggtgagaatgtagagaaagcagaaccctcattcattgttgatgaatatacattatttttggtggagttcttaggtttttcaaactatcagatcatgttgtctgcaaacaagactaatataatttcctcctttccaatttggatgccttttatttctttctcttgcctgattgctctgactaggacttccagtactacgattgaacaaaagtggtgaaagtgggcatcagtacagccactataggcaacacaatggcggtttctcaaaaaaataaacatagaactaccataaaatccaacctttccactactgtgtatatctccaaaagaaagcaaatcaatacattgaagaaatatctgcactcccatgtttattgcagccctattcacaatagccaaaatatggaatcaatctaagtgtccacctcaatggatgaatggattaaaaaaagtggtactatatgcagtggaatattattcagccataaaaagaatgaaatcttgttatttgcagcaacatggatggaactggaggtcattatgttaagtgaaataagccaggcacaaagacaaatatcgcatgttctcactcatatgtgggagcttaaaaagtggatctcatggaaatagtagattggtggttatgagaggctgggaagggtataggggactgcgggatgaagcgaggttgattaatggatacagatgtatagtttgatagaagaaataagactgagcattagagatcagtaaggtgactatagttttcagtaatctattgcatatttcaaaatagtcataagagaaataatttgaatgtttctggtataaagaaaagacaaatatttcaggtgatgaatagcccatttacactgatttgatatttacaaattataattgcattcaattatcatatgtactccaaaaacatattcatctattatgcataaatttgaaaataataaacactcatataaggagacacacagaagagatctgacacacagatcatgggaggtgacgtgacctgagatgcagagatcaaagtgttggtgccacagaccctgaagccaggagcccccagaagctgggagaggccagacagggtttctcccctggcagctgggagaggccagagagggtttctccctttcctcatctggcaggggaggaaaaaggaatgtcctggctgggtgtgggattgtaggaagtgagggagggggcgggctgatgcggaaggagaacattccagagggcacagtgagtcccaaagccccaagcggggtggcaggagccagcctatctgaggagcacctggggccatggaattagagtggcgagaacaggggaggtcggaaaaattggaccagagaggaaacagaggtcaggtgggacaaattcttccctcagagggtgcgggctgtgcaggaacaagggtggcccatggacagcagctcctccagtagggagtgtgggagatagatagccactgaggagggcgaagggcccaaacagggagccaggagcgggctcaacagcctctgcttgggtgccctcagccaggcaggggccagcctggccccagaggcacaggctcacctaattggcagtgtgggcctttccatcatcagggggataattggaccctggagtccctatgctcatcagaaaaagccacagtggtttctccccagtgcctcaggcagcccacttctcaagagcatgttcaaggctcgtctggtcactgtggccagactgggagttgctggacacaggcagaagccactcttcactcctgcaggcagctgcagccgtttgcagtgaggcttccagacgccccaggtaggatccagcactttccatgttgccgatgggctcctttcgctgtgattttagggtacgttgtattccttgcatggggagagagctcttcttttatgtgtgtgattgacaatccccactccacatgccccccacatacagtctggagcagggactcccctctgcagtctcacggccag

SEQ ID NO: 25825 - DNA, 2300 bp, Homo sapien
ggggcactggaagactgggcaggcagcacgatggtgtctcagggatgggcctccagcaataggatggcctctgcacaggtggtgagccccccatccctgtagggtgtacaagcagaccgtggagacccacagctccaccccttagctagtaaagaccttgacttaatgggtcaatcttcttagtcactgccaagcccctgttccatcggactgactttcacttgggtccttcagggtgatgcacattggcatggcatgaggctcacccaatatccactgccagcttctccctgcgtcccacactgtccactcaggccaggcggccccttttcaggccacacacacccctcacatttcagctcaattcctgtccctggaactaccctcatccatgccgccccccactccccttctctacagcctaacccccaaacccaactcctctaaggcctgttaaaggaaaacattattggaaattttcagaagttgttccgaaccctggagacgggtgtggggaccactgcaacgggatcttgcagtgggggagggagaccaggctcagctccgaacagcacaggcagtgggggtttgcggctgaggagcaggtggggtcgcgggtggcaaatgactgggaggaacacagtgcgggacgggatgctggctcggccgaccccgcagggctttcgctgaagacaggtctgggccatcagacatcctggggatgctgggggaccaggaacccgatccaatatccagggtggggggctctggctaaaccaacttagcagggctctctgcgaaaactgaacctgacaatgcagtgcacagatgggcctgggaggaggttaggaggccaccgaagtctggctgagcaaggaatctttggcaaagtctagttccaggacctgttgctctctctccttccctcccctgttcttcctctctccctctcttcctccaaccttctccctcctcttacccctttccttctcctttccctcgcatttctgtcacattcttttttgttgtttttttcattacggtaaaacttcacaaattgtttccatcttaaccacatttcagtgacgttaagcacattcacgaactgtgcagccatcaccagcagcctctacagatccttttcatctgtcaaggctgaaaatctgtccccactaaacacgaactccccatttccccttccccagaccctgataacccccttctactttctgtctctatgactttgactcctctaggggcctcggctgagtggaatcatgcggtgtttgtcttaggactggcccgtttccctcggcagagcgtcctcaatgttcctgcgcgtggcagcaggtgtcggcattcccttccttttaaaggctgagtaatgttccacagtgtgcatggcccacatttgcttatgcacgtatccatcgatgggcagggacagcgggggacgcttccctttttcatttattataaataacgctgctgtgaacgtggggtaaagacgccccttggagcctcggcttttggtcctctgggcttgtgcccggaaggggagtgctgggccacgtgggtgtccgtgtttgattttctgggacctgcccccccccgtctcccgccccggctgccgcgtctcactccccgccgcggtgcgaggggccccgtgtgccgcgcacccttccacccgtgttttgctgtttttttgactctgggcgtcccaggggtgcagcggccgtggggccctggtttgctttcacctcttcatctgctcactggccgcgagtgtgtcttcttcagacaaacgtctgaaggtcaagccctgggctcctgtgaacccggccgtctttgcggcagagtctgaggctccttctttattctggatccggcctctggtcggaggcgtgctctgcaggcactgctcccattgctggcagccttttctccccgtggccgcccggccgcccatcagaggcgttgcagacgcccgccctcgccagcgcaaagacaaacgccggtggccgcggacgcgccggcggccgggagcaccccagcgggcgggcaccacagaggcgcggtcctccggcgtctagatctgccatgtggcgcgcgccggaagcggctctgaggccggaagtgagcctagagcgccgcggccccgagatgaagccggcggtggacgagatgttccccgagggcgccgggccctacgtggacctggacgaggtggcacgggcccggcgggagtctccgagcgtggggagcggggaagggggagcggaagggcggcgtcctggtgc

SEQ ID NO: 25826 - DNA, 2300 bp, Homo sapien
gagtttttccacgtatagtcttttattcagtcattataaagatatggtacatgctatcatatctcatctttcctaacgccataggcgtattttcacatcatcttcagacatgcggttattaacagaaggatgataggcccatcctctctggcggccccatcacggtcagaggctgcggcagggcccggcccaccctcaccctcctcccctctgcatctagctcccaccttccctgctagacacggaggtcctaggcccaccgccgatgctgggctgtgcattttcagacagggcctcccagactgtttcccggctcgccctcccaggccctcccttcttcaccacctcccacagtcgcagaaggcccattcctgtagcaagctcactccgtgtctggccacactctccccaacccagctggacacagtattggtgctcgagaggggcccagggatgggaatgctcagggtggaatctggaattggatctctggcttgactagatcgaagactggttccatttcccatggaaaagagggcactgtcacccacccagtgcaaaacagagctatagagagcaggactttgggtgaccaagcagctgaagccacggaaataaggaccgtgggcttggttggtaactggaaagtgtgctgccgaatctgcgaaaagacaatgacgagcgcagagcttaaattcccagctcagggggcaggtgaggaaccagaaatcttctgagctgtgcagggaagggcgacgagcaggcctgggtcctcacctcggcacctggatttcagaggggccactgcccctaagctctatgtgccaacaaatggttgtgctaagcacctgcttcctcctgggggtcggagatctgcacatgcacgagtcagagggggctgcacgaccagccctgggctctgaggttctgaagggctcccctcatggggagattccacaggtgtcaccacaacgtggtgctggggaatggagagcatcccgtggggtcctcgagaggatgctgagtcccacgagtcctcctagggcatcttcctagtgaatcattgacctgggtgctcttggtgaccccgaatacaactgccctgaaagaatccattgcctcctgtagccacaggctccagatttctgaaaaggaaacccaaaatctaatccgtggatggctgccttaccatctgaattaaattaaccacctctctgggtatctttggttaaatgtatggcattgtgtggggaaaaatgagcccttaatcatttggatggggacatgtgagcagactgtgatgaactccagaaccatgggacacatgggtgaggagcttcccagagtccttaaacagcccccagggtgaccaggaatgacaggggagaccgccacagcaaattcggcccctgattcagtggggtggcgggaccccaaggagcaggaccaggaggaggctctatgtactggaaagacaggtcagcataggaaccgatgtggtcagtggggcagctgtgtagtcagaatggccctgcccacagagacccttggtgctggctgctggtgtcccagggtggggacagcctcctgcccacctacagactgacactttggatcgcagggaagctcccacctggagatggaagtccatcttgaccccacactttctgctggggctctgctcagtggacgtcctgcaggcaggtcccgctgacgggggctcctcctgcctgctggtttaagtggaagcagcgctggaattattcagctcctcctcacgagggaggaaatctcagccagccccggtattggacgtaggatcgctccttgcggagagtaaactgggtttgtttcaagtaccaatgctgaattcagtcctaacaatttcagaaatggccgagccaagatgtttttctctcagtttgaactttggatcagattcccagaaattgacactctgattgtgcctgccagcagggcgacaggagcccacagtcctccggtggggatgaaatattcagtttgactgttcaggcaggtgacgtgtccttcctcatctgcagcccttctataaagaggactcttgagctggcagcagagcccatccaggcagcacggctggctgagcagagacaaggtaagctctggagaggccaggcagagtggaggggggtgcaatttcttaagtcatgggaattaaggccaattgaggcagggatttcacctccaaatagtggtttgaaaccactgaaatggaaattgctaggaaaacagtaagaattttttttttaaatccatgc

SEQ ID NO: 25827 - DNA, 2300 bp, Homo sapien
tcaggatcctgcggctcctcccaggtgcaaacacggcttttgcttccaatgcccccggcggcatgtgcatcctctccagggaaggccctggctacaggtctcctggcctgcggaatgggaatgattccaggacctgcgatggtggtaaggacttccttaggagatgaagccacccaggggtcaccagggccaggcagaggctgccaccatcgcgttctaagccctgctgtccacactgccatccagaggcccagaactaggctggaggaaggacttgcctggaggaataacccaacctggtcagattaagaggaggcgtagacagtgacggggtaactatagagcctcaggccgggttaacctcaagtccagcttcctaggcccaggcagccctgcctgatcccgcagtgcgtgagaccacacagagagagagcgggatcgtgggcccaggctcctgaccgtgctggataaggtgtgcaggcagccacgccaggcccaggcaagaaggagcaagcctggagcatgtactgaacaggggtctgtgagtcacaaaatgtgacgcagcagagggtatgtgggggagggcagggaaatgcacacttggattgggtccccaaagcctccctctccagcaatgactcagtgtctctgggtgaaggagcaaccttctctgggaggcagggcaggaaaccccaagagcccagggggagggcaccccaccttcctgctccagccccacacagcggctgagagccccaggcacagaaggggtagggaatgttgccaccacccccaccacggaccccgctgcagcttccaggtgatgccacaggccctgaaatcaggacacccttgctgtacatgggggtcatcttgaggttctctgccaaggatactgacctctatgcctgcccccaattctgcagctcaggcacctggcttcaccgccaggccttaccatgtggagaacagggggccggggtggggggtctgggagccaaggaaggagtgaagccctccagacaccaacatcgcagtcctcgccccctccctacagaccccatccagcccaactccccatgtgcagctaaagccacgcgccctcctaccatacaaggtgcaggcagccctcccgccttcttcaaagaggcatctgctccggctcactccaccctcctcccccagtggcctaactagtcgccgggttccaaccctatcccttctccagaggtcatctggccccacccagcagcccaaaccagtagaccggccctgccccatcactttggtttctccagcatccaaagaacgtggagggtcacccccccaaaacagctgtcaaggtccaacaattaagccatctgttgccgctccctgggactgggagaggtgaggtcgagtttcttggcgagtttcctgcgtgcagcccccacaccacaaaagcccccggtgcgagccggagcccagcgcgagacggctggaagggcgcggggagggagccgctgcggggtgcaggcggggagaggggcggcggctcgaggcgcggccggcgggcggagggtacggaggcgccgggagagcgttctcggggcgcgctgccagggtgcaggaagccggagcgcgcgggagggagcggggagcgggatgccgatttcggctgggggcggggaggcccctgattggggcgcgggaggcgtgatgtcacgtccggcgggggaagccctgcctcgcgcaccctccgcccccgtccccgcccccacaggtggtgccaccgccctgggcgctgggcgtggggggccgccctcggggaccccggccgcggccccgcgctgcccggctccgccgcctcccgccggggatcgatagagtcgcgcggccaggcgggccctctgggtccctaagagccagaggagcgcccagtgcgccccggcccgcgcccccgcgccgcgccccgccccgccccgcccggtgctcccagtccctcccccacccctgcgctcccaccctgccccgcccctctcctctcccgcggccgcctaggggccgggccggcggcgggggaggcgccgagccgggactgcgctagcccgccgcgctctgggctgcccgagcgagcgttcggacctcgcaccccgcgcgccccgcgccgccgccgccgccggcttttgttgtctccgcctcctcggccgccgccgcctctggaccgcgagccgcgcgcgccgggaccttggctctgcccttcgcgggcgggaactgcgcaggacccggccaggatccgagagaggcgcgggcgggtggcc

SEQ ID NO: 25828 - DNA, 2300 bp, Homo sapien
tgaacccgggtgctcttagaacacggggaaacccggcttgtggagcgtttcccatgactgtctggttaacacatcagacggaaggggtctttgtagacctgttttacaaatgagtaaaccgaagcctggtgaagcgctcctcttagggccagatctggctacagcattgaccactgcccagtaaagccaggccaggctgcttgtcccaggctctgcacttcttggaaggctcgtgcttttcccagcccgctctcctgtcctgggcctgggctccatctcttaggctcatttagaacgtttaaccgggactcctcctggcctccctgcctccggtcctgcccagctcctcctggcctccctgcctccggtcctgcccagctcctcctggcctccctgcctccggtcctgcccagctcctcctggcctccctgcctccggtcctgcccagctcctcctggcctccctgcctccggtcctgcccagctcctcctggcctccctgcctccggtcctgcccagctcctcctggcctccctgcctccggtcctgcccagctcctcctggcctccctgcctccggtcttgcccagctcctcctggccgtgccgcccagagagtcgtacttccacacagctgggcctcaccctccggcctggctccactgcctgtggggggcaggactgctaggagggctgttcccagcgtgtgccacgaagccctgcatgtccccaacagggcagaccagccacccacactgggccaagtgccccaggattagtggacaggtaccctattcaggtgcccacaggtgccaagccagggagataaggcagtccagtctgttggggcttgtaccttcacaccagcaatctctagggacagtgtgagcctgtggttaacgcgccttcccaggtaccgaggacgcctccctacagcaggacggggggcatacctacctggtggccgaaccgcagggctgcacatcagacctcggaggagagcttagtgggtgtctgagcatgcccatgtctgttctatggcatccatgtgcatggcacaggtgtcagccatgggctggcactagacaggagacgagccaggggaggggctcacccgaagccacactggtcaggtctggcctggggccccacatctgccgtgcccgggccagtgagaggctggacgccttttcttaagccagaccgtcctcacagggcctggctcagttatttcagatcaagactggacccgtggtggaggctggggtgggcactcctacatgcggggcctctgcccagccctggccctgtccagtgtcgacgtgcccagagccctgagccggcctggatcttgccagtcgccagcacagccctgtggggcccgggatcttgcccactttacgtgggggctccagacaggagccgcctgcccggagcctgggctcctcgctgccgtgcctgtggtggcttttctttgtctgggaacaggcctgggcaggtgccctgagccgcttgaagtctcctgacggggtggggggtgcagtgtagggtgttgaggcttgggccagggaagcgggcggttctccctccacctccaggccccacacccaggcgggagcacgcagcagccaggtgttgggtgagggctatgctgaggagcagggcccagagctgcagcctccttggctgcccttggcccgccgtgggtggcggggaagtacaggtgtgaggggcataccccactgccccaggctcggtagcagtctggaatccgggtgggtttaggagcccctgagagggccaggccagcctcacaccatcccctctcctgcctgtggcctcagctccatctcccgccagctcctgctgacccacctttctggcacacctgtcccctccctccacggtgtcctccctgtgcccacccacagcacccgcctcctccggcctttccccacagcttgacttcccgggcatcggccaacacgtaccctccctgttgccggggcccccgcctgggcaggcctgagctccacacagggtggggaaggccccgagtccctcccggtaccgggtggggctgggtgccggggttgggagcacaagtgtttccagggctgtcggaacagtgccacaggctgagcagctgcagctgcagacatgggtcgtccgtggttctagagcctggaagcctgagatcaagtgtgcgtccaccaggctggccccttctgaggcgtgaggaagtctgctccacactgccagcttccaggtgttccttggctggtaaatcccaccttggcctc

SEQ ID NO: 25829 - DNA, 2300 bp, Homo sapien
gcagtgggtcgtgttcgctccagtgccaacactgggcagattccccccgacatcatttagacgtgtgcctttattcagtaccagggtaccagggccggcctgggtgccaggtagggaggcaggagcaagaaagtggaggctcccctggcagaggttccctctggaaggagcatggcttgttgggactggaggccagaggctggggaggcttcctgagggaggtgaggggaaagcatgtgagatggagggaagtggcaggtcacagctgggtggggtgactgggtggagtgactgggtggtgggggtgggcgcagggagagccaggcctgggaccaccatgaccacagagatggcttctcgggaagtggttgggtcggaggtgagcggccgagttcctttgctccctccccttctgttccttccccagtgtttatgagccatccctcttggcgggctccctccagaggcacccaagggtttgctctgggatccggcccagcctcagctgtatgtgtgtctctgcctggttggcattcacggggcagatggacgggcctgcgcggcgtctttgtggactggaatgtggctgctgcgtccccttctgcgtttctagcgtgccccctgtgggtgtagcagacagggagggccagtccatcttccaggcctccttgggtgcctgtggcccctgcagtgggtgtacgggaagctagatgggagagctgggcagagccccaggaggacaaccccaccctcccacagcctgcctgaatttccaccctgctggcagggttgggcatagagatgtgagtgccctcttcagctccaccaagccaaggaggagaaaggctgagccaggcctgggggcacggcctctggggagcacctcatcctgggttcgaagagtgggctctgccttacagccaagacaccgggtcctgggtgtggcaggaggttcgtgacacaaattctgaatcccctttcatccccagtctgaggccacagcatgagcctcagacagtggagcaggctggcatggggggaggcctgcacagggcacgcggcttcttggcccgagctgtgactaggctcccatctgatggacccctgccgtcgtgccatgccagggccggcaccgcccagacctggcgtctgccggcaggatggcctgctcaggggttccccaagcaggatctgggcagcttagagagcagtcttatgagttgcctggtgaaagccccgtctttgggggtctccggtgttgtggcctgccttggtggtctgtccagcagctctcagtgtgcccattgcagaccggccgagaggccggagtgcggccagaggggaactggtgtgagtgggtggttttgtctggctgggtcagcaggcctggggaaggtggggagctgggccgggacagtgggagccacgcaggacctgggctgcagggaggggagggtgttggcgggaggctgtccctctggtgtccaaggaggggccagaggcgcacagcatagacctcccaggctgggggcacctgggtgggagacttggtggaaggatgtggcctgttgggtttggtatgtcagagggaaagcaggtcaggatataggggcaggggggtctggagtcaaggcccgggtgccattggactgggggctggagggggcaggtagaggatgtggaatgaccatggcagctttgcgtgaggacagcggtggtcagctgccaccttcagcacagagagaaacccgacaccccgcccccattaccctccggggaggggccccggctcccccgagcgccggccctgctgagacccaggagcccctgcaccaaggcctgggcccgcttagctgcagtggggagcctaggaggcccggactgcccgcggagaacaggagcagcacccgcaggcgggagggaggggcccggcctcggcggcgggcaggaaggcgggcgcagggcggcggggacctggccggaggggccggggcggccgcctgcggtttccagggagacgggggcggtgccgagcgcggcggggcgggggctgcgggaggacgctcgtccccgcgccgggagccaccgccctcggccgtgcgcgccagtgcggctgcggcgctgcccggggtggctgcggccagagtctcccgcgcgcccggcggaccgcagcccgccctcgtcccccgctggcttttcgcctcctgcgagcccttccgcccggccccgctccgccgcctttccccggcccgagcacctgcacccagagcccgcgcgccgcccggagccgctggagccgc

SEQ ID NO: 25830 - DNA, 2300 bp, Homo sapien
ggaacaacgcaggtcgccgggccggctgggcgagttggccgggcggggctgaggggtcggcgggggaggctgaggcgcgggggccggtgcgcggccgtgagggggtgtgagaggtggctgacggcgccgaggagcccctcagaacctgcaggtggggggagctcccatatcttacgggtgtttcgggcctcacctctccatgcctctcgtcagcctctcccgtctgcgtggtgggggctggggagtgggtccgccgggacctcgcgagggaggggcacaggaggagccggcgggggacgccacccaccctcctccctaggagtgcttgagccctagtcctgagtcttggaccagctcactcggttcctgtggcccagccagcctggcctgggtgccccgtcacagctgagcccatctcagctgagcccagggtgtgtcaccgggaagctcagctggcacctgccaccccctcccccaggcacgtttccctcccactgcccagcccattaccatcatgtgtccggctgacctgtgctctcctggtctgggcagcctggatgggtgcacagggccccatcacagcccacaccctcggagagacgcctcctgagtctgctcagcctggcacaggccccaggaaaggacccggaggggcggttcctgctctaaatcctgcccccacgggggtgggactggggcagaatcccatcagtgaataaaggctgcagagtgaaggatggtccctggcgagtgtacctgtgtcccagtcttcttgcctgagggcgccttcccacccatgtgaggagtggggaaggagcaccccttctctactaggccccagggctctcagagccgggctctgtcctcaccccagctggctcccacaaggccctcctggccccagactctgttggacccccaactccccctccagcaggcatctggaggtaaggaggggcggggggcgcaggtgcacttgccattcccgctctgtctgcagcatgggcacatgtaagtccaggccctggggaatccctggacctgcagcccctgcggaggactccctccccctctagctcaagccagagccccctgcatcagtacattccagaactcagacaggaaaagagggcaaggagggagcgctccaggataagaacccctacctcggccctccctcgctctcccaggcccctctgacaacctgtctccttgctgtcatgtcagcaggcacagaggctacaggggccaagcggcagccgcccaagcccggattcgggttctctgttcccttctcttgtctcgggctcctccctgagtgtgtgtacttagagggtgcggaagatcagcaaactcagtctgacccaggcattcaacctctgggtagttacctagtcctgggtccccaccccagatggcctctagtgggtaagggcttcctggaccccaggcctgaggggtgacttctcttgcagtaagcgggtagggcactgcctgcgctgctccaggccctgcctgcagtggggctacagatccctgctcccacctccaggcagggctggagctgctgccagctcccccaggacagcctcgagccaggtgcctctgcccgggctgaccccgccctcggtcccggtcctggctccctctcctgcctctcctccctggcctggccttcacttcctgctgaccctcaggagggcgtaaaagaatgcaggacctgctgcattccagccaccctggcccagggtcccagaacaggatgagacaggcccctgaggcggcagtcctgaggaaagttgctggaattcctgctgacaacgcccccccttgaccccacccctctgaccaagccaggctcctgcttccacctctccactgtgcctgacctaggccagcaccaggagggccttagaggcgggggacgaggcccagaaggaacagtgtggccccgtcagtgtggagtcctgagcttaggcagccggaaccacttgccccctcactgtatagctgggacgagacctcatccctgtaagccccggttttctggttaataaaatgaggattgcggcagccttcatcacagtgcgatgcacaccctttaaaaaatgcagtttttcctgatgccacacacccattccaggtgggccctgaggtgtgcacagcagggctgagagctgactcaaagcctgtcctgtccccactccccacaaggaggtgaagctgtctctgatggcagtgccgctgtcactgcctcggacgctggagcagagtagctcatggcaggctgcagaggaggg

SEQ ID NO: 25831 - DNA, 2300 bp, Homo sapien
gcctctacagggcaggaggccccttgggcaagtcctgccccccagcctgctgtcccagcagctgcaagcaaagaactggcctcaggttcctgtgtgcaagtgtggagaaggctcccaggcccgaaaggcaccccttgcctgggcccatgtctgaggatggggaaggaggaaggaatccaatccccctctcttcccacaccagccctggggggcaccaagctcccactgcaaggacggcagatcccaccaacagtgggctggtcagaggcagtggccctgcaggaccccaggcacgagtctggtatgggggcaggtgtgctctggtgcagctggcaggccccatgaaagggtcattggaccatgccccaagccctgcagggtgcaccctgtgcctcctggtgtccttgtggagtcccctcctctgcagcctgccatgagctactctgctccagcgtccgaggcagtgacagcggcactgccatcagagacagcttcacctccttgtggggagtggggacaggacaggctttgagtcagctctcagccctgctgtgcacacctcagggcccacctggaatgggtgtgtggcatcaggaaaaactgcattttttaaagggtgtgcatcgcactgtgatgaaggctgccgcaatcctcattttattaaccagaaaaccggggcttacagggatgaggtctcgtcccagctatacagtgagggggcaagtggttccggctgcctaagctcaggactccacactgacggggccacactgttccttctgggcctcgtcccccgcctctaaggccctcctggtgctggcctaggtcaggcacagtggagaggtggaagcaggagcctggcttggtcagaggggtggggtcaagggggggcgttgtcagcaggaattccagcaactttcctcaggactgccgcctcaggggcctgtctcatcctgttctgggaccctgggccagggtggctggaatgcagcaggtcctgcattcttttacgccctcctgagggtcagcaggaagtgaaggccaggccagggaggagaggcaggagagggagccaggaccgggaccgagggcggggtcagcccgggcagaggcacctggctcgaggctgtcctgggggagctggcagcagctccagccctgcctggaggtgggagcagggatctgtagccccactgcaggcagggcctggagcagcgcaggcagtgccctacccgcttactgcaagagaagtcacccctcaggcctggggtccaggaagcccttacccactagaggccatctggggtggggacccaggactaggtaactacccagaggttgaatgcctgggtcagactgagtttgctgatcttccgcaccctctaagtacacacactcagggaggagcccgagacaagagaagggaacagagaacccgaatccgggcttgggcggctgccgcttggcccctgtagcctctgtgcctgctgacatgacagcaaggagacaggttgtcagaggggcctgggagagcgagggagggccgaggtaggggttcttatcctggagcgctccctccttgccctcttttcctgtctgagttctggaatgtactgatgcagggggctctggcttgagctagagggggagggagtcctccgcaggggctgcaggtccagggattccccagggcctggacttacatgtgcccatgctgcagacagagcgggaatggcaagtgcacctgcgccccccgcccctccttacctccagatgcctgctggagggggagttgggggtccaacagagtctggggccaggagggccttgtgggagccagctggggtgaggacagagcccggctctgagagccctggggcctagtagagaaggggtgctccttccccactcctcacatgggtgggaaggcgccctcaggcaagaagactgggacacaggtacactcgccagggaccatccttcactctgcagcctttattcactgatgggattctgccccagtcccacccccgtgggggcaggatttagagcaggaaccgcccctccgggtcctttcctggggcctgtgccaggctgagcagactcaggaggcgtctctccgagggtgtgggctgtgatggggccctgtgcacccatccaggctgcccagaccaggagagcacaggtcagccggacacatgatggtaatgggctgggcagtgggagggaaacgtgcctgggggagggggtggcaggtgccagctgagcttcccggtgacacaccctgggctcagctgaga

SEQ ID NO: 25832 - DNA, 2300 bp, Homo sapien
agagggaagaagccgtccgctgggaaaggcacttcttaagaaaaaaaatataaaatcagattccccttcgaagattttttctcagctaaatattttgcggctggatctgttgagctaaagataaaacctcagcaccaaaaccctttgcctctcctgcctgcgtccttgtgatgctgagcgtgggttgaaaggaggcccgcctcctcctgaatataagtctcccctttccaaggggccttcaggatgcgcttccccttagtttgcttcaacactgggaaaaaaatcacacggatcgtgaagtactctaaaaactagctcggtgtccaaatcctgtctggggacatgggtgaaagagcgggctgtgggaccccccactgcggcgcgccgtcatcactcacagcccaggtggtcgcctgcaagagcccacccctctcttccgcgcctaggtggagcgaggagcttcccggccagtgcccgggagtctgctgcgctcgtcccggcgcccgcccgccgcggctcctacctgcggcggaaagcagatgtcggtcctcgccccgtgctccagcagcagcctcaccccatccacgtccccggccttcacagcaaggaacaggacctgcatgggcacgcagcacaggttggggtccgcgccccggcgcagcagcagcttgatggtccgccagcgcttcctccgcctgaaaaagacggtgcgcccgtgggcccctggagggcaggcacctgcactgcgcccagaacggggccatgccagcgaggaggctggggaggggcgcgtagggagtatgtgtgtgccgcaactacacaatcacacacacagcacacacccacacacgcagacacaccacacagcacacaactacacacaagccacaccagagcgcacacacacggcacacacagcacaccacacagcacactcacaaccacacccacagcacaccacacagtacacacagcacacaaccccacacacaagccacaccagagcgcacacaccatagcacagcgcacaccacacagtacgcacacggcacaccacacaccagagcacacaaaccacactacacatacagcacacaaccacacaaaccacacacacaccacacacaccactcacaccacaaagacacaaacacacaggcgcacacacacctctgaggggtcactgaaaggctggccaggtcaggagtaaactgtgcctccagagaaaacttgggcctcaagagaggctgggaccaggtgggtgggggttgtgcagccgcgcagggctgagggaggaggggactgggggtagggggcccagatggcagcgggaatgaccatgagggcagggcaggtgtaggatcgagccaagcccactggccctgcagtaggcacagaatcggagccgcgggaactagatcgtccttgagcacttgagcagcagcctccagcccagtctccagacccgtctccagaccctgaccactcggaagcccagggagctgcgttgacgtgggtgctggctctccttgtctgccgctaccatgtaaagctcaaaaactgtcaaaacatgtccaggatctatgcctttctggtgggttgttggtctcgctgacttcaagaatgaagtcgcggaactcgcggtgttacagcttttttttttttttttttttttttttttgagacagtctcgccctgtcgcccaggctggagtgcagtggcgcgatgccactcactgcaagctccgcctcccaggttcaagttattctcctgcctcagcctcccaagtagccgggactacaggcacccgccaccacgcctggctaattttttgtatttttagtagagacggggtttcaccgtgttagccaggatggtctccatctcctgacctcgtgatccacctgcctcggcctcccaaagtgctgggattacaggagtgagccactgcgcctggcccccctttacagctcttaaacatggtgtgtctggaatttcttccttccggtgagttcatggtctcactgacttcaagaatgaagctgtggaccttcactggcaagtgttaacatctcttaaaggtgatgcggaccaaaaagtgagcagcagcaagatttattgtgaagactgaaagaacaaagcttccacagcacagaaaggaaactaagcaggttgtcgctgcaggctggtggggagcctggcggtggccagcttttattcccttttttggccccgcccacatcctgctgactggtccattttacagaccactgattggtccattttacagaacgctgatt

SEQ ID NO: 25833 - DNA, 2300 bp, Homo sapien
cacccactgctgccccagcctgttggggtgtttgggctgggttccctaattgaacccagacctggtacctctgacacgctttcaccatgagacttccatcatgtcctcacctcagaggccactgagacctccctggctgcccccttgcccctccatgcactctctggagtgccctccttcctgttcctcgggagagctggtccgcctcggtccctgggcggcacagcctaagcctccagagatgtttactggctgaatgcatgcatttcttgggaaagttttcttttttgggatttcttttgacgttacaaacatgatcacatgtgcagctgggtcgcgttatctctcctcggtctattgcgcttccttggcaggggctatacaaagcggaccagcggtttgggccaggtgtcgagacctaccccgatggcagccaggacgtggggctgtggttccgagagcagctcatcaagctgtgcacccagatccccagtggcttctccctcctcagataccctgagttctccagcttcatcacccacagccctgccaggatcagcctctcagaagaggagaaaacggagtggggactgcaggagggacaggatccctttttctatgactataagcggtttcttctgaatgacaacctaacgctgcctccagaaatgtatgtctactcgaccaacagtgaccacctgcccatgacaagctctttccgcaaagagctggacgcccgcatcttcctcaatgaaattcctccgttcgttgaggatggagaaccatggttcataatcaatgagacccctttgttggtcaaaatccagaagcaaacttacaagttcaggtgactagtctgctactgctcctcccctagggccgtgcactgtgcaggctgccctaggcaggttcctgaggtccccggccagctgccactgacagtgctccctcagggtgacctaaacacactcctcccattaagtgactgatgtgggcgataatgaagggagggaaagcccctgctgactcgagctgggaggcaggccgggtcctggggccctggacgtctgtgcaggggaatgagggtctcaggatcccacctgcccactcttggggacaggagtgatcagaaggtggtttggtgaacatgcagccaggggagtcccgaggctggtgtagaacctggtggggggatgtggctggggagaatctcctgagcccgtggagctaatggtgagtcctggccctgggccctgtgcgtttccccttgtgcaggccatagctagtgccctgcccccaccgttgcatcagcgcctaggtgttctatgggccaagtctcctctcggttgacatggagagcagggtttgttgttactgttatatggtggtaagggatctgcatgagagctaagggtgggagcacagggcagtagtggtgttggggcccaggcaggcctttgacttgtccaaggatggcgtgaaaagatgctctgctctgttggtcttccaaaaaccctcctaccctacccagagctccagaaaagtcagccactacctaaggagaagtgtttaatttttttggggggggggtgggggcaggcacagagtctcactctgtcaccgaggctggagtgccgtggcgtgatcttggctcactgcaacctccgcctcctgggttcaagcagttctttgcctcagcctcccgagtagctgggattacaggtgcctgccaccacgcccagctaatttttgtatttttagtagagacggggtttcaccatattggccaggctggtcttgaactcctgacctcatgatccacccgcctcagcctcccaaagttttgggattataggcgtgagccaccgtgcccggttgaagtgtttaatttttaaaagttaaaatattcaagaacactttaattcctttcctaaatattgacctcagatgtcactaaactgtttcagaatgcatattttctgagaataagtggctgctttttcattcatcaatccatccacccacccaatcacccacccacctaccatccattcatccatcagcacacccatgcaacatccattctttcaggcatctgttcatctacccacacacctacctattcatctacccatccagccatccattcatccatcaattcatgcatgcaatatccattcatgcagccatccattcatctacctacccacctacccatttgtccacccacccacccgtccagtcattcatcagtccacccacttaacatccatttatccagccatccactcatctaccca

SEQ ID NO: 25834 - DNA, 2300 bp, Homo sapien
tgggcgatagtgggtgcgggcctggcctggccacgtggccgcgaccgcccttgctgtgattcccgcccacgaagggacagggacacctggggacgcgggtgaagtttacccatggttccgacaggtctccctgaggactcccagggatggtggtccgggacctgtgggtggcggcccaggctccggcgcggttcagggaggggcttgggttctctgaggctcaggggccgcgggccgggcctcgggcgccctctgagttcgcggcgggagccctgggggcacatgtgcggtcctgacgtcgcttgcaggttggaagaccacagacatggaaggggcccatgcctcccttagcttagaggacgaagtctctggggctggcagccgccaacgcccgctagaggggaagggcggcgagacccctgctgccgaggagccggggtccctgaagaactacgctgtcttcgccacaaggtgcgggggaccctccagcggggaggtccgaccctgacctggggcccagggttagccgggattctccttaaggcaagcagtaaaaatccctgaactgtgttactccctgagaaactagtttctggagaaatctgaaagcctcaacactgtgtcagcaacctactgaggaaaacgacaatagatggtaattggaaccttctcatgtcccttcctgcctgcacactctgccacccgtgtcgccgcctagtggagggagggaacgtttccctcacgagatggggctcccaagctgtctccatcttcacagctctgttgttcacagccaggggctgccctggagtctcactgcagcatctcacgaggtccccctgtcaccccatcgtgcttgtccctgtttgtgggcctccaaaactcagtcccagccctggcccagtgtgatgggtgttggggaccagcctcaacaccacccgtagagtgcccaaagtctagtggggacaaaggattgagaagagacaggttaagaattgaaaggtggggagccagggggccagttgcaaaatggaggctgcaaagggctcagagttctggtctccacactgtttattgagcacacttagatctgagaagcagatgttcagggcgaaacagtgaaagggtggcagtgtgtcataggtgtaatctatagcaatattggtttcagtgaatctcctttgtgctcaaacagcatatcttttaacttatcggagagtaactggtgggagcgggcttagctaggagcctgcatgtctgtccacagtccagggcttcaaaggagagtctttctccttgaacacagtgtttacagataagagagcggatctcgctctgggcatgggaacatgatggcaattaggaggctttcctcctcagaggcctcttgtggctttccacaacttattgtcccatattttcatggcctgtttatgcaggcaccccacaagcccttttcccacaagcccttttcccaacaatgggctttgggaggtggctgggtttagatggggtggtgaagatggagcccatgatgggatgagtgtacctatgagaagcagaagagcccagagttcccccatcctctctcactaccatgtggggagccaatgagaaggcggctccacaggccaggaagaggaccctccctaggcagggacgctgctggcaccttggccagggacggccgccctgcacagctgagaacggaaggccctttgagacgccccatccatctgtgggggtctcagatgctctgtccgtctgggggggaactgagatgccctgtccatctttcatggtctgaggcaccccatccacctgtgttggtctgggatgccctgtccttctgtaggggtctgagacaccccatccatctgtggaggtctgaggcaccacgccttttgtggtctgagatgccacgtccgtctgtgatggtctaagacgccccatccgtctgtggtggtctgagacgccctgtccatctgtggggggtctgacatgccctgtctgtctgtggacgccctatgagttacggcaaatccaccctggtttgtgctccccgctgttgcagcatactccccagccctgcatccatccatctgtccacctatccacctgtccatcctagtatgagctggctgcctctcgagctgccttccgaccttccatgggtccacatgtgtgggcagtctgttttctgtccagcttggggctggcactcctggcccttgaatgaggaccctgctgtgggcacccacgtcctgcaggcagctggagtgggacagagggccatcgat

SEQ ID NO: 25835 - DNA, 2300 bp, Homo sapien
ccctgcctagggagggtcctcttcctggcctgtggagccgccttctcattggctccccacatggtagtgagagaggatgggggaactctgggctcttctgcttctcataggtacactcatcccatcatgggctccatcttcaccaccccatctaaacccagccacctcccaaagcccattgttgggaaaagggcttgtgggaaaagggcttgtggggtgcctgcataaacaggccatgaaaatatgggacaataagttgtggaaagccacaagaggcctctgaggaggaaagcctcctaattgccatcatgttcccatgcccagagcgagatccgctctcttatctgtaaacactgtgttcaaggagaaagactctcctttgaagccctggactgtggacagacatgcaggctcctagctaagcccgctcccaccagttactctccgataagttaaaagatatgctgtttgagcacaaaggagattcactgaaaccaatattgctatagattacacctatgacacactgccaccctttcactgtttcgccctgaacatctgcttctcagatctaagtgtgctcaataaacagtgtggagaccagaactctgagccctttgcagcctccattttgcaactggccccctggctccccacctttcaattcttaacctgtctcttctcaatcctttgtccccactagactttgggcactctacgggtggtgttgaggctggtccccaacacccatcacactgggccagggctgggactgagttttggaggcccacaaacagggacaagcacgatggggtgacagggggacctcgtgagatgctgcagtgagactccagggcagcccctggctgtgaacaacagagctgtgaagatggagacagcttgggagccccatctcgtgagggaaacgttccctccctccactaggcggcgacacgggtggcagagtgtgcaggcaggaagggacatgagaaggttccaattaccatctattgtcgttttcctcagtaggttgctgacacagtgttgaggctttcagatttctccagaaactagtttctcagggagtaacacagttcagggatttttactgcttgccttaaggagaatcccggctaaccctgggccccaggtcagggtcggacctccccgctggagggtcccccgcaccttgtggcgaagacagcgtagttcttcagggaccccggctcctcggcagcaggggtctcgccgcccttcccctctagcgggcgttggcggctgccagccccagagacttcgtcctctaagctaagggaggcatgggccccttccatgtctgtggtcttccaacctgcaagcgacgtcaggaccgcacatgtgcccccagggctcccgccgcgaactcagagggcgcccgaggcccggcccgcggcccctgagcctcagagaacccaagcccctccctgaaccgcgccggagcctgggccgccacccacaggtcccggaccaccatccctgggagtcctcagggagacctgtcggaaccatgggtaaacttcacccgcgtccccaggtgtccctgtcccttcgtgggcgggaatcacagcaagggcggtcgcggccacgtggccaggccaggcccgcacccactatcgcccaggaggcgccgctaacagcgggtctcagccacgggcctctgaagccagcgctcgagggtgggctcgggagacgccgcgcccacctaaccccacgcccccagcccctcggcccctccctggggtggggaccgcgagcctggcgcccccccgcacccgccgccccacggagctccgggatccccctagccccggctcccagcgctcctgtcgcgagaccgcaccaagcaagactcgaagagctcgcgccggacagcagggagaccgacgggactgcagccaccgcggacgcccgcgctcccgtcccgactgcttgccagccctgcgcctacggagagcgtcgcgtttccctggagacagccccgccccatgcccgctgccactctccggctccgccaatccccccgccaggacgcacccggccccgcctccgggcgtgcccgccctctgtgacttcaggggcttggggccgacaccccgcgggcctcggtgccagcctcccgcttacccggtcagcccctgggccgagtacccctgggagagaaagcgctaaattcccccaacactcccgtgatgggggcacagggagcgccgtgggacacctgaggaaactgaggcccaagtgttaattaacttgccctgatc

SEQ ID NO: 25836 - DNA, 2300 bp, Homo sapien
ctatgtattataacacatggctcataaaataaaactaatttctattttcatcacttcttcatagaccacactattccttttgctgtttctaagtaatttattggggtcagcattgtaactttaaaaaatttaatatcacttaatgtccatgaaattgccatttaagactccttcaatttttctgacatctggtaattttcaggcaatggatacactgaaaagcaactgtctcaacagccctacagacatttagcaattgaagtttcagttgcatacagtctctctctgggttatcgtcattgctttgtccatcagccttctagcattggtaactgtcagatctttattgcagcctggggttcactcttgagctaaagactcaaatatgtctgcagccaggtcttccctggttgcagctccagacatcacctccgtggaggtcttatcagcatctgtttcccacttcctccaccctaaggaaggactccaactttcctaggatggaggagtggaattccctttttttccctggcgttcatgggagccattgattaggttgggacactgtctccctccgctttctaggagttggctctgtctctggccaaaagtgaaggccacactcccgtgactgctctgggaatgagcttggtgtctaataacccatgaaggagagagcactttggaaggctcctctgttctctcatggccataaggggaagccagccttgggtgaaagcagaggagatgggagagccaaggtccttgatgccactgttgggccactgaaatgaatcaaacaaaacctgaagtccctcctcctcctggactgtttcatgaatcatcatcaccctttacggttggaggatggttgaggtgggttttctgctccaaagcctgctacttgaaccatcatgctcccactccattgaggtaatggattgggaaccaattcatcctaagtgtctctgcatctcattgccacacttagtctgggccagcctctgtctcctggacttggtgctagtcccccacagtgtaaccagaatgtgcttgctaagaacagagggtttctacatgttggttctgactccttagcaagttgtaattcacaactaatgtgggttgtgaaatcaattctgtgggtcatgatcagcattttagtttttagagaaataatagactacatgaaaatattagagtgcatgcatgtagtatgccgaacttttaatgaaacatttttctgagtggtttgtactgggtcgtggtgtaaaatgagattttagagagaagtgaactcaacagacaggcactggcgtgtggaggcagagcccctagaaccccagaatcctggcccagccttagtccttagtccccggaaagctagccagtggggagggccagggcatcagctcttcacaccccctgccctgttctcagaggcagtctgggttgagaaaacgcaagccctgcacctccaagagcctctcccctctttgcaggaaggcccagctgtttcccaccatggtgcctctgtacatcccagtccagttcctgaaatgcgctctgtagcctggagagctcctgcgcatcctgtgaagccccatcaagaatccgctctcctgcagtccttccccgaggccctcggagggtccaagacagccaatccctcttctctgcggtgactcttgcggcctccctcatctcgttccctccgcaggcctcgagttacccttgcgccttccacatttactgaatgaacaaaggccggggctggaatcaggcagggcttgagcaagtcgtggctccacgtgctaggtgatcagggcaagttaattaacacttgggcctcagtttcctcaggtgtcccacggcgctccctgtgcccccatcacgggagtgttgggggaatttagcgctttctctcccaggggtactcggcccaggggctgaccgggtaagcgggaggctggcaccgaggcccgcggggtgtcggccccaagcccctgaagtcacagagggcgggcacgcccggaggcggggccgggtgcgtcctggcggggggattggcggagccggagagtggcagcgggcatggggcggggctgtctccagggaaacgcgacgctctccgtaggcgcagggctggcaagcagtcgggacgggagcgcgggcgtccgcggtggctgcagtcccgtcggtctccctgctgtccggcgcgagctcttcgagtcttgcttggtgcggtctcgcgacaggagcgctgggagccggggctagggggatcccggagctccgtg

SEQ ID NO: 25837 - DNA, 2300 bp, Homo sapien
agcgctaaattcccccaacactcccgtgatgggggcacagggagcgccgtgggacacctgaggaaactgaggcccaagtgttaattaacttgccctgatcacctagcacgtggagccacgacttgctcaagccctgcctgattccagccccggcctttgttcattcagtaaatgtggaaggcgcaagggtaactcgaggcctgcggagggaacgagatgagggaggccgcaagagtcaccgcagagaagagggattggctgtcttggaccctccgagggcctcggggaaggactgcaggagagcggattcttgatggggcttcacaggatgcgcaggagctctccaggctacagagcgcatttcaggaactggactgggatgtacagaggcaccatggtgggaaacagctgggccttcctgcaaagaggggagaggctcttggaggtgcagggcttgcgttttctcaacccagactgcctctgagaacagggcagggggtgtgaagagctgatgccctggccctccccactggctagctttccggggactaaggactaaggctgggccaggattctggggttctaggggctctgcctccacacgccagtgcctgtctgttgagttcacttctctctaaaatctcattttacaccacgacccagtacaaaccactcagaaaaatgtttcattaaaagttcggcatactacatgcatgcactctaatattttcatgtagtctattatttctctaaaaactaaaatgctgatcatgacccacagaattgatttcacaacccacattagttgtgaattacaacttgctaaggagtcagaaccaacatgtagaaaccctctgttcttagcaagcacattctggttacactgtgggggactagcaccaagtccaggagacagaggctggcccagactaagtgtggcaatgagatgcagagacacttaggatgaattggttcccaatccattacctcaatggagtgggagcatgatggttcaagtagcaggctttggagcagaaaacccacctcaaccatcctccaaccgtaaagggtgatgatgattcatgaaacagtccaggaggaggagggacttcaggttttgtttgattcatttcagtggcccaacagtggcatcaaggaccttggctctcccatctcctctgctttcacccaaggctggcttccccttatggccatgagagaacagaggagccttccaaagtgctctctccttcatgggttattagacaccaagctcattcccagagcagtcacgggagtgtggccttcacttttggccagagacagagccaactcctagaaagcggagggagacagtgtcccaacctaatcaatggctcccatgaacgccagggaaaaaaagggaattccactcctccatcctaggaaagttggagtccttccttagggtggaggaagtgggaaacagatgctgataagacctccacggaggtgatgtctggagctgcaaccagggaagacctggctgcagacatatttgagtctttagctcaagagtgaaccccaggctgcaataaagatctgacagttaccaatgctagaaggctgatggacaaagcaatgacgataacccagagagagactgtatgcaactgaaacttcaattgctaaatgtctgtagggctgttgagacagttgcttttcagtgtatccattgcctgaaaattaccagatgtcagaaaaattgaaggagtcttaaatggcaatttcatggacattaagtgatattaaattttttaaagttacaatgctgaccccaataaattacttagaaacagcaaaaggaatagtgtggtctatgaagaagtgatgaaaatagaaattagttttattttatgagccatgtgttataatacatagaaaaaaatgcaccaattacaaagcgggccacaaaaaggaataaacgtaaagccgacaacgcagtcactagggaaagggtgaagacacgggaaccacgcagcccgccgtccacgtgcaccgggtagccacggggccctagccgaacgacgcggacgcgaagtgggcgggcccggccaagccacgcctccgcgccagacgccgcagtagagcgggcagggcgctgcgcccaagagccacagacgcaagcccagtgccacaggccgcgggggcggggaggacggcgcccggggacagagaacatgggacgcagagcggtccaaggccccggcgccctggtgaggcccaaacctcccgccatgccccggccccaacgagaccca

SEQ ID NO: 25838 - DNA, 2300 bp, Homo sapien
gggtcttgttaagagatacacagcttagaaatgctcagtggattggccgggcgaggtggctcacgcctgtaatcccagcgctttgggaggccgaggcgggaggatcatgaggtcaggagattgagaccatcctggctaacacagtgaaaccccgtctctaccaaaaatacaaagaaattagctaggcgtggtggcgggcgcctgtaatcccagccactcaggaggctgaaggacgagaatggcatgaagccgggaggcggagcttgcagtgagccaagatggcgcccactccagcctgggcaccagagtgagactccgtctcaagaaaaaaaaaaaagaaatgctcagtggatcactggcatagttgtttacactggctttgaaaccaaattcctgcagaattctgtcaaatcacctcaagagatcagagattaagaaagtgacaatgggcgggtctccctttggttcctgctgctctggtcatgtctgtagtgagctgcgtgggagccgtgctatggaataaaaagtatggtgacatttggtacctgaaagaggattccagctcacagcattgtgtttgacatactggtgttcatcatcttataacagtacctcatccccattagtctgctggtcactatggaaattgtgaaatatattcaggcccagtttataaactgggatcaagatgtgcattataaagtaaatagtgtccacaccatggccagcacattcaatctcagtgaagaacttgggcaggtaaaatttctattttctgataaaatgggaaccctcacttgcaatgttaagacatttaacaagtaccactgcaggtgtcatttatggtgcaacaccttccatccgagccctgatattttaattaccccagtttattggagaacattgagaatggccatcccacagaaaactatatagaccaatttcttaccctgttatctgtgtgccacactgttatccctggaaatattataatctaccaggcttcctccccggatgaagcagctttagtgaaaggagcaaaaaaacttggctttgtttccctacaggaacaccatactctgtcaccgtagaagccatgggtgaaaaaatcacttttgaaattcttaatgtcctggagttctctagtaatagaaaaaggaggctgggcacggtggctcacgcctgtaatcccagcactttgggaggctgaggtgggtggatcacgaggtcaggagtttgagaccatcctggctaacatggtgaaaccccccatctctactaaaaatacaaaaaattagccgggtctggtgtcacacacctgtagtcccagctactcaggaggctgaggcaggagaatcacttgaaccagggaggcggaggttgcagtgagccgggattgcgccactgcactccagcctgggcaacagagactctgtctcaaacaaacaaacaaaaaaaaagaaagagagaaagaaaaaggatgtccgtaattgtccgaactcctatgggacagctccagctgtattgcagaggggctgatgaagagaataattccccaatcacccaagttgcccttcaacaatgtcttcatcaacagctttcttgatctaaatgtcccacgtgggtatgcattttctcaaacagaagcatccgtggtcacgcaggaagaactagtccgttcttatgacactactaaaaataaacacaagaagagttgcttttcctgatttcacctatgactcagattctgattactgtagtctgtactcatgtccttccctgagactggtagaatgcgccggcacccccaaacactcaagattctggagtgtaaataatggaggatccctatttgctttttcttaatttgtcttcgatgttttaccaaatgtatttctttttgtgtctgtaagataatttgtgcatcacctcagccggaaatataaaattaaaagcactatgtttcacacacacacacacaaaggaaaactcgatatgacagtgaggaagaagggtaaagaccagccttctgtatcagtgcagggacatccttcctccaggcagcaggccttcaagcttcaagcctcagggcccaaccctaaggctgggggctctccctgcaggcaggactgggcctggagggcctcctcatacttctggagctgagaccagaagcccgggttcggttctgctaccgggcgagcgctcttcaccatctgcaaacaagaagtgtactgaataaccccaagtcgcgctaatggccagcaggggccaaggcgggcccagctgtaagagtgggc

SEQ ID NO: 25839 - DNA, 2300 bp, Homo sapien
gcgcgagaggctcccgcggctcagttgcagaccccgccccctcggctcagccgcgcctcccgctccatggggtgcagtagggcagctcctcacatacgtgcgcggtgggaggcgctcccttgggcccccggggaggaggtgccacagcaactctggactcctgtgtgcagaactggccgcggagaggtgcccagggcgagaccccaacctctgctccctgagcccaatgcggggctctgggtggcaagaccccaagctccctgtggtgacttgccccccggacggccaggcccagctagtgtggcaccgcgtgtgcagaactgaggttcttccagccaggaacatggcccggtgggctctggagagccccgtagaactgggggtgccatcgaaaacagtctgcccttggcactgcagggccccaccgggcagggcgctgggggcagtgaggagggtcccatctcagctgtcttccctgtcagccttggatgcgaggctgatccacacctctgagtgactgtgtaagcctaggggttcctggtgagtttgggatgggtgccccaagatcgtggccgtgtccctaaagagggcacgtggggacctgaggtcctacgggaaaactgaaatgatgcctcagtgctctgtcccgcaaacgtgaacgcacactctccctctcagccttccttcccgccccacggaaggagggtagacacagagggttacacaacgaggagactgagtccagacacaggaaacactactcagggctgacgctgagtcgagtgcggtacccgagtccagccctgcacggccacacctcaatggagcagaagagagaggtgtcctgggttcctggatagttccccagccccagaagccccttgtccctaggaatttgaattcttacttgatgacaacagcgacatcatggtggcccctgttattccacagcctcaaaatttaaccgctgtgagctcactagcagcttctgccaggcgagcaccccttccctcggggctcaggctcctggacaggctcagccttgggcagccttcgccaggtccacagagaatggcgttgggaagggtggacctggcggatggggtggggacaggcgggccagaccctccttcgtaccccagcacagggctcccaaatgagaggtccccagcactgcccagaggaacttctgcgattgtggaaatgattcctgcctgctttgtccattagccactcctcccaggaagacacacacactcactcactccacctgccacgaaggaactgaacttctaactgtatttaattcgcatctaaatggccacacgtggttggtggctgctgtagttgacagcgctgcgtgaaggctccggcgcttctcgcaccgcagggcccacagcacagaccacacctgtagacttggaggagtggcaggggtgccaggagaatcctgccctgcccgtagccccggatgaaaggatgacattgagttcgcgacgctgcgctcctcgggaacacgaaccacacctggaagcagcctgcccctgtggccccaaggttcccgggtcccttcagcggctgccccaggggcctggccggcagtgtctgggagggagcagcgatcccgcctcctgggatctcccgggcgccgcccggggaggaagcgaggggctgggggtgctgctcacccgctccgcgcgcctcggctcccaacacagcgccccggccccgcgccgcgctcgattccccggctccccgcgcccctggctcctggccctccccgcccggcgccccggccccgcgccccggccccgcgcacagcgcccccggcggcggccgagcggagcccgagcggggcggcgcacggcgcggggccgggccgggcggctcccggcgcgacttcctgttgtgcccgcgccccgccgccgccgccgcccggcgcccctcgcccgcggcccggcgcggccgccgcccatggatttcacctagtgccggcggccatggccgcgcagtgctgctgccgccaggcgcccggcgccgaggccgcgcccgtccgcccgccgcccgagccgccgcccgccctggacgtggcctcggcctccagcgcgcagctcttccgcctccgccacctgcagctgggcctggagctgcggcccgaggcgcgcgagttggccggctgcctggtgctcgagctgtgcgcgctgcggcccgcgccccgcgcgctcgtgctcgacgcgcacccggctctgcgcctgcactcagccgccttccgtcgcgcccccgccgccgccgccgagacg

SEQ ID NO: 25840 - DNA, 2300 bp, Homo sapien
ggtgaccttaggtgggtagcagctgctgtgagcgcacccattccacagcactcaccgcagcccccggcctccaggcagcggccccagccatccttcccttggccgctcctgtcccctgccagcagggtcctctggcctggcctccactccctgcttgctgtcccctggcttggagcctgtctcttgcagggtccctccaggcgaggctgcctgggctcagggtggctctgggcccgggcgtgctgcctgctagtgcgtagccatcaggaggctctggcttcccaggttccacatcccagcctccttttcctgaccatgaccaaatcaactgctgggaatttggactgagtgtgtccctactgtgcctcagtttccctatggaagctaagataatgcaatgatgggctattcccttttttcgccttggcgttagctgggagatgcccctatcggctacctgacacagggcctcctgcctgggttggggtctggccctgatgacacagtgcaggccacaccctgggtcacctgccctggatgtctccctgcccaggcaggcaagtgaaggctaaggggtggctattggccctcgaacccagcaagataatctggccattgtcccctcccagagcctcctgccttctctcaggctgctgcccagtggctagggcccagcaccctagctgggtggccgtctgctgatgggccatcctgcccacagatctggtggctggacccagagctgacctatggctgcgccaagcccttcgtcttcacccagggccactccgtgtgcaaccgctccttcttcccgtgcttcgacacacctgccgtgaagtgcacctactctgccgtcgtcaaggtcaggggccgccagctgccgtcaccttgctcccaggacagcccagtggcctggccacgccgcctcccccttgctcctacctgcctgggctgtggccccagctgccagcaggccacagtgctagcaggagcccaccctccctactctatgggaggagccgctttgcagggaacgggggaagccgggctgcctccaacgggcctgaggggtcggggtcctggacccggggtgagtccccagtggcactgcagggtccccagacaaggggtctcccgacagagctgctgatccccagtggggtctgtgggtcaccgggcccgaacttggcagcaccctctgtgctgggacgaggtttgcaggctgggagctaggggttccgaatggagggtggcagttcttcggagagaagttctctgacagaaacgttccctgatggggatgtagggtttcctgctacgaatatggggctgcctgacaggctccccggccggggctatgggtgtgctgacggtggggccacccggtctcagtccggcctccttacaggcgccatcgggggtgcaggtgctgatgagtgccacccggagtgcatacatggaggaagaaggcgtcttccacttccacatggagcaccccgtgcccgcctacctcgtggccctggtggccggagacctcaagccggcagacatcgggcccaggtagggcctcctgctggggccttctggggctgcgcaggcctcggggagagccccaccgggggtctgtggcctgtgtccacggctgccctgctgaggacccccactggcctctgggtgctctgggccagccctgcccctgccttggtgccaccgccagggccctgccacccatgtgccctcagacccggcagcctggcccacccagtgcctgccctgcaaactggtccttcctgccaaggcccccgcacagcctggcaccctcataccttcgttggtcccttcagcccagagataaaatgagctacgtggcccctggaatgcagctctgccctgctgtgggaagggccagggtggctgcccatccagtgaggcagggcgggctgtaggctggggtggtcagccaggctgggtgaggtgtgggtgttactggagccccagggcagtgggagagcctggtggggtgagcggggctggggctgctcggcctcagctcaccctctctgcatgcaccaggagccgcgtgtgggccgagccatgcctcctgcccacggccaccagcaagctgtcgggcgcagtggagcagtggctgagtgcagctgagcggctgtatgggccctacatgtggggcaggtaggccccggggacctgtggacctggctggctggaaggaggagtcagagggggagcccctcgtctgacccctggggtgtcctgtccccatctcctggggaggaagcgga

SEQ ID NO: 25841 - DNA, 2300 bp, Homo sapien
cttggtgccaccgccagggccctgccacccatgtgccctcagacccggcagcctggcccacccagtgcctgccctgcaaactggtccttcctgccaaggcccccgcacagcctggcaccctcataccttcgttggtcccttcagcccagagataaaatgagctacgtggcccctggaatgcagctctgccctgctgtgggaagggccagggtggctgcccatccagtgaggcagggcgggctgtaggctggggtggtcagccaggctgggtgaggtgtgggtgttactggagccccagggcagtgggagagcctggtggggtgagcggggctggggctgctcggcctcagctcaccctctctgcatgcaccaggagccgcgtgtgggccgagccatgcctcctgcccacggccaccagcaagctgtcgggcgcagtggagcagtggctgagtgcagctgagcggctgtatgggccctacatgtggggcaggtaggccccggggacctgtggacctggctggctggaaggaggagtcagagggggagcccctcgtctgacccctggggtgtcctgtccccatctcctggggaggaagcggagctcaccgcaggggctgggctgatccctgctgggtggaaggtggggtgcgggtgtgcagggtgggagtctgagccccgaggtctgccaccctcaccgccctcccggtgcaggtacgacattgtcttcctgccaccctccttccccatcgtggccatggagaacccctgcctcaccttcatcatctcctccatcctggagagcgatgagttcctggtcatcgatgtcatccacgaggtggcccacagttggttcggcaacgctgtcaccaacgccacgtgggaagagatgtggctgagcgagggcctggccacctatgcccagcgccgtatcaccaccgagacctacggtgcggccagggccggggagggcagccacggggggccctgggcactggtccaggggcagagagcctagcctggcccccctgccatgctgcaggtgcccacacctcctgcttcccccgacgacccctacaccccctcacctctcctctgtctccggaccccatccaggtgctgccttcacctgcctggagactgccttccgcctggacgccctgcaccggcagatgaagcttctgggagaggacagcccggtcagcaaactgcaggtcaagctggagccaggtacctgctcctcaggacccgctcccacaactggggatgtcacccctcaaggcctccttgcctgcccttcgtgtgttctggctgtggcttctctgtcctgcactgtgcctggacccctgccaaggccaagctgggagcccctggccagggcaaggcctccccaggctcccacagccaccgccgcttccctggctctgagcagcagtcacagtggtgtgtgagtcctcagtcttccccgaggccctgccgctgcacgcccagggcatcagtacacatctggacatgtgagggacagtggcgcttggcccttgctgctcctcggagcctgaccactgcccctccctattccacgggacactggtggtttcggacgccagcccaggtgggtgttcaccttgcaggagtgaatcccagccacctgatgaacctgttcacctacgagaagggctactgcttcgtgtactacctgtcccagctctgcggagacccacagcgctttgatgactttctccgagtgagcagccccctgcccgggacggccctgctgccatctgcccccagcccctccccggctcacagggctgcctgctcttgcggcagttggggtggaactggcaggggcctgtgagcctggctgggacctagtctgcctttctttgtggggagtgcctgggttgccacctccccttctgccaccctgtttgctcccttggcagggcctgcgtgccaagtgctggctccgcagtgcccactagctgcccctgtgcccagcacgtaccttggcgcacgccctgcagtgccctgcaggcctctggtggggctgcctgtgccccacccttccaggcctgctgaggccccacctctgccacacaggcctatgtggagaagtacaagttcaccagcgtggtggcccaggacctgctggactccttcctgagcttcttcccggagctgaaggagcagagcgtggactgccgggcaggtgaggctgacccccaaccctgcagccagggagccgtgggtatgatggcaggcggggcctctgctgcctgaggggccactccacctggagg

SEQ ID NO: 25842 - DNA, 2300 bp, Homo sapien
atatggcgagagaggaagcaagagacaaccgcaggaaggctgactctctaaccagctctcatgggaactcacccctccacaaaggacactaacctatccatgagggatccacccctattacccaaactcctcctactaggcaccacctcctaacactgcctcattgaggctcaaatttcaataccattttgggcaggggcagaccacatgcaaatcacagcatggggtaatagtgggggcaggttgacacagggctgctgcctacccagcaccagctgtctcttggccccttccagatcctggcaatctggctacaggcatgggcccagccttggacacagatgtggccacaggaagctgttagctctccagatctgatcagcctgggagagcggcacaacaaaggctcccaaaggagagtcgggatcctcagctagcctcagctctgctacccacccatatgtgcccagaacaggaaagatacgtgtttcttactcctccgggactcctaggtgaagctgagaccaggctcttcttgagtcctctcagctatggtgcaaccaccagcctagcaaggaatcagaaacatcttccggaagagtcagcaccatagagggtgctgaatgggcaatgaagcatcccggagatgaaacatctgggcagtgaggcatcccacaggtgttgggctatgcagtcactccctttctcagaccgaggcaagtacataagcactctgggcccctaatcaggggcctggggccaggtgggatgaaaacagcagtgtcctgccacctgaacaactgctactcacgcaggccccacctggcctctcagagggaggaacctgggactcctgaaccagattcagtttctccttcaacagccgggacttttcgctcctgactgcagaaaaacagcttcaatgtgaccatccttgatagtccgaggctgagtaaaatggcctgaggaggcaaaatctgaaaagctctattaggtggcaaactgctgtcactagaagagttgaggcccccttctcctcccctgcctgaccgccttcattcctgggaatggaacaggttcttggggcaagggtgaatcctcgagcaggtcccaggatcactatcctcacctccccgcggcactgaatggctatagctgtaaatgtgcgtccacggggtcactgtccagccaccaggaccaggtgcctggccatctggggaatcggaaaacgctcagcgggatgctctggccacctcccctgcccccagttaagatgtagagcgttcaacctaaaatgcctagaaacaaagcccaggcccgggaaggtcgaacgagtgcgacgccgctccctcaagctcttccctcggagccgtctcatttcccaaaactcccaaacacatcacagagagaggtgttgagccaggtggtcactcccttttccagaaccacagcaagaagttgagcctgctgggctcctaacgaaggccctggggcccggtgggatgaaaagccctattaggtagcaaacagctgtcactagaggggttgaggcccccttctcccctgcctgacgacgacggcggcaggaactcgaccggcgccggacagctcgcaacttgccttaccaagcgtaaatctcggttcctcccaactacccgcggccacggcctccgcagcagagcgccggaagcagagacgcgtttcgggaggaaggtgcatgctgggagcggcggcgcatgctgggagctgtagtctgcgacgcaactcggccgaggtggctccctggtccctgaagctcccagagcccgcgtgttcaggcggtcccgacaccccggcccgagcctcaccggctggaggactgaacgcctgccggccctccgggtatgagcggaggccgggatagccctgggctccgccgcccccggaaggaaaaaatacagtgcggtccgccgcccgaccacgaaagagcggagctcgggagccccgccccctgggcctccgacgtccgtggcgctttccgtcgcgcgagtgcgattgggccgcctgtcacgtgacccgagaccccacgcccggttggctgccgcctggttaccaatgggagactagcgggccggcgtactggcctggtccagcacctgcggggccctcgggcttggagggctgggccgggcggggaacgggcggggcgggccggaggcggcggcggctgactcgccttctctccggggctgcgaccccgaggcaaccggctgcagatgggagcccgcggagccgaggatgcgggcgggccggggcgcgac

SEQ ID NO: 25843 - DNA, 2300 bp, Homo sapien
attggaatttgggttttattttgttaaaagattgattttaggtgcagctggaggccactagagggttttggtagaggagtggttctcttggatgtgtgtttttacaagctcactcttgctgctgggtgggaagtgggttgtcggggcaagaatgcaagggtccattgtagtggtcctggagaaagatgaaggggctcagattagcttgacgactgttaggatgtgggtttggagtagattggtttgagacgtaccttgcaggggggatcgagaggccatagtgactgattgaaatagagggtgaggatagtggagggatcaacatgccttctgggtttctggcctgaacaggtgggtggatggtggtcctgggacagagcctgggggtgacctagagttgggctttgctctcacgtcttcaggtggagctgtcctggaggcaggtggatctgtcctggaggcaggtggatacggagcagggataggctagaggcattcttctgggaggcggagcatattagatggtttacagtccacagcctgggagagtgtctcgggggagtatcagtaaagaagaagggggccttggggctgagccttgaggaaccctaacatttcttggggtcaggcaggtgccctgacagatagacttgagaagcagcaggcagtgagggagaggacacccggggagcatgcggcctcacagaagctgagtggggaccacctcaggggcagcagatggctgttctgctgttgtgaatgctgctgagtagttggggaagagagttgggaccaagagaagcccagtgggtttgataacatagaggtgacagcgacattgatcgaggcagtttaggggccatgattggctcagaagctagaggagcctgtgtggagagtgaatgggaagcaggtagtgggcatggcagctctttcaagagctgtaatgaagagaagcctgaaggagactatggtgctgagagataatgtcttaaagaacatgggggtgggattctgcccggggagctggaagggaaggagttgtgagaggagcccaggctctgagggcaggagagagggtcaggtccagaagcaggaggcaaggtcgaagctcagaggggtgggcaagggcagtgtggatgttttgagtagacggggagaaaggggaaggtatatgatagttagggggtgtgggaaatggagcctgctagagaaacagatttccagcaggatggaggacacatttgagatttaccagcatgagtaaaaagtgaaacttttcgaagccaacatttagctgttttgagaaggagcttgctagagtttgggatttttccagtaaggaaggaaggcaccccagaattaagctggacagaggcatttgaagccaggagctgaaggacacccgctgcaggaaaccaccttcctgtccctttttgggtaacactgatgatcggaaaagctccaccccaactcctgtcatctagagccttgggttcttagtttgaagggttccacagcaggcatgatctaactctggacaactttctgtatctcaggagatttgtgccacaccccggctgtttccagatgacccacgggaagggcaggtgaagcaggggctgctgggggattgctggttcctgtgtgcctgcgccgcgctgcagaagagcaggcacctcctggaccaggtgcggggccccttccctgtgtttgtcctggagccggtttctttttgcgtttctccagcctgctgagtaccaggaggccttgcgaaagcagagctgtgccgcagccggatctcctgctgtgttgggggaaggcaggagagttccaaggcagaggctgaggactgcactctgtccctctgctgcaggggggggtgccttggcctcgccagaaggctccatcagggaggttcgccctgctctgtgctctcctgacccccggactccatggagtcagatcaccacgtttagaataaagagacaaatgtgccagctcacaggaggacggggctggctggcagcctctgcctcagatctctcctcagctagctcgctggttttcttacaggttttgaatataagtttgcaaaaagttattaaacctgtttctgtgggtagacagatactctgggaggagaaggccttctcaggttttccttacctgggagtgttcaccgttttatgcttggcttgttgctaagtgttgctgattaatgcagcggcgtcaacagtgtgacctcattcagagtttcactcatgtcccaggccccatggtaagcgtgtcacagtcac

SEQ ID NO: 25844 - DNA, 2300 bp, Homo sapien
gctggagagtggaaccttcaggcaccacgcactgcctcctccctgcccacggtcctggtttctccagatggggccttggccttggctaggtgttgatcaggagctgggagtgctgcgccccgcccaacttctccaaactccagccagggcacctcagtgaggcctcagccacctgcgccttatttgcttcctccttggaggccctcgtgtctgttcattcatcaaacagcagctggggcccccagcagacccccttccccaactttcccactggacactggaaccagtttcacaactggactggacaggacgaccaccttgtgccaggcgccagctatctcccctgaccagtgatgggtcctcattgcccgtgggccgtgagtgacccagttccaaatcccaaattagtgactctcttctccaatgggggttggattctccagaagcagaggcagacatagaatttgggtgcaaggtatttcggagggaaggtggaagaggtggggttggtgagggagaagcctggagtgtcggtggccggggtgcccccacctggctgaaacgcctggtctttgtgccctgcctggctcagcctccccaggcagactaccccatggcatccctggacaaggctgcccccaagaacgctgcccacagcccagccatgggccttcccttggggctaccgccccggctcacacctgctggccagcgtatttactccttgctggctgcaccctctcagcagtggctgtgtagaccataaccctgggaacacctgcggggagaagcgcccttggcctggcggcttgggggagacacctggggtgtcaggagggaaggaaggcaagcaggggtgaggcactgtgggacttttcctgctttctgggccagtggccacaggccacccagtgacatttctctctcagcgtctgctggggtggactctgcagcggctgcagccagcctggatcggctcctcgcacagctctgcttgagggtgaaggccatctagaaaccctcagtcccctctcagcctcagagctgatagcgctgcctgaccatcagcaagcttgtaatcagcaccacctccagcatgcctgctcctggatctccgtgaggctcccctgcctgtgtcacccaggggcctctaggggtgctctggagctgggagccactgtccagcacttcctgccctctccggcctctcttggctgtctgccaagcagtcactcagtctcctattgaccactcgttttgccgcaaggctgctggtttacgtgaaaatagagaaagccaaagagtttcctcacccctgtaagatttactggctcttctggcattgcacctgcctgagttccttggtggggcccctctttgagttcctttgggctgctgtaacaaagcaccatagcctgggcagctcgtaaacagtggaaatgcgttgctctttgttctggaggctgcaagtccaagattgaggcactggaagacctggtgcctggtgaggacctgcttcctggtccagagacagcaccttctctctgtgtcctgatgtggtggaagggcaaaggaactccctggggcccgttttatgtgggcactcatcccattcgtgacgcctctgccttcatgacctcatcacctaccagaggtccccaccttttcattcctcaccttggggatgaggacttcagtatgtgaatttcggggacataaatgtgtcatctatagaagggcccatctcttacacaaatgctgggtccccagtggcctgtgtcctagcaaatgagagccaccctgaaaaataaaatcctgtctccccaacgccagccctggcaaggcacccagaactctccggaatgcttgaaggcagggcctggcctttccatggggtccagggctgtggggtccctggcggtactgtgggcctgcagagtggggcatgtgggctgaagaccgtctccccaccatggtgggaagggacaaagggtggccctggcagatccggacgggcaggactgggtgtgtcccatgagagcacctccttcctggcctttcctgtggactttgtcccacaccacctgcctgggttccttcctttagtcacttccagctccaggcacagcagttggtgactccttggtgggagccgtgtcccacccggtcctgatactgccgtcttctctttcacagtcctccaggcttgggccagccttgggggcagcagagcttctggggtgagtgtcgagatcctgtgtcctgagagcggtagtcagggagagggctggtcggggcag

SEQ ID NO: 25845 - DNA, 2300 bp, Homo sapien
agtagagtgaacctccaattcgatgactggtgtccctatatgaagagaacagacaatgacacagaggaggcggccaggggaaccggcagacatgggagtgctgcgtctccaagcccggggacaccgggggtgccagaggcccccggagcccggaagaggcaggaggctcctccccagcagcctccgaggagagctgaccctgtcagtgctgccagctcagactccagcctccagagctggctgagcatacaaccctgtcacgtgaagcctcttcgtttgcgtcctttgccttgtagcccgtgaagccaccacaggccatggttggggcctgagaaactcaggacgaaactgagctcccacccggaaccctgcccaggcctcaccgacactcaagtgcaggtcagaaccaggacactatttcagacacaggaggtctgaagtgtacctgccaggtccccgttctcaggaagctactgtgagacgggcaccagcaaaaagaaggaatcaaccgaaacaggaggcgatgaggaaagcaggaaacagaaatacaaccaggatcagtgaagggcagcaccataccggagatggacgcctgcgggtaacccggagctgcggatcctcgggggagacgctgcccacacagagcactggtgctgaactaaggaaagcacccagaagcctgggcaggagagagtccaggacctcgtcacccgcaggaagcaaggcctgtgcaggagcggagaggcctccggggccaccacagctcacccgggccgtgtttccatgccagggaactagagggggctctggagctgatcaggaggaagaggccgacccacccggagtgaaggatccgcaggaggagcgtggggaggcaaggaaagaacatccgccccccacatcccaggagacagcccagggttgatacctgaactgaagagtctcggagaagccctgcaggcccagtgtgtggggacagagaggccaacacggagctgttcctagcagagggcagtgctgcctcggcaacgggggcaggagggggttcctgatgcacttcgtatgcttcctaggaccctgcacatgcctgagagactgtgaccacatcagaaccatggcgacaaatcacgatgacgtcagtgtcaccatcgcagggccaggtgcctgagagacccccagctcctgtctttccccccaaggggaggctgaggcattgcccctgagacctccccagtgtagagccagcagaagctgaaaaaagcttccagaattccataggaacccagctgcccttctggtacctcagtgaggtggagccgagtgtctgagagcaggtgcaggagaaggtgtgggctccacctgggcctctgaagccaggggccagaatccccagatctaggtccaagagggggctccatgacctccccatgctgctcctctgcttggatccaggatataagaaaggaggggcacacactgtgggggaactctggggtcccctgtgtgcatcagcgagtcccgggtctgccccaccaggatgcaaagggcctggctgctccagccccatgctcacagccctataagtgcacgatggcaccctatatcatctaagcggggctctctgcctcctgaggctttagggacaccagaatgagcccccctcggcggagtctggctctgggtgtgtggagatgccacctgggacgggaaccccaggtgcatggagccccactgcagacaccatcccccgtgtgcccagcaccccttgcaaggttggcctttccccagcctgtggcctccttacctggctgcagcttgctcggcaccgggacggtgtccacagtgagacatgccgtcacagcccctaccccccaaaccatgcccactgcagagacctccccaggagcactgaccaggcaccctcacctccaccctgcaggaccccacgtgccaggatgctctgtgggccccagcagccctagggaccccaccctgcccctgcccttacctgtcagagggcccagccagtacacctgcacgtactccagtaaggtgtgtcccgagcaggcaaaggtcacagaggcggccagggcagggttgaagaaggcagacgtgaagggcccggctgtgggcagagcacagacagccctggtccccagccctgcctgacgcccctctgcaggccaggacctgatccccgccaccgaatccacaccgagagccccactgtgtgcaggcctgggagctgctctcggctcctgaagccccgcctggtcccccgcaccgatggacacacgatg

SEQ ID NO: 25846 - DNA, 2300 bp, Homo sapien
cagtgcacgggctcacacttaacttttgtgtgtttcacgttgttttcatattctggtgtaagtttgttttatttctctagaaagaagcaagggctgtgaatggtgattaaacgttccttctcaggtttgcctgtgcgtggggtagaggtggaccacgcagaccctccctgctgtgagctccgtggagggtcaatgcagatgcagggagactgtggggcccggtatccgtgacgctggacaagggggttcccgttctggaaggaggagtcaaggtctccagtggtgtcggattagaatatgaggaatccgtctgagctcattctccacaggatcccacaagggaaaacctggcttttccctgtgcagaggccaggcttctatggcttccagaaggttcctctgctactctgagagggcagggcacttgcacagggaacaggcaaccgaaggcagccacagccctactggaaccggggtttctctgccttctggggagaggtcagtggacgggttggggagggggacaggcaatcttcctgtgggagtcgaagagcctggggcctcccctcctccttggaggcgaccagacaccttccctaactggaggaaattctgaaccccagaactggaaaggtcaaaactgaaacaaaatcgccccttgttttgcgagctgctgcctcctctgtgccctcaggcaggtccattccctcctggtctcagtctccccagctgtgccagggggacgccaggtgggacccaactgggtttccaaaaacaaaaggaaatctaagtctcagagaaaggggagctttgggccaggttgggggaagggcctcgggtgctggagtcagtcctgggggagagggaaagggctgtgagggggacatccagcaggtcccacgtgctgtaccccgtatggccatggctggtgtcccagtgcttgggtgcagacccagtggacaggatccatgctgcagggtgacagacggcccatcgcagggcccacagggctcatgtcccatcccctcggggtccggagctctggatggtcccagcccagctatctcccactgcagacgcccaggctcagcgccttctccacgcagctgtgggtagctggcccctctgcaggaaattcaagtgaatggcgatggcactttcggttttcatctctggaaagcgctttcggggcgggaaggtgggagggacgttgatgtgaggcgtggtcctgagttctcctgagggcaggtgagggcagtacagggcagggaatgtggggctggggcaagggctgctgccaactcttgaccagaggggacacagagcaggtggaggagggtctcacccagaccagaccccaggcaggtcaacaagcttgggggtccctgctgaggtggggacacagtggaggtgcagggagccaagaatgagaggaccttcccataggcagggacgcagccacgtgcagggggcctggcctagctggggacacagccaggagcagggagcagggggcactcactcaagggaagacatctacaggtgcaggcaggagggagcttcacctaggctgggtcaaagaacaggtgcaggggccatgaggggcctcccaggcggacacacagtgcaggttcagtgggggtctcaccccagtggggacacagtgcaggtgcaataagcctggggccctcactgagatggggacacagcatccatgcagggaggcggaaatgggggcccttgttcaggcagggacctggagggggtgcaggatctgggagaccctgactcaagaggggccaggtgcagggagcaggtattggggtccggtacccaagagcgcaggtaggaggagcggagctcggatggaggctctgaagagctgggccagtctccagcgcccagggctggccgagcgtggccagtggatccgggtgtgtcacatgacgggatgatgccaggctgtggggcagggcccctgtggccatcctggctgtgcacctgggtggcagccagtggggcgggagctggggctgcagctgtggtgttcccagaggcccaggtgccctctcccacacgcctgggccctctgggttgtgggaaccggccagctcctgctctgtcccctcaggtgtcctgcaggcacagcatctcggggggcccaggccgatggcaggtcttaacgtgtccctctccttcttctttgccaccttcaccctctgtgaggcagccaggcgggcctccaaggccctgctcccagtgggcgcctatgaagtcttcgcccgggaggcggtgggcgc

SEQ ID NO: 25847 - DNA, 2300 bp, Homo sapien
tttggaaacccagttgggtcccacctggcgtccccctggcacagctggggagactgagaccaggagggaatggacctgcctgagggcacagaggaggcagcagctcgcaaaacaaggggcgattttgtttcagttttgacctttccagttctggggttcagaatttcctccagttagggaaggtgtctggtcgcctccaaggaggaggggaggccccaggctcttcgactcccacaggaagattgcctgtccccctccccaacccgtccactgacctctccccagaaggcagagaaaccccggttccagtagggctgtggctgccttcggttgcctgttccctgtgcaagtgccctgccctctcagagtagcagaggaaccttctggaagccatagaagcctggcctctgcacagggaaaagccaggttttcccttgtgggatcctgtggagaatgagctcagacggattcctcatattctaatccgacaccactggagaccttgactcctccttccagaacgggaacccccttgtccagcgtcacggataccgggccccacagtctccctgcatctgcattgaccctccacggagctcacagcagggagggtctgcgtggtccacctctaccccacgcacaggcaaacctgagaaggaacgtttaatcaccattcacagcccttgcttctttctagagaaataaaacaaacttacaccagaatatgaaaacaacgtgaaacacacaaaagttaagtgtgagcccgtgcactgtgacaggtgtcagcagcgtgagtctcgccagcgtcaggagctggaacgtcttcatcatccccgagtcctctggtcctccctgcccttccgcagcgggagggtccactcttgtgggttcccagtcctccctgaacttccccagagggagggtccactcttgtgggttcctggtcctccctgaacttccccagcaggagggtccactctcgtgggttcccggtcctccccgcccttccccagcgggagggtccactcttgtgggttatgtgattctagcttcccgctttctgtccggagcctgcagaggaatgggaccacgagctacacgtgggttggacctgcctgttttgagagagggccctgtccctgagggttcatatcccttgaacatggttgagagttttgttccttttcattgctgacttgaagccatgtcatgaagagccacagcttggccgtttttctgatgatgcccatgtgggtggattttagttcttactactatgaataaagctgctgttagcattttggtctattctttctgtaaacgcagacttttatgtcttttgggtaaattcctaaaatgccccgggtgagctatgtccactgaacaaatcccacatctataaatttggaaagaagactttatttcctataaaggggtagggccttcagggtggccgtcctgacaccctgggcacctcagcctctggcagagcccaggccgggcacctggaaggagggggttggggcaggagcttcatgctgaacaggtcggctaaggacacacactccatgggttgctggaggagccgtgaacattcaggaaggggtcctcactcatgcatactgaacaaacatgcatgtgacatgcgtctcaagtttccttgggggtggacacgtgatatctaaatgtgttcctgtgaggcccttgcctggaaaggtgaagcagcaacaccaaggcactcgttgcacggcccctgaaaaccagccagaaccagtccctgctgggtggtccccagtcagaattacagaaatcagcctcttggccaatcaaacttagggctggtggcacagaagagtggggctgtgtgtcagcatctggagggggtgagctgcacctgagtgagtgtggctttcctagtggccagcgctggtttagctgctagagaaaaagaaccctcctggccggcagcccctggtttctgcttttcagtgtcttgtgcgtgactccacccctgccaggcagggcctcaggtcttgttgatcatttgctgtcttatcaccacaaggaacctgttttgtcagtctcctctttatgttcaccttcatgctggtgagtgtggtgtcccaaccacagacggaggggctgtcacgcggcgggtcccacctcccactctgtcatggcgggatttttgtcatgtttttcagatttctctggaatccccttggccaagaagggtccattcagcttgttggtgcgggagctcaggatttcatttttagttctcacatggcaggtgagtg

SEQ ID NO: 25848 - DNA, 2300 bp, Homo sapien
gtcacagtgcacgggctcacacttaacttttgtgtgtttcacgttgttttcatattctggtgtaagtttgttttatttctctagaaagaagcaagggctgtgaatggtgattaaacgttccttctcaggtttgcctgtgcgtggggtagaggtggaccacgcagaccctccctgctgtgagctccgtggagggtcaatgcagatgcagggagactgtggggcccggtatccgcgacgctggacaagggggttcccgctctggaaggaggagtcaaggtctccagtggtgtcggattagaatatgaggaatccgtctgagctcattctccacaggatcccacgagggaaagcctggcttttccctgtgcagatgccaggcctctacaggttccagaaggttcctctgctcctctgagagggcagggcacttgcacagggaacaggcagccgaaggcagccacagccctactggaaccagggtttctctgcctcctgggaagaggtcagtggatgggttggggagggggacaggcggccttcctgtgggagtcgaagagcctggggcctcccctccttggaggcgaccagacaccttccctaactggaggaaattctgaaccccagacctggaaagttcaaagctgaaataaaatcgccccttgttttgcgagctgctgcctcctatgtgccctcaggcaggtccattccctcctggtctcagtctccccagctgtgccagggggacgccaggtgggacccaactgggtttccaaaaacaaaaggaaatttaagtctcagagaaaggggagctttgggccaggttgggggaagggcctcgggtgctggagtgagtcctgggggagaaggaaagggctgcgggcgggacatccagaaagtcccacatgctgtaccatatggccatggctggtgtcccagtgcttgggtgcagactcactggacaggatccatgctgcagggtgacagacggcccatcgcagggcccacagggctcatgtcccatcccctcggggtccggagctctggatggtcccagcccagctatctcccactgcagacgcccaggctcagcgccttctccacgcagctgtgggtagctggcccctctgcaggaaattcaagtgaatggcgatggcactttcggttttcatctctggaaagcgctttcggggcgggaaggtgggagggacgttgatgtgaggcgtggtcctgagttctcctgagggcaggtgagggcagtacagggcagggaatgtggggctggggcaagggctgctgccaactcttgaccagaggggacacagagcaggtggaggagggtctcacccagaccagaccccaggcaggtcaacaagcttgggggtccctgctgaggtggggacacagtggaggtgcagggagccaagaatgagaggaccttcccataggcagggacacagcccacgtgcagggggcctggcctagctggggacacagccaggtgcagggagcagagggcactcactcaagggaagacatctacaggtgcaggcaggagggagcttcacctaggctgggtcaaagaacaggtgcaggggccatgaggggcctcccaggcggacacacagtgcaggttcagtgggggtctcaccccagtggggacacagtgcaggtgcaataagcctggggccctcactgagatggggacacagcatccatgcagggaggcggaaatgggggcccttgttcaggcagggacctggagggggtgcaggatctgggagaccctgactcaagaggggccaggtgcagggagcaggtattggggtccggtacccaagagcgcaggtaggaggagcggagctcggatggaggctctgaagagctgggccagtctccagcgcccagggctggccgagcgtggccagtgggtccgggtgtgtcacatgacgggatgatgccaggctgtggggcagggcccctgtggccatcctggctgtgcacctgggtggcagccagtggggcgggagctggggctgcagctgtggtgttcccagaggcccaggtgccctctcccacacgcctgggccctctgggttgtgggaaccagccagctcctgctctgtcccctcaggtgtcctgcaggcacagctcctcggggggcccaggccgatggcaggtcttaacgtgtccctctccttcttctttgccaccttcgccctctgtgaggcggccaggcgggcctccaaggccctgctcccagtgggcgcctatgaagtcttcgcccgggaggcggtgggtgc

SEQ ID NO: 25849 - DNA, 2300 bp, Homo sapien
cccggccgccttggagcctgcgtggccgcccagctgtgtgtgttgatgtctctgaactgtgtccttgcgaggatgcttggaggggagctgggtgaggctgggtggatggtggggtgggcgagctgaacgtgctgctcagggtctgcagagtagccacattctggagtcaggcaaattgtccacctcgggtatgaccagtcctccctgtgagcaccaggcctgaggaagtagctcagtcactgccatccagaaggctgaaaacaggaactctcacgtaacagaaaaccctgttccggagcagagggcacccaaggtgtttgcggaacgtggttcgaccccatggggatgtaaaatcccaggcccctggggctggccctgagccaccctgggacagggtttgtgggtggctggctcaggccgtgctcatcataactccagggtggagattaggaacacagcgaggccgccgctgtctcccgtgtgctaacagagacgcttttgcacacggccttgcagcagccaccctgcctccatgccaagcatcctccccccggggccttcctcttcccaatggaccaagggtgagtccattgtcagaggagatggaccatggaggtttttggcaaacccgggcaggtccccttcaggtccagggagagatggtggcgcctccttactcagactgaggctggggtgggcccgcgcaggctctgccctctccctccctgcctctgtccttcctctcctccctgcctgagtcctctcctcctgccctcccctctcccttccctgtgttccccacatcccagctccctgtcctgcctccctcctcccttccctctctgcccttcttgttctcattccctgccgcctcctctccttccagcctcagcgtgacagctggggcaccatttgtggtggagctgggaaaatgctgggctcaccctcatcggggcgtccaagagaccctactctctgggtcctgagtaaggagggacctgtccttcctggcaccgccgcccgggcttccagcctgtgcccccagccgctcccttgcggctgccccttgtctgtcgctctgtctgtctgcatgtccccggcctggctgaaagcagcccccacgccatcaacttctactttgtctctgcttcctttcaggaccttttaccaatttgaggctgcgtgggacagctccatgcacaactctctcctgctgaaccgggtcaccccttatcgagagaaaatctacatgacactctccgcttatatcgaggcaaggcacctatgccagggcactccaccaaaaccactcagcccctgaagcttgaggttcttgtaagctctggacaaccccatatgacccagacgacttctctagttctcaagtccctgggttaaatttgtgtgccttttaaaaaacaaaaacaaaaactggactgcaaggttgaatccataaatccataaatccatgtgctgttttttttttgtttttgagaccgagtctcactcttgtcgcccaggctggagtgcaatggcgcagtctcactgcaacctccgcttcccaggctcaagcgattctcctgcctcagcctcccaagtagctgggattacaggtgcctgccaccacgcccggctaatttttgaacttttagtagagatggggttttgccatgttggccaggctgttctcaaactcctggcctcaggtgatccacccacctcagcctcccaaagtgctgggattacaggtgtgagccaccgcacccatcctccatgtgcttttaatggcagttaactcactctaccatacttagtgtgtgggtgttgtccttgggatgcaagatggctgcagcaccaccagacattgtgtctgcattccgggcagcacaaaaacagaagtgttccatccccacagcacccccagagtctgcagtacataggccgtggccagacctgggctgtggcctcccttccaagtgcaagaggtgactggaagtgtgggcgtttcttgctggtcatagtagtgagggagagggagggtggggagcagtgggcaggggcatctgcaagcacatcccctctccttagttacagccgaattattccagcttcacatggggatggtgtgaccatctcaccagatggtggtgaggttgccgtgaggaggcgctggcagagctcttcccagcgagtgcttgggactcttcagccatgcacagcagctgcccccacttcaggaagacaaaggggccagctgttcagcagttagcgtgtcatccaccaggaagtcattttctgtg

SEQ ID NO: 25850 - DNA, 2300 bp, Homo sapien
tatgaatgataatgaaaacattttatgtccaaatttgtgagactcagccaagacagttctgtagaaggaattttgtagcttttaatacagtagatctattggaaaatcagaaggcttaaaaaggagctaagcatttggttcaagacagaggaacagatcaaatccaaagaaccacaaaggaaggaaataatacagaaagacagaagcaaatgaaataacgggaaagacgtttaacagaactaaaagttggagctctgaaaatatttaaaaatattaaaagagaaaaatgcaaaaaacaaaatacaggccaaatgcatgccagtaatcccagcactttgggatgccgaggtgggtggatggcttgacctcaggagtttgagaccagcctgtgcaacagggcaaaatcctgtctctacaaaaaatgctaaaattagctgggcgtggtggcacacacttgtagttccagctactagggaggctgaggtgggaggattgcttgagctggggaggctgaggctgcagtgagccaagatggcaccactgtactccaacctgggagacagagcaagaccctgtcaaaacaaacaaacaaaaccataaaaagccagaatataaagaaaaaaagatatgctagtcatttaaatattaacgtgaaatagattaattcctagaaaaatgtctattgcctcgagaaatagagaacttgccagattaaaaagcatgaggaaaacggaggtgataaagaccccagccccagaagcccagatggttttattgtttctgccagggttaggaagaacaattgatttctctttcatgccggcggttccaggaaatagtgaaggaggaggagctgtctagctggtttcggcggggctggggctgggagtggggggcccgtgtcttgcagaagtggatgtgaatctcccccagccacctgcaaggcgctcgcacgcagctgtcgggactgaggtgaagccggctctcccaggagtgtggatgaaatggttaacggcgaggccgctagggcagcgcaggcccctgctgggcgccagggaggcttagccaggcgacgccaggatgcccatggcaggggctcgatggcaggggctgggctggaggggacccagccccggggttcagggtggcccgaaatccgtgcacccccgcaccgcagtgcggggaggttcccatgggcgagctgcccagaggctttgtcgaagttgcccagccctgggacggtggagggaggacggtggcgcgcacagagataccagtcagcccctggaactaggaaggcggctgggggcgggtgacgcaggctggggtttgccggggtggcccccgagcggcgtgtgacttgggggtccaaggaagttaaactggacaggctggggtgaggacaatgggggcctggagaggtggggcgagaggagggcggggggtccccacgagccgcggtagaggcgaggcggcgggtccgcgggcgggttgcatcatccggcggggagggcctgggtcactgctgctcttcccccggcgccccggccccgacacaagatgcgatttcaccgcgcacctgttacacccggagccagcatccctggcgcaaggagccctccctccccagccccgcccgccccccacgatgcgtctgtcgctggctcagagcgggggcaggtggacgttttacgatttcactcgaaaggggccagggtgggggacggcccggcgaggggtccgcgggcaagttcaggtgcacgcggggcttcgggacggggcgccgccgggtccctcccccgcgaggtctcaggggcacgccgggggaggggacgctgcgtccgagccgggtgtcggtcccccaccctccgcggggcccgccgcggtgtcagcggtgacgtcacagcccggccccggccccctccgtccccagccccatccccgcggcggccgcgtcgcccgtccctctccccgcgcgacaaaccagctggcgactggagctcggacgccgcgcgcagccaaccagcgcctcgggaggggcgcggggcggtccgggccgggggcgcgcagcccgtcacgcggcggcgccgtcacagcgcagagcagccggcgagcggcagcagctccgggctcgagagcccgcgcccatgccagtgcccatgcggggccgccgccagtgacgccggagaggtaaggccgccgcccgcccggcctcccgcgcccgcgcccctcgccccgcacctgcgcccggcagcccgcgcccgcagcccgcacctgcacccactgcgcccagggcgggg

SEQ ID NO: 25851 - DNA, 2300 bp, Homo sapien
ggggaggttttacttaccaggaaatcacaagtaagagaacctaccgcctcccttgaaatagcaaaagctggcacccatctatcagctctacaagtcattagactcacaagcaggattttggtgtctggtaacaggtgagttctggattacctcctagctgaacaaggaggggtctgtgctgtcatcaacaggacccgttgcacctacatttatgtgtctggagaagtggaaaccgatgcccaagaaatcatcaaacaagccaaatggctacacacactttcccaaagcaaccaagactgggccaaaacttttactgattggttttcaaaaaatcacttggcttcccccattccttagacctttatcttctgtcatttttcttttaatatttggtccctgcctttttaatgctctgattgcttttctatgttctacatgagaacaattccacctgcagaaggctatgcattcccaacactggcctgcaactgcagctcgatttacatggggcttcttgatggaaataccggcctgcaactgcagctcccatttacgtggggcttcttgatggaatcccatcacgtgcctccgtgcacaagttttcatgaccctttattcccttcatgaccgagagcaagaaagggaaaaacgtgacctacccccctgaactccctttcagcagcaagtagtcaggcgcactggacacccctcttcactgtgccgtttcccctttcttgagaccccaacaggaagcaggtggacatgagcatggcagaaaaggaagggtcaaagatttcaccaagatatttgtcagagggaaaatgaggacagcaaagatcacctggagaccatcaagcaggccccaggtggggtgggtggaggggagcctctttatttgagaaatgtagaatgaattagacttccctattatctaaagttggcacctggttccaggcctcttttcaacctaaaacttatacataactagaatttctatacatctctggaatgcagcatgctgaaactcactgtgcaacccctgccttgtgtgtgtctgtataccatgcaggtttgcttgctaaattgagcctgtaaaccaaaaagtacctcaaacaggtctcaattaatttagaaagtttttgttgccaaggctaaggatgcacccgtggtacagcctcaggagggaggacatccttgccaagctcaagggtgcacccctgaccacaagggcccaaggtggtcggggcacagcttgcttttatacattttagggagatatgaggcatcaatcaatacatgggagatttacattggttccatctggaagggcgggacaacttgaattggggggcttccaggtcataggtagatttaaacatattttgattggcaactgactgaagaattattatcagcagaaaggagtgtctgggttatgaaataggggttgcagggagcagatgatgccttcaggtagcgggatttagagagaaaatagatggtaaatgcttcctatcagacttaaggtctatgtcgatgttaatgctgggggttatgatgtggcatggcctgaacgtcttccgggttaaagtttagagcaccctggcggacagggaaccccattcagatggttgctggggggccttcgaattttatttttggtttacaagccttcccatcagctgcgccagggtcagcaaaccacagtccatgggcccaatctggcctgccacctgctttttgtaaataaagttttataggaacacgcccacacctctggcagctgctttgcaagcacgcagcagggttgagttgttgcaacatagaccacagggcctgccaagcctcaattatctgtgctccgaccctttaagaaacacttctctcacccctgagctaagcagaataagaggggctggacgtgcaggactcagagtgggagcgaggagggctggggtgaggacagctttgtcacactctgtttttctgtcactcagccctgggggctccctctgcctgagggcttcgtcccctgctgcctggccgtgacccgcagcacaagcacagataagcctcagggaacaaaaggcagggctgccacggaagcccatccaccaatcctcacctctcacctctgtgtccgccctgctgggaaatattccaggctttggccaaggccagtgcagccccaggttcccgagcggcaggttgggtgcggaccatggcctctcacaagctgctggtgaccccccccaaggccctgctcaagcccctctccatccccaaccagctcctgctgg

SEQ ID NO: 25852 - DNA, 2300 bp, Homo sapien
ctgtgggttctggggaagggtgtgctgccaccgccgcacatagccaggcctccagtctgcatgctgggaggccaggagggtggattctaacagaagccctccccagacctgtctagtgccctggggtaagtgactgacctgacctctggggtgtcagcttctggtgctcccagccagccctcaccctgcccccagcccctcgggcttcctgctccagcatcttctgaacctctaatcatgcaggccatggggtgggtatttctatcttcttcccgacctcacttggccctgtccccacctgtgagacaggcccacccattggggtgagcaggaggccgtgccaggccctgagtcattcggatttgctctaagccgccaggctcctcacgcccccagagtgcctcctgagaaagcagactcgatactgcaggccgcgcccacagcccctgaagctgcgctgggctgggcatgcagggagattccaggcatcgtttcctgacactcaccttaaaggggaagtggcagcctaggtgacaggggtcaggctgcccccaccctgggaaccggtgagaccagcccggggctgtggcctgtggccgggctggtgcagttgcagctgccttccaagctgccaggtcacgggcagtgagcgtgcgtggcccacggcagatgaggtgtgtggccactagaggcggctctgaatggcaggcacctcaagtgctgcatgggggggccctccttctctttcattgatgggaactgaggcccctgtgggatgggccgcccaggcagcagggccagggttgccctgaggtgggccccagaggcgtccccagaactgccccacgggagattgtgggggctgaggggtccacacagccaggaccaggctccctccggaaggaccctggggcggtgggatggtgggaaggcaggccccatgctcgctcatgatggggacctttcccaaggcacatgccaggattccctcggggaaacgccagcatgctgcctgggcccagctccctgtgacctgggcaccctggctggacagtactggggaggggaggggcggcctctcctccggtccctgggccagtgtcaggcgggggccgtgtgggtgtctgcagtcaccctgagtgacacctcacctcttcattctcggatattaatttgtttttgggggggtagggcaactgaggcagaggccagagggcccctggactcaccagaatgcccccagccccagctccagccccattacaccctggaacaggccctccagggactctgggctctgtgttagtgaagtgggcactgggctgggtcccgggtggggtccgaggaggggagggagtgggaaacctcttggtcagaatgtgcctcctgtgggggacaggggccatggggctctcgggcaagggctctctgggaagtgtaggatccagacctggtcaggaatagtggctgagctccgtcactgtgagcctgctggcctgggcagcccagaaacgggggtggctgagctccgtcactgtgagcctgctggcctgggcagcccagaaacggcggtggccgagctggctctccactactggcagctgccgccgcctcttctctccatgggaactgagcctcagcctgggcctgtccctctctccccagctgcccccatcatgtagactggtcccctagctggatccaacatgggcttcccatgcatgcagttgatttgagtggcagggggctctcagggaagcttccaggggcaggggcagggggcagggggcaggggggaggaggaggtgagttctggggaggaaaggcctagcttcgctccaccctctccagctctggagtgggagccctgtggccccagcctggactgctgctgcctcctcccctgcagagaaggcagcagagatgccagggccatcgtcaggaggtagggggctagctgagggctgggactttggccccagggctggggcagagtgagcaggctcaggaaggcctgggaaggcacagcaggcgtggtcctggggtgtggggtgagggtggtgcctggcaaaggaaaacctcatgtaggacgctgctgtcatcactggtgctgcaagtcgctgagctgacagttgtgccgaggactgtcaccattgggcaggcatggtggccagctcctcacttggctgaggtccagggatggacacaggtgtctggggttggggagctgcagcctgcaggtgggggccagcagagagggctgcaggtgagaggtgatgaggggcaggggccaagttggc

SEQ ID NO: 25853 - DNA, 2300 bp, Homo sapien
ttcccggggacctttgcttgtccacagttccctggtgtactccacatgctcctgtgtgcctggcatcgtgcctggctctagggtacactgaggagtgtgacaccgttccagccatagggagctcaccatgtcattcaccacctgccagaagggccaaggggcaaggatggggcctggcccatcagaggctctgacctcagctggggcacaggtggagagagtggggtcccttggggcaaccagctggattcagctcaggaactggtgggagccaggaggccagagccagcgaaggacaggacagggtgtcagccaggtggaatcccctgctgaagagaggaaaggggggacatggtcttgtgctcttggtgttgacagcagtggagagggggctttaggggcaaaggaggatgcaaagcctgggggccgctcccgagggagaagggccctgctctgtggccactggagggagcagcttgggggctgagaagccgagcccctcccatggctcagagcccctgggcactttgggtagattggggtgtggttgggggtctcctgggcgaattcagaacaccgggaggttcctgggaaggaggagctgggacactgaaggtgtcatcaaatcacagatgttgaagccaaggcccagaacaggcagatgagctccctgggccactgcggccgagggtgaggggtaggaccccagctgccctgcagcagcgtccacctcccccaggccagagtcctgtggagatggaggagtgtggcacacggctgtgtgtggggacctaggcaggccgtgggtgagggcccaggacaaatggggccttgaacctgaatggctgccctcggggagggggacacgtgctctaagcaactccagggaacaggagtgggccagcttggaggagggatatctgtctctcgcttgaccgtgggctaccctgtgaggtggtgagctccctgtcctgggaggcatggaagcagagacccgctcactgggctgcagcccctcataggggcttccaagcaccaggaagtgagtggctgttgccccctgccccacccctcctgggatcctggttctgcccacagctctgactcagatgcagctccccggggggtgagaggcccacgtgcggtggctacaggggcagcatctccacgacgcccctgtggggccatctccatgttcactgtttgcagacacccctgtggctgagcacccgatgcactcggccagctggcagggccaagggtcgatggggcggctccctgctggttgggacttgcacggccctgagcaggggaggggggcggggctggcagggtacctggtgcaggtgctggagggggatggtggggcgagtttctccacctgggtgaggtggagccacggagactgcttttctccagaaccagacgagctccagctcccaggctaggtgggtgccagctcctctcaggttggaggctgggcagggtggggtggggtggggtggggactggtagcccaggggtccagggcccagatggctggatgcacagctggggcagaggcaggagccatgccaggactgcagcctgtaagccgggcacaggtgtctgaggggaacattgcagagacgcagcctccaggttcccagccttccaggcagccttagagagtcgggggctcccccacagcggggtctgggcagccaccgccctgcctccccttcctcactgagccacggggtgccttgtgttccctccaacctggcagggaggctggggcaggggggcctgatccagatacccggcccctgggctgtggggaggagggtggaaggaggcccatcagcaacacacagaggctcccatcccagggacggcacagtccagcggcaatatttctccagggaccccaagcctggctgggacaggggccgtgccttgggcctaagatgagagagctcttctgaagggagggaggagggtggtaaccaaacccagcccccgcctgccctgcatggcccctgtgacattcccaattgctggggactgactcacccccacttcaaaggccttaaatagttcagctatttcacctgccacactgtgctgtcactctggaattctgctgtgtgggagctgaggccccacctgcagacctgctgctcacctgggcaggtgcctcctcacagcccatctgcacagctggcctgcggagtcctcctcaggggccactggccctcacctgccactgttgaagggatgcctgcccctgctctccccacctcagccatggccgtgca

SEQ ID NO: 25854 - DNA, 2300 bp, Homo sapien
agagggccacgtgaggacggagatggagagacgtggccaaggaacgcggctgcactggagctgggagaggtgggagctgcgcttccctggagcctccggagggagcccagccacacaacaccatgctcttggacgtctgcctccagagctgtgagaattcacttctgtcattttacctccgccgtggtctgtcgcacccctggaaacatgcccctgctgtgggctgcagctgcgtggagcccccacggctcagggtgtgcccctgttgcttccctaggttcagccctgggactctgttcaggccggaatgtctgcttcccaccccgcctttcccagcacatccgggacttcctgaaatacaggatccgtgctctggccctgagctctactgagagactgaatcaacacccatctgagcatttgcggttgccacaggtgccaaggaaccccttcttgagttgccaaggccccaggacacgtctggtttctctgaccctccccaccctcaccacgctaccctcctggggtcagagttggagtcctgggtgcactgtggctagtggctgcctgaaggcctctggagcacttggcccctttgtggtcaaagctgcccagccgtccagggcgggtgcccgcatcccctccgtcagcagcggctctcctctctctcccacaggtccagcttcccggggacctttgcttgtccacagttccctggtgtactccacatgctcctgtgtgcctggcatcgtgcctggctctagggtacactgaggagtgtgacaccgttccagccatagggagctcaccatgtcattcaccacctgccagaagggccaaggggcaaggatggggcctggcccatcagaggctctgacctcagctggggcacaggtggagagagtggggtcccttggggcaaccagctggattcagctcaggaactggtgggagccaggaggccagagccagcgaaggacaggacagggtgtcagccaggtggaatcccctgctgaagagaggaaaggggggacatggtcttgtgctcttggtgttgacagcagtggagagggggctttaggggcaaaggaggatgcaaagcctgggggccgctcccgagggagaagggccctgctctgtggccactggagggagcagcttgggggctgagaagccgagcccctcccatggctcagagcccctgggcactttgggtagattggggtgtggttgggggtctcctgggcgaattcagaacaccgggaggttcctgggaaggaggagctgggacactgaaggtgtcatcaaatcacagatgttgaagccaaggcccagaacaggcagatgagctccctgggccactgcggccgagggtgaggggtaggaccccagctgccctgcagcagcgtccacctcccccaggccagagtcctgtggagatggaggagtgtggcacacggctgtgtgtggggacctaggcaggccgtgggtgagggcccaggacaaatggggccttgaacctgaatggctgccctcggggagggggacacgtgctctaagcaactccagggaacaggagtgggccagcttggaggagggatatctgtctctcgcttgaccgtgggctaccctgtgaggtggtgagctccctgtcctgggaggcatggaagcagagacccgctcactgggctgcagcccctcataggggcttccaagcaccaggaagtgagtggctgttgccccctgccccacccctcctgggatcctggttctgcccacagctctgactcagatgcagctccccggggggtgagaggcccacgtgcggtggctacaggggcagcatctccacgacgcccctgtggggccatctccatgttcactgtttgcagacacccctgtggctgagcacccgatgcactcggccagctggcagggccaagggtcgatggggcggctccctgctggttgggacttgcacggccctgagcaggggaggggggcggggctggcagggtacctggtgcaggtgctggagggggatggtggggcgagtttctccacctgggtgaggtggagccacggagactgcttttctccagaaccagacgagctccagctcccaggctaggtgggtgccagctcctctcaggttggaggctgggcagggtggggtggggtggggtggggactggtagcccaggggtccagggcccagatggctggatgcacagctggggcagaggcaggagccatgccaggactgcagcctgtaagccgggcacaggtgtctgagggga

SEQ ID NO: 25855 - DNA, 2300 bp, Homo sapien
cctggccaggccgcctgggtctttccacagacgtctctagtcttactgccccagcagctgtcaccagaagggtctttccaaaacagaaatttccaaactgctggctaatgaggaccttgctctctctgcagcctggcctctgctctctgccccctcccctctcccctgcagaagccacctcctcagaggctcagggcctactgggaactcagagcctgcctgctagtctgagtgctgacagccctctggtggcctctgagggccaccaggctccggggctgagccccgcgtggaacagcacaggcctggccggctgcccttggggcctttctgccaacctgcaaggccgtccctcctgatggctcacccaggcctccctcattggagggacacttggagaggagtggctccccggtctctgtgccctgtctcctctgcactgtgctggccccctctttccagaatgggttgagggacgcctgggggcagttgccctggggagcctcagccaggcacgctgttctctggcccctggggcctgcaagggagctctctggagcggaacagttgtcccctggcccagtcctgacaagaggatctcaggacaccccgggggctgcttggacctgtggggctgggctggctgggcctggggctccccaccagcactgaggaccaaggcctgggccaggcctccatccaccactgcctggccgttccatttccaggcccaggctcctcacctgaaaacctcagacccagcgggcacctccccagcacaaagcctggcatgtagggacactgacttcagcccttcctgagaggccccttctgtgtctgagccacatggaatgaaaagtggtcttggagcaggacagtgtgaccctataaagagccccaaggctgggccagggccgccccatgcctgccgctgtggcctcagcaagaagaaagggcctagacttggggctctgccccccactcgctgtgcccccagggccaagtcctcagtttccccaacctgtaaaacaagggctagaaccaccgtaaggacagctctgctaaggacgaccccagtcccgatgaccccaaagccgcctgccacagcccagcctgcacctctgccccagggccccaccgggctggctccagccccgaacacccacagaagcccttgcagacccctctctcccacctcccggccctgtggcctccctgcagggtgtgagggtgaccgagaggccttgttcttgtgccccacctgggacccaccctgccgcctgccccacctgcagccgccgcttctcctggcctgccgcacgcacgctcgccaggtgctccaactccagcctgcggagcgcctccttctgcagggcacgtgctgcccgggcgctgctcagcgcgccctccacccggcgctggcctgtggggcaagcagggtggcttgaggggcccccatgcccctcccaggtcacaggcaggcaatgcagggctctgtggacttgagtgactggctcccacgtggaggtgggggtccatccttgcagctcaagggtcctggggctgccccagggtcccggcttcccacccatccttccctcctgcctctttcctttaattgaggggcaataagcagagaaactcgtgagtgtgaggcagtggggggcagaaggaaggggcctctctgagggggtgacgaggggcagggcctgcccggggagagccgtgtggctgtctgggggagagggtgccaggcagagggcacagccagggcaaaggcccccagtgggaactgcaggaggccagggtggggcaggggggcagaggatgctgggggccggatcgggagggccctgatgggcctgtggacgtcactcctctgtgctggggaagtcgctgctgagaactccgatgccaagcgctgacccagcctcgccaggcctggtggtttgggtgttgcccccaggctcccttcccaccgagctgccccagggactgaaagcttatagccggcagcagtggggacatggtggtgccactctcacagccactcccagggtgggcggggcagggcaagggaggtcaccttcttccgcctcagccagggctttctgcagctgccccacgcggctctgggcccgggcacacctgcactctgcctcgctcagccggctgctcagggtcgccatctggatgcgggagtcatcctgggcagaaggactgaggtcagcgggggcagtccaatgggcgggtggagggccaaggtgtctgctagagggtcggggccagctggggccgct

SEQ ID NO: 25856 - DNA, 2300 bp, Homo sapien
accccatgggtacaggtcaggagggataagctccaggttaaaaatcagggaaggttacccaggaaacagacattttctatgggaaagttggcagggaccttttgttcccttgcgaatgggccctctggaggaaaggattgaatctaagagttctctcttacagagagcagcactgggagaggaacaccgtccaccagccccagacagcctgcttccagcacccccagatggcctggggcatgcctcatggggagttggtgtggaagggatcccatgatgtcacaggctcattgggccaggcaggcgctgaggcaggcctggaacccaggccctgctctcccaaccaggctgcctccaggctctgccgtgcccagccccgagggtcatgcctgctggggctgtgtccacaggggtgacagccttgggctggagtgccaggtcagtcctctgttggccccaatgccctctgtcgggtgctggccctggcccaggattgggcagcagacctggggctcagtgcacacacttggcacaccacaaacctgccctcttagcttcagggctggagcaggcctggtttcgggccctaagacagaggggataatttgcatgggtaaagtttgttacagggtcagtggttggaactttacaaaaaataagggttcctttcttcttcaggactgagaaaaacagagagtcccctgcactgaaaaaggaagtcctgtttctttaaaaatccagttacactcctggaagtgcatgttataaagagaagagaaaagtgaaatccaaaataaataaacggccacatccgggtttcccctcctgagacaccaataaagggtttatgggtttgtgggcccctcacagctgacctcctggaactcattagctgttccttccctccccctcctcaggctccagggactcacggtgggcactgtgcccacagctggctctgcgtccccgggcagtgctgtcgcaaccagggctgatgcaagccccctgctcctccacccccagcagcgtccacgggaggccccaacaccctggctccatggcgctgggcccccttcagtaatagcagcaggggctggtgactggaccccattggctggccctactctggagggcaggtggtcctttgtggacaagctggctggtggctttcgtgactgtcctgacctgctggcccctgttccctgggcaggctgggctgcggggccttctgcaggtggcagtgagtccttgggaagggccaccctgctctggggttcacccctgaggcctcagcacctgccttccccacttcacagatgggggccccctgcctactcccagaagggggctgtgagggcatcagaaccctgggcccacagctggtgcagcccactctgcagggccagcctgggtggctgtgtgggcaccttccctgttcctgcagggcctcagcagcacacagcagagggacaaggggctgtcccccaggctccacggatggaagtccaaagacacctgcccttcccacccctccccctgcgccatccagcctgggatggtgaacaaacttcccaaggagaacaagctcgagtcccccaggacgctggaggtgggagcttgtggatgggtcgtggagccggcaacaccggctcggctttccaggcctgtccctacagctgggtgacccacaggttaccttgacctctggctctccttgatcttggcggccactctgaggctgcatgagcaagggtggcaggagagtagctgggagggggtgggtgtggggctctggggtcaaggggccatgaggaggcctgggtagtgggcaacagggcccatggatgccgagctggaggcagcccctccaaaagcatccggtccagagggaggtgggcacagcttccgcggggactctggcctcaggccaccaggactaccccaccctgcaccttggacccacagggtgggtgggagctgtgcccatgtgcccatgtgatgcaccaccctctccactcagccccgtttgtgagccagtcgcggtgcaggacactgatggtgccctggagtcatttaaacaacgcatgctgtagaaagggcagtgtccagccctgaagccctggagagccaccatgtccccatcagggaggagcccaactgtgcagacagcttgagaggccggcatcaaggagaggaggatgaacagaaagagggatcggtgtgaggccaccccgtgggctggggccatgtgcccactctgccctcacctgccaggtgggggccctgcatgcacccagacc

SEQ ID NO: 25857 - DNA, 2300 bp, Homo sapien
aaatccagcgtcatgaagcttttgccctattgtttcttctaagagttttacagtcttagctcttatgtttaggttttggctctatattgagttaatttttgtatatggtgttaggtaagggcccaacttcatccttttgtatgtggatgtccagttttgctggcaccatttgttaaaaagactgtcctttcctcactgaatgctcttgacacccttgtgaaaatcgtttgattatatatcgaaggcttatttctgggttctgtttcattccatcagtctgtatatctgtctttatgccagtaccacactgattactggagatttgtagtaagttttgaaatctggaagtgtaagtcctccaatattgtacttcctttccaagattgttttgactactctgataaaattctaaagtttgcattgatctctttgaacctagttattttatgttctgagtctgataattccagtatctgctgtttctctcatttctgtctattcctcttggtggtatcatgcttccttgggtgcccgattatttttggctgtgtcctggactgcgtatttgtaaaattatttgcaggaataacttgaggcctaagatgatgccatcttcctccagagagggttttcctttgcctctgtgtagaaggcaggggtgctgccagtctgggacccccttagtgcccgttccaggcttcacccaaaggggaagtccagagggtcttttctaaaagcatggttctggtcacattcttcccagtagcaaataatgacagcgcagagctgaccactgtgaccagcaactcattcacctgggcccagcaccctgtcaggtcagagccagtgccctggtcagctcgagctgctgcagtaaaatgccttagattgagtggctcataagcaacagaaatatattttgtatagctcttgaggctgggaagtccaagatcaaggcactgtcagtcagcctcagtgactggtgagggcccacttcctgggccatagatggcatcttcttgtgtatcctcccatggcagaaggcagctctctggggcttcttttcttagggcactaatcccattcaccagggctctacctttattgcctaatcaccttccaaaggccccacctgctaacactatctctgtgggagttcggatctcaacataggaatttggggggacacaaacattccaaccatagccccctgttataagtaagaaaaccagagcacagagaggtcggcagctgaactgtgtcactgatggatgcgcagccagtggcatggagtgtggggccaggatggaagcatgtgtatctcactgcagaggtgctgctcagaaacgttatggggctccccgctgcctggaggccgagcacaggctcccctacttggcccctgcagcctccccggccatgctggcccctggccatccccctccgctctagtgggggcacccctccccgaagcccaccttgtgtgacccctgcccaccctttcaggcttagctcagatactggggctccgcctcgcctcctgcggccccagccggagcagagctgaggagcagtagctgctgggcaggcccaagtgccccactgactgaggccagggcccaaagggggactttcctaccccctatagcagccaaccaggactgggcactccacagggcatcgggtactgcacacaggtcagagcctgtgccctgagcacacagcatgacaggagggggtggagcaggccatgctgggcccatctcagggacggggggctgtcaggccaccctggggataccctgcccaggactggcttcccctcagagggtgcctggtggcaggggctggggaggctgctgggcccacccgcctgcccacagcccccagtcaatccccgctctggctttctgcctcccaggtgaacaacaacgggatcatctccttcctgaaggaggtttctcagttcaccccagtggccttccccattgccaaggaccgctgcgtggtggcagccttctgggcagatgtggacaaccggcgtgcaggcgacgtgtactaccgggaggccaccgacccagccatgctgcgccgagccacggaggacgtcaggcactacttccccgagctcctggacttcaatgccacctgggtttttgttgccacctggtaccgagtgaccttctttggaggcagttcctcatcccctgtgagtccaggcacttgtcctggggagggtgggtgtgtggctagggcccagggtctccccgcaccagggctccctcttgctgatgtgggtg

SEQ ID NO: 25858 - DNA, 2300 bp, Homo sapien
ttcattagtaatcagggaaatgcaaatcaaaagtgcaatgaggtacattcagctggtaaattttcagaagtctgaaaagcctataccggtgagaatgtggatcaacaagatttcttatgcattgctggcaagagtataaattgctagaagcactttgaaaacaatgtggcactctgcctgttgagcaatctgcccactgttgctcatttacgtcaactgtgttccagcaattgcacttctgggtataaacctaagaaaaacttcacgtctgcaccaggagatgggaaagaatatacacagcaacattttttgtaaaagcaaaaagtctaggctgggcgtagactcatgcctgtaatcccagcactttgggaggctgaggcaggcggatcacgaagtcaggagttcgagaccagcctggccaacatagtgaaaccccatctctactaaaaatacaaaaattagtcgggcatggtggtgggcgcctttagtcccagctactcgggaggcggaggttgtggtgagccaagatcatgccactgcactccagcctgggcaacgagcgaaactccatccccccaaaaaaaaaaaaagaaaaaaagaaaacaaaaaaaggaaaaagtctagaaccaacccaaagacccagccagtgagaatgggtgaagtatgatataaccacactgtgtaatgttattcagcagtgaaaatctatgaaccacagtgacctacagtgtggagttctcttcttcatataatgctgagagaagacaatatatatcatgatgtactatgaataaagttcataaacaacaaaaacattcactattgtttaggcaatttataaaatttttaagctaattttaattacatattttactgccagaaaacctagtttttaaagacaaggaaattataaacccagagattcttatcgcaagggaagagaagggtacacggtcggatgagcccattcagcattctggctgccggggtggctgctagtcccagatgtcactaagtcattaccatttatttactttttaagcatgaaattaaactttaaaaaaataaatatttaaattcaggagcacaactcccgcttgaaaagaaagctgtggtgaatcatttaaaaccaagatttgtcccagatggactggtttcacaggtgactattatacattgaaatggcaagatgggacatgagacattttctgtcaaacccctgaggcctttgtcctgtcggcctgaaccactggaattaagtcccacagcgtcttctgggagccctggggtggtttcaagcccgccctgctgcttcacagacacagccaggcactgagccccaggcccactgccctgccccgactccaaggatatccagccctggtctctggcctttccaaccactgatgatgtatcatcgaattctgtctggcccctcaggactagtttatgtgcatcttaatttggcttaatcgtggccacattgctttattcttgggctctctcctctcagaaatcgatgagtgccggtctcagccgtgcctgcatgggggctcttgtcaggaccgcgttgctgggtacctgtgcctctgcagcacaggctatgagggcgcccactgtgagctgggtaagaggggccctggccccgctggggtgacagctgcagcacactggccatgtgcctgaggcactgggtcccccggacaggtctctgtctggatggccagggtggccactgcatgctttctcgggcccctgccagctctgacatccaagacaaagattttacaaatatcccttcctgcacctccccaggggagactgagagcccagctgagaaatgctggcctggcttcagggcgcagagaaggtgggcgtcggagagggcaggtcacagtctctgacacctggtcggtgcttccagccagtggagggaggggaggcctgccccatgagccctgcacactcttgtacctcgctagggctctaagcctgagaaacgcaggctccagggagggcaaggcccagggagccgtgcccagtcgtggccctggggagcctcccattgcggagtggcctggaggaaggcatggcctggaggtggggctttgccagcaggcagtggaggtggcacgcctcccgaggaggggtgggtttggggctgatggaagaaaaagcacatgtcctgagtagttgctcccagctgggaaaggggtaactgaagccccaggaaatgcacggaatcctgggggcatgtgggcgcctcagacttgagccagcaacacccttgacaccccttc

SEQ ID NO: 25859 - DNA, 2300 bp, Homo sapien
ccagccagtgagaatgggtgaagtatgatataaccacactgtgtaatgttattcagcagtgaaaatctatgaaccacagtgacctacagtgtggagttctcttcttcatataatgctgagagaagacaatatatatcatgatgtactatgaataaagttcataaacaacaaaaacattcactattgtttaggcaatttataaaatttttaagctaattttaattacatattttactgccagaaaacctagtttttaaagacaaggaaattataaacccagagattcttatcgcaagggaagagaagggtacacggtcggatgagcccattcagcattctggctgccggggtggctgctagtcccagatgtcactaagtcattaccatttatttactttttaagcatgaaattaaactttaaaaaaataaatatttaaattcaggagcacaactcccgcttgaaaagaaagctgtggtgaatcatttaaaaccaagatttgtcccagatggactggtttcacaggtgactattatacattgaaatggcaagatgggacatgagacattttctgtcaaacccctgaggcctttgtcctgtcggcctgaaccactggaattaagtcccacagcgtcttctgggagccctggggtggtttcaagcccgccctgctgcttcacagacacagccaggcactgagccccaggcccactgccctgccccgactccaaggatatccagccctggtctctggcctttccaaccactgatgatgtatcatcgaattctgtctggcccctcaggactagtttatgtgcatcttaatttggcttaatcgtggccacattgctttattcttgggctctctcctctcagaaatcgatgagtgccggtctcagccgtgcctgcatgggggctcttgtcaggaccgcgttgctgggtacctgtgcctctgcagcacaggctatgagggcgcccactgtgagctgggtaagaggggccctggccccgctggggtgacagctgcagcacactggccatgtgcctgaggcactgggtcccccggacaggtctctgtctggatggccagggtggccactgcatgctttctcgggcccctgccagctctgacatccaagacaaagattttacaaatatcccttcctgcacctccccaggggagactgagagcccagctgagaaatgctggcctggcttcagggcgcagagaaggtgggcgtcggagagggcaggtcacagtctctgacacctggtcggtgcttccagccagtggagggaggggaggcctgccccatgagccctgcacactcttgtacctcgctagggctctaagcctgagaaacgcaggctccagggagggcaaggcccagggagccgtgcccagtcgtggccctggggagcctcccattgcggagtggcctggaggaaggcatggcctggaggtggggctttgccagcaggcagtggaggtggcacgcctcccgaggaggggtgggtttggggctgatggaagaaaaagcacatgtcctgagtagttgctcccagctgggaaaggggtaactgaagccccaggaaatgcacggaatcctgggggcatgtgggcgcctcagacttgagccagcaacacccttgacaccccttctctgtgcagagagggatgagtgccgagctcacccgtgcagaaatggagggtcctgcaggaacctcccaggggcctatgtctgccggtgccctgcaggcttcgttggagtccactgtgagacaggtaggggctccctccagtgggccccacatgcagagcctgggcctctggaagatcagagaggaggtggggcatccccacattccctgctgggcaggccacctggggagagggacccccagggctgcggccaccttgggagggaggggtggaggtgagggtgctggggagggctgaggggcgggacctgcccactgcccctctctcctggcctccgcccctagactcctcctttcccttcttcccgctgtcctctcctccctcccccagactccccccttgcagcttgggcccactctctgggtgttctccagaggtggacgcctgcgactccagcccctgccagcatggaggccggtgtgagagcggcggcggggcctacctgtgcgtctgcccagagagcttcttcggctaccactgcgagacaggtagggcggcaggcctgcctgctccccgccctctgcccgcctgctccccgccctctgcccgcctgctgcccgccctctgcccgcctgctcc

SEQ ID NO: 25860 - DNA, 2300 bp, Homo sapien
atgtatcatttccatggtgcttctgggaagatagatctgaaattgccacttgctctgtggaaggagaggatccttgtttgtttttaaatgtggacttaaattgggtgcagctagctccttgagtttctggagtatcctgaaattatatgcttgccttttttgaatgttctgcagggaaattaaagagggtgctttactgttgccctgaaattttcaccatgcgccagcaggacattaacgacactgtcaggcttctcaaggagaagtgccttttcacggtacagcaagtcaccaagattttgcacagttgcccctctgttcttcgagaggacctgggtcaactggaatacaagtttcaggtgagaatgactgatagcgtgattagcgtagtttcaggtgagaatgactggtaatgggattagcgtagtttcaggtgagaatgactggtaccgtgattagtgtagtaacagcaagtttctcaggtttttcaaatgtagtgaaggtcagttatatggataagaagcctcggacacctcatatttgagtggaggaagtgaaagactagattctctgcatacatcagccaaagagaaatctttaatttctttactacagatcaaacctattcttcaacttttctgccattaataatgaatgatccagtcctattcttagagtctaagtggggactctgaaatagctaattttaaaatagctgaaaccttcctgtccttagaatctattttgcatgttgattttgaaaatgtaattttaacagttgtccgattttttggtaataattatgacaacttaggtcgaatttctagatgttttctgaatgttttgcctattctttccatattcatccttttccttccccatttaaagaaaaataccacctcttccttctgccccttctccctcctgccccttttccctcccacccctttatttcctgctccatgtttctcaggatgaatttgaaagtgttttgaaactgctggctgtcacacaaatgtcagtatcctagactgggtattcgctgttgtcaattaggcaattctttttgaatccttttgtacaacttaagtttttatggtttatagaatgataggtttcaatactctgtatctgggactcctaagtgtgtttgtgtcttccagtatgcatacttcaggatgggaattaagcatccagacattgtaaagagtgagtacttgcagtattcactaaccaagattaagcagagacacatttacctggagcgcctgggacggtaccaaacccctgataagaaggggcagacacagatccctaacccattgctcaaggacattctcagagtttcagaagctgagtttttggccaggacagcctgtacttctgttgaggagtttcaagtttttaagaagctcctggctcgggaggaggaggagtctgagagcagcacatctgatgacaaaagggcaagtctggatgaggatgaggatgacgatgatgaggaggacaatgatgaggatgacaatgatgaggatgacgatgatgaggacgacgacgaggcggaggacaatgatgaggatgaggacgacgacgaggaggaatagctgtgatggaaggactagagcgaaagggcccagagatatcaaggaagcttttcattctcttaaagcttttgggtcctttacttgaatcttctcaagttattttttattctaaaactggtctcttgatgaaaaaaattataagtcacctgagaggcagacagatcaaaccaaacaggaaacaggaaatgcatgtttgatctgttgtcacgtgtctgtggggagggccctgtcccatcctgaataagatacttatgttgagctattcacatcaaggggactcaatatatcaacaattggttttatttttttctcttttgaatatgttggtgataattccgtgacagttggaagatggggttcattcttccggttcaggaatcactatgtatttccttcttgtgataaaaataaaattacgagaaggcaatgtgaggttttagtacatcatagcactttattttatgaaaacatgtagcagattttccacaaaaatgcttatttttaatccaaaagtatattgcttcataatggtattcagtgcacagcagagtaaaagaagttaattcatgatgtactggttaattttgcatggcttcttaaggccagcaaaatgctggcagttttctttatctttgtgaagaacaggcccttcctgtttggggaagttggcttttatgtcagctcttggccagtggt

SEQ ID NO: 25861 - DNA, 2300 bp, Homo sapien
ataatcactaactcaaatgttaggaaaattttaattaacagtttaaatagttgactttaagtttcccattactgaattttgctcagctatccctaggaaggcctggaatagtcccagtttacaccagttagtgcggttttaatagggcctctttcactcaaggtgccctggcttggagaagatatatggtgaccctggtaaccaggacgtcagcattggtgttgtgtgtcctcatgattactattattgttattactgttatgatgacgatggtgatggaactccttttcattgagttcagcttgagaatgttagttgtgaatgcttcaatgactattttattatagaaggaaacatcaacccaaaccagcaatatggaggaaactactctcccatattactctctgatctttccagtaaatgcctgggaaattcttttccaagtgaggagggcaagaggagacccaaaatacaaagttggcacctttcaggtgggaggccagaataaagcaggaatatagggagggaaggatggtgagtctgaggagtgtcaggaagtcagtggggagatgtatcatttccatggtgcttctgggaagatagatctgaaattgccacttgctctgtggaaggagaggatccttgtttgtttttaaatgtggacttaaattgggtgcagctagctccttgagtttctggagtatcctgaaattatatgcttgccttttttgaatgttctgcagggaaattaaagagggtgctttactgttgccctgaaattttcaccatgcgccagcaggacattaacgacactgtcaggcttctcaaggagaagtgccttttcacggtacagcaagtcaccaagattttgcacagttgcccctctgttcttcgagaggacctgggtcaactggaatacaagtttcaggtgagaatgactgatagcgtgattagcgtagtttcaggtgagaatgactggtaatgggattagcgtagtttcaggtgagaatgactggtaccgtgattagtgtagtaacagcaagtttctcaggtttttcaaatgtagtgaaggtcagttatatggataagaagcctcggacacctcatatttgagtggaggaagtgaaagactagattctctgcatacatcagccaaagagaaatctttaatttctttactacagatcaaacctattcttcaacttttctgccattaataatgaatgatccagtcctattcttagagtctaagtggggactctgaaatagctaattttaaaatagctgaaaccttcctgtccttagaatctattttgcatgttgattttgaaaatgtaattttaacagttgtccgattttttggtaataattatgacaacttaggtcgaatttctagatgttttctgaatgttttgcctattctttccatattcatccttttccttccccatttaaagaaaaataccacctcttccttctgccccttctccctcctgccccttttccctcccacccctttatttcctgctccatgtttctcaggatgaatttgaaagtgttttgaaactgctggctgtcacacaaatgtcagtatcctagactgggtattcgctgttgtcaattaggcaattctttttgaatccttttgtacaacttaagtttttatggtttatagaatgataggtttcaatactctgtatctgggactcctaagtgtgtttgtgtcttccagtatgcatacttcaggatgggaattaagcatccagacattgtaaagagtgagtacttgcagtattcactaaccaagattaagcagagacacatttacctggagcgcctgggacggtaccaaacccctgataagaaggggcagacacagatccctaacccattgctcaaggacattctcagagtttcagaagctgagtttttggccaggacagcctgtacttctgttgaggagtttcaagtttttaagaagctcctggctcgggaggaggaggagtctgagagcagcacatctgatgacaaaagggcaagtctggatgaggatgaggatgacgatgatgaggaggacaatgatgaggatgacaatgatgaggatgacgatgatgaggacgacgacgaggcggaggacaatgatgaggatgaggacgacgacgaggaggaatagctgtgatggaaggactagagcgaaagggcccagagatatcaaggaagcttttcattctcttaaagcttttgggtcctttacttgaatcttctcaagttattttttattctaaaactggtctcttgat

SEQ ID NO: 25862 - DNA, 2300 bp, Homo sapien
gctgggattacaagtgtgcgttatcacgttacctggctaatttttgtatttttagtagaggcagggtttcactatattggccaggctggtctcgaactcctgacctcaggtgatccacccatctcagcctctcaaagtgctgggattacaagcatgagccaccgtgcccaacccactgcatatttttaaagtatggttcgagagagcaaagttttcacacaagactgaaggtgatgtcaaattttttttttttttttttgagaagtactttcgcttttgttgcccaggctgcagtacaatggcgtgatcttggctcactgcaacctccgcctcccaggttcaagtgattctcctgcctcagcctcctgagtagctgacactacaggtgcccaccaccatgcctggctaatttttgtatttttagtagagatggggtttcaccatgttttccaggctggtctcaaacccctgacctcaggtgatctgcccacctcggcctcccaaagtgctgggattacaggcgtgagccaccacacccgggctcatgtcaatttttcatagtaatccccatgtcccagctgtcattttatttctagagctagacaaactgttcaggttccttgattctttccagggagttggggtggctcatgggattttcttaggcttttggtgtagcattaacacaatttattgtgagatgttgacagttgagtattttgagaagaaaattacattataaaaaacaacaaaggcaaccaattttttttttccttttgttttttgagacaaggtcttgctctgttacgcaggctggagtgcagtggtgcaatcatggctcactgcagcctcaacctcctggactcaagtgatcctcccacttcaggctcctgagtagctgggactacaggtgcacgccactactcccggctaattttttattttttgtagagacaggattttcctatgttgctcaggttggtcttgaactcctgagcccaggcaatcccccccacctcagcctctcacagtgctgggattacaggcgtgggccactgcactctgccaaagcaaccaattctttagtttctacacggattagaaccttccttttctttgacataatccttttgtcaaaagacagttttacataaattgtttggcaccccactccatgcctggcgcaaagcagatatgtaaatgtgtgcccatgcaagaatcaaatcctttatgtcagtccagaatgaagtagataaaacaagaaatgcttataaattaaggctttggtggcaggatttaggcagctgagaaagcacacctttttattcttcacaagcatcaccttgtgaaagatgcctacgctcttaggtcgagagaggaaatttaagaatgaatacacattgggctaaaactttactatatttcatcctaagagggaaccagacctcgaagttgggaaggctcttgcttataaagggaaatgtgccgtaattcctgtcattttacttgggtcttttaaaaacggcaaattctcatcttccactggctgagagtaaaaagaaagaaaagcggtaaagacttctttttgtgcgtaggtggccccggtgttcacgctgaatacagatttttacacaataaaatcttaaatatctctacatggaacggaatccatttttcctgcctcgggaaggatttctgcgctctcgggtgaagttcccgaagcaaggaaccagttcccctctacctgtactcttgagaggaattctcaggtcatctgaaacacaagtatgggccaggacgacccattcgttcacgcggcccagagctctgcgaaacgggacacggcagtgcaacgggaacaaccggacaccgaggcccccgaaggctgaggccgcggcagaggcggcggcacggtgacgggcgcgactccggccttccggctttctaaggggcggccccgggacacctgagccccgcggggccgtgaacgctcagcacagctccgggccggaatcacgatccaccacaccgcgctggcgctgggaacggcgtcggtgacggaccgggggccggaagtgaaggacgggggaggaccgctgcttccggcgccgtaactgctgccatcttctccgcgctatggctgcgttcggccgtcaggtaagctcgagctgggcgcgcgggcttctccgggtcgcaggcgggcgggcagcgacgcagaggaaccgcggccgccgagtgtttcacggccaggtcgtggagccctcccggaggtccgtgcacgctgacctggttttggcatc

SEQ ID NO: 25863 - DNA, 2300 bp, Homo sapien
ttcaataaaataccgcggggctgaccatacaagaaatcaagcactagagaaagtcccgaggcagaggattcgtgctgaaggtggagcccttggctggaggggctgtcgctgaccagccagactccatgtcactggagtgggccagctgagcctctgctctgctgtggggagaagcggcgtccttgggtgtgtggctgagtttgcatctctgcagtctggggagcctgtgagtcgggggccggcctgggcagggcctcctctcgggggactttagagaggaaagcaaaacggaaaggaagattgtggttcatttgtagggcctgagtggagactgtctgctgacgtgcccgatcactgtctcatctgcctgtaaaccaaatgtgtctatgtgtatgaaatagactttattaagtcagaaatagatagcaggtgttttccactaacacctacatgtattttagagaggtgtggttggaatgcatctctaggtgagttcatggttagagagtcggatgatcacagcactgcttggaccctcctggccctctgctgcagtgctctgctgcaccgcccatatctgctccatgtggttctctaggagggaagctgatgctgcccccacaggagaggcacacggggtccctcacagacctgctgcacctgacctggtggcctgaggccagggcatttgctcgcagtcacgcacgagctccatgccgtgccttgggctctcgggagggcctcagcattggggagaggagtggctgggctctggatcctggtgtctgcttaggccatatttcattaggaggtgcaggttccaggctgcacaccctgagtcctcagagcccagcagcctcagcctgcgccaacctctccatgccaggcagcgttgagctcttctgggcctggatgccctgtgtgcagagtatggaggaagtgaaaatgggctcttccccgctagaacctccatgcatcttcagagccaccaaacagcgtgaaatatcgaagggggttggtctaagaagggccgtggagtttcccttcagatctagtttggttgccctagagcctggtgggcgctggtgggctctgcctgccctgcagtggttgtcgtgccctccgtgctggagggaactgcctgtcccctgtccactgacccatgatgcctgctgcatggcttgtcaccccttcctgtacccaggccgtgaagcttggggagggtgcaggggggatccaacctgggcgagagctcagtgctgcttggccaccttggccctgcctcccagagctgtggctcccaccctctccctgagcgcctgccctgccagggctctgccctgcctcctggcctctcctttctggctgtgagcggtgtactgctcctgggcctgcggggctgcaggcctcctctcaggagctccttcctccctcctgcgtcctctccccatctccctggatgaaagggtttctgagttcttattctcaatcccatcctcagggccctggcttctgtcttgtcatcttcatctccgtctactccagggtcggcagactgtggccttaggtccctcttccccttcctcaggccctggcagctgccattctgctattttctctatgaatctgactactctagggacctcctatacgtggaatcgtacagcatttgccttttggtgactggcttatttcactttgcataaagtcctcaaggtccatccatgttgtggcctgtgccagcatcttccttttcaaggctgaatttgattgcgttttctggatatgctgtacttattcatctgtcagtggacatttgtgttgcttctaccttttgcttccatctttatgttgttcgtgatgctgctacaaacgtgtgtgcaaacatcccctgcctcttgtttctataaataaagttttattggaatggagctgtgctcatttgcttatgtgtcgtctgtagctgcctttgtcctacatgacagagttgagttgcagtggggaccatgtggcccaaaacctgaaatatttactatttgacccttcacaggaaaagtttgccaacctctgttctgttctattggatatttctcttcagcttctaaacatcttgaaatctctctaaaaaacagaaacaacacaaaaacaaaaactgctgaaactgattttcttgctctagcccctacagctctcatccgtccgctcagcttccctgcggtctgtgctagccaccccaccaccctgctgactcagcctgggggcccgactttcacccacgctgctgctctggcctctgtgat

SEQ ID NO: 25864 - DNA, 2300 bp, Homo sapien
agaaactgactactaagaagaaaaaaactaagatattcaccatgtgttggtgtctgtttctttaagaaataacagatactgcttttttcaccctgcaatattaccatgaactgagaatgaaatctactctcttgataaaacttgcacttggagattttaatgttcagtatgggaaatcttgtttgtgctttggtaaatttctgaaatgaaaatcaggtaagcagaagttgaaaacgttgcagtgcctggagtttgggcctcctggaggcaggtgccccacccatactggtcttttgggttcatggcatgcaggtgtgaacctgtctgtttccacaggtggacatcatcagccgtagtggggagaagattccagtgtctgtgtggatgaagaggatgcggcaggagcgccgcctatgctgcgtggtggtcctggagcccgtggagagggtctcgacctgggtcgctttccagagcgatgtgagtgtgcaactttgcctcatgtctcatggacgctggagccggcgtcgttctcctcttcagcaagtgctggtccctgtctcattcctttgggaagaaagagaggatgaggagcctggagggtctgcccagtggtaccctcgctgattgcgtgtgcttgggcagggaacgaacttcctatacttcagttcctcacctgtgaactggggcataatcataactcctcataagattgtttcaacatttaaatgagataatatatgtaaaccccccaggatagtagctggcattagagacagccctcatatgtgaactgggatgttattaatgagctgtggtgtgggccaggctcctgaagaacaagaaggcccacaatttaggtacgtctctggtagaaggagacagatgatgaagctcttatcaaattcatgtgtatatgtctcttgcccttccgatggagaagtcatgttggggtcttgcttttggcttgaacatattgaagcttagttaaatttacagctggagcacaagaagcttttatgataagcacggggcttttcctccagggcaccgtcacgtcatgtgacagtctctttgctcatcttcacgggtacgtgtctggggaggacgtggctgggcagcatatcacagacctgatcccttctgtgcagctccctccttctggccagcacatcccaaaggtagggctcctgacctcccgcactgtgtgatggggtggagttcttagctctgaatccataactggagacgcagaccaagggtttctgaaggcaagggtggccttaggggtgggacatgctcagttttgagcttcctgtgcgctgaggccttgaccaagggccggagcctatgtggtctcccagctgaccactcttgtcccctgagtcttctcccaggagctgggccacccacagaggtggatgctgggacgctgcccaaggctgaggggtgggaggtaacatccacagctgcgcagctggtgtagtgctgcctgtggggccagtatcctggtgccagatcaaggatggcacagttgccagtggcgtggctgagccccgagcctgagccccacagtcctccctccctccctccctgctggtgcccggcccctcactggggtgtctcacttgccctggggttgctgtgcctggggcggctctggacactgagtcctccccacccacagaagggctctttcctgggccagctgggcctgggaggagagggaaggcagagcagtgtgggtgtgagatgtcctggggaccttccccgatgacgtggggtagaagtcgggtcggacgcagcacagactcagtgctctgtccacgtgaaacacggcttaagccaaacgacaagcctttctttcagaatctcaagattcagaggtctgttggaagagccagggacggtaccaccttccctctgagcttaaagctgaaatcccaacccagcagcgaggaggcgaccaccggtgaggcggcccctgtgagcggctaccgggcatctgtctgggtgttctgcaccatcagtggcctcatcaccctcctgccggatgggaccatccacggcatcaaccacagcttcgcgctgacactgtttggttacggaaagacggagctcctgggcaaggtggggctgccctgggcgcctggctcccgttccctgggaggaagctgctgtgctctgcagtgcgggcttgcgtgtggcacaggcctcgcacccggcaagctctccagctcgctcctttacccaggaaggaccttgggtccagggagggaggtccctgctcatggctgccaagc

SEQ ID NO: 25865 - DNA, 2300 bp, Homo sapien
ctctggcagctgtgtgaagtctaaagcttcgcttcgcttctcttttcagaagacagatggagctcctattgtctatcatcactggctgcccagaatatttgtacaagtaaactgcactgccctgctgcccctgagcacacggacccgtccgaaccgcggggcagtgtgtcctgctgctccctgctgcggggactgtcctcagggtggtcctcacctctgcttccggcccctgtgtgcaaccctaacaaggccatcttcacggtggatgccaagaccacagaggtatttgcttctcttttagatccagctgtgtagatgtggatttgtggtttgtgccttaaacctgggatttgtgtgttttaatgcaattagaaaaacatttgggcacttcgggaggtgggaagtttgcttgagcccaggagttcaagaccagcctgggcaacatagcaagatcccatctctacaaagaaattagccaggtgcggtggcacacacctgtagtcccagctaccagggaggctgaggcaggaggatcacttgaacccaggagttcaaggttgcagtgagctctgattgcgccgctgcagtgagctctgattgcgccactgcactccagcctgggcaacagagtgagaccctgtctgtcaggaaaaggctggcttctgcatggtcgtcctgggctgttctgggcagctggtggagctgctggggatgtctgcatccttgctcctctttgtgattcctcagatcctggttgctaacgacaaagcttgcgggctcctggggtacagcagccaggacctgattggccagaagctcacgcagttctttctgaggtcagattctgatgtggtggaggccctcagcgaggagcacatggaggccgacggccacgctgcggtggtgtttggcacggtggtgagtggatgcgggtgcagcgttcagtctggcctcaagaccagcagtgtgtggcaggaacagctcagtgttccctaccaggagctctgctgggggttgggtggcaccaggacatctcagcttcttcagctgaaaatgtcatcccaggcgccgtttccccgcttcagctgcagtgggggtgggggccctttaagaacgaatcatcgcaggaatggacactgtggctgtggctggactcctgggaggtgtcgtgggtggcccttgctttgtctgagggctgtagcttcactaatgttttgcagtcctgccgggcagcacatcagatgctcaagagtaatatggttttattgtctattgatttttacattctgtttggtgtttgtgggagcgggcgggggtgttggcctggaagcatttccctagacagtgttgattctctcacctgtgccatgtgtccaacctggatgttgacaggtgagctgagttggatgtggaggactgagcccaaggcatggaaaaagcccaaggcatggctgattgtagggtttcccctcgtcagccggtcggggactgggggagtagcgttggagggcagtggaggttggggtatgatctgaggctctagtagtcatccagatcctccaggttgcctgtttcccacctagtgtgtggctttcacacagaagaccccattgcttgaactgaactgatgtcacaggcttaggaccaattgtatcagaaaatcactggttcaagaaactgactactaagaagaaaaaaactaagatattcaccatgtgttggtgtctgtttctttaagaaataacagatactgcttttttcaccctgcaatattaccatgaactgagaatgaaatctactctcttgataaaacttgcacttggagattttaatgttcagtatgggaaatcttgtttgtgctttggtaaatttctgaaatgaaaatcaggtaagcagaagttgaaaacgttgcagtgcctggagtttgggcctcctggaggcaggtgccccacccatactggtcttttgggttcatggcatgcaggtgtgaacctgtctgtttccacaggtggacatcatcagccgtagtggggagaagattccagtgtctgtgtggatgaagaggatgcggcaggagcgccgcctatgctgcgtggtggtcctggagcccgtggagagggtctcgacctgggtcgctttccagagcgatgtgagtgtgcaactttgcctcatgtctcatggacgctggagccggcgtcgttctcctcttcagcaagtgctggtccctgtctcattcctttgggaagaaagagaggatgaggagcctggagggtctgcccagtggtaccctcgctgattgc

SEQ ID NO: 25866 - DNA, 2300 bp, Homo sapien
ctgcagtgagaggacacagcaccactgcactccagcctgggccacagagcaagaccctgtctcaaaaaataaaataataaaaaagtaatataactattcagaatatattgtaaatgttacagaagtttctttgtaaaagtaactaacatgaaatggaaagggggaaaaaaagcaaagggagggtaagggcatgcaattttttgtccttcatgggagaaagtaaataaataccaactaaagttgtggaagtttaattaggttactgagagttacaagcctatccaggagggaaactgatgggaccctctgcgggagcggggaggacagcaggaaagatgcatcctttttcccgctgtgcctcctgggcatctgaagtccacgtgggccagtttgtcactgaacagcataggcccctggagcctcccgtgcactccacagccacagcctggcctcaagaaagaacagagtctggcttcacatgaccttagatcactaaattttgactcagacgttaaccagaaatacctgcacgtccaggcccaaatttttaaaattgtcctttgtatccactgtgagctgcagacacgggaacccaaacccagcagacagcacctaatggtgccaccgagtaaccatattcccattgctagttttgattccagaagacacaagtgaccccacctcagaccaaacagaagcaaggacaactttgcagggagcatctcggcgaacttctagaagcaactgtccccctcccaccagaacataagctaagaagcaaacagctcccattgctgtcagcacagctgtacaacaaaaaggagaaccagtttcaggatgaggccaacaaggtgaacagtgcagtagaacacagcaaggatgtcagtcctggaggaggcacctgcagagccgggccctaccaagcagagtgaagaagtctttcagaggcaaagcctcccagagaggagttcagtacccagaagagtaggtggacgtgggcctggaagggccaagcatgagcccagagcctcctatgcctgcccaaagtcttaattttatccccaaaatgaacttttaaggattcaatgcttaggagtaacatggccagatatgcattttacaaagattactccagggaccatgtcggtgcaaggctggaaagcaggagaaaggctacagtaatccaggcaagaaattataaagtcttaaattaaggtagcagcagaaagatgaagagagggaacccctaagagaaaaatggacatcgaatggtactgagatgcggaaggtaaggacgagaaaggcctcaagacggcagcgcaggcccctgccgtactctgggaaagaaaaattagtgaaaaaattaaggctcaagtccaggtctttgctgtaaccacgagcgccggcggcgcgcgcccccgaccccgcggcgccggctgagcccgcagggacccacacgcccagtgcaggaggctggcgggatccgggctggttctcctggagctcgccccgcagggccggctgcggtgaagagagcgcagggtcccgaggcgacccgaggcgcggggcctcggcgcccaccgggcaggctacactgaagggcaccccgaagacgctgggggcgcggggcccagggccaacggccgcaaccccgccgcgatttgggcacggagaggacgcgggctcggcggtgcgcgaagggcgacgggcgcaggggcgggagacccggggtcgggctggtctaagagtcgggcggcggatcctcctgggccaggggcgcggagccgcgcaggccccacagccgccctggggagatggcggagcccggcccgctctcccgagcgcaggtatctcacctggatcaggcgagggtcacgccaagccggctacacaccacggaaaggagcccttccgcgcttttatcccaccgaccaatcgcacagcgactagcaccgattgacaagctccacggaccagccacttgcgcgtatgggcgggactaagctagccagagtctagaagcccgcgctaagggttgctagggacgcaccaaacacccctacggcgcttcggaggagccaaaggaataatgggcgcctccgcccccgggccgggcagatgcggtttcctcccgactcgcgatcaaaatgggtgagtagcgcagagctcgcctcttggaggcctctttctgaaggcggaggacgcggggcggctcgttcatgggccgggtggctccgcagggtagacgaaggctgcagcgtccgcactgggctgggaacgacttgcaaggggagcccagc

SEQ ID NO: 25867 - DNA, 2300 bp, Homo sapien
agaaccagtttcaggatgaggccaacaaggtgaacagtgcagtagaacacagcaaggatgtcagtcctggaggaggcacctgcagagccgggccctaccaagcagagtgaagaagtctttcagaggcaaagcctcccagagaggagttcagtacccagaagagtaggtggacgtgggcctggaagggccaagcatgagcccagagcctcctatgcctgcccaaagtcttaattttatccccaaaatgaacttttaaggattcaatgcttaggagtaacatggccagatatgcattttacaaagattactccagggaccatgtcggtgcaaggctggaaagcaggagaaaggctacagtaatccaggcaagaaattataaagtcttaaattaaggtagcagcagaaagatgaagagagggaacccctaagagaaaaatggacatcgaatggtactgagatgcggaaggtaaggacgagaaaggcctcaagacggcagcgcaggcccctgccgtactctgggaaagaaaaattagtgaaaaaattaaggctcaagtccaggtctttgctgtaaccacgagcgccggcggcgcgcgcccccgaccccgcggcgccggctgagcccgcagggacccacacgcccagtgcaggaggctggcgggatccgggctggttctcctggagctcgccccgcagggccggctgcggtgaagagagcgcagggtcccgaggcgacccgaggcgcggggcctcggcgcccaccgggcaggctacactgaagggcaccccgaagacgctgggggcgcggggcccagggccaacggccgcaaccccgccgcgatttgggcacggagaggacgcgggctcggcggtgcgcgaagggcgacgggcgcaggggcgggagacccggggtcgggctggtctaagagtcgggcggcggatcctcctgggccaggggcgcggagccgcgcaggccccacagccgccctggggagatggcggagcccggcccgctctcccgagcgcaggtatctcacctggatcaggcgagggtcacgccaagccggctacacaccacggaaaggagcccttccgcgcttttatcccaccgaccaatcgcacagcgactagcaccgattgacaagctccacggaccagccacttgcgcgtatgggcgggactaagctagccagagtctagaagcccgcgctaagggttgctagggacgcaccaaacacccctacggcgcttcggaggagccaaaggaataatgggcgcctccgcccccgggccgggcagatgcggtttcctcccgactcgcgatcaaaatgggtgagtagcgcagagctcgcctcttggaggcctctttctgaaggcggaggacgcggggcggctcgttcatgggccgggtggctccgcagggtagacgaaggctgcagcgtccgcactgggctgggaacgacttgcaaggggagcccagctggcgccccggagccagccagctggctagcggccccaccagcgcaagtgccccgcacctgcccgcctgctccgagcgtcaagagaaggcggcatttcgcatgggtaaaatccgcgcggggacgccgggagaatgttgttgctcttgccgttcggcccattgtacagacgcagccagcgaggctcgcagaggtcagggatgcacgtaggactggcccgcaccttgcagccacggaaagatccgcctggcccgcggcccctccacgcctccgaggtcgagacagtgacataagtcaactctcaagcccagggcgtctctccactctgcctagacgtccactccgtctgcctgcagctacggctctgtgcgtcccgcttcgactccctctgctttccttcccagcttctcgcctccagactgttccggctccgccgcctgaaattacctgctctgggggaggcgcggcgcgcggcctcatgacggaactacaactcccatgaggcgctgggcccacgcaggcgcggcgcggctgaagtcgccgcgccggaatcccattggcagggccggctctgaggcgggagccctgattggctgaggggtctgaggcgacagattccggaaaggggaagagcagccaacatggcggcggaacgcggcgcggggcagcaacagtcgcaggagatgatggagggtgagcggcccctgcgggcggcggcccaagggcccagcgggcggggggagctgcgggctggaactgctccgtgcctgagagaaactccacgtcctgcctctggccgccgccgcgcggccccctgacagctga

SEQ ID NO: 25868 - DNA, 2300 bp, Homo sapien
ctcctccacaccttttgacagcagttttctccgtcttgagtgattcttgctcttttccctcaccctatccccaacctcgttgccttcgagttattcttcaggctccagctcagagctcgccctgcttctgcagctgtcaccactccctaacatgtcaggccttcctgctgcacccgccctccttccccagctccacattcctcttccctacccctttcacataaggcagtgactgctcttctgggaggtctgtacccctcaccaaaccatgggacccaaaagtacttaagctgatgacacaactgattccccagttgctaagtgggtgtgtgcacgcatttttacacacatactgtacgtgcacgtatatgactgtacctacagatatgcagaaaattataaacacatgtgtacgtataacatatacatatatgcatgtggtttttttttccaacaaagtgaatgaggaggaagaaagttgaattcagactttttggaactatgacagctttgaaaacaggtatcaccttgtgtaactcaatcttccggttccttgttaccccttcccaacagtccattcgatttcaagagaagacccttctccaccctcaccacgtgaaccaaggagcagactctggtagatcccagcgcctcagtttcctcgtcagctgaccgaggaggctcccccgcccgtcaatctcagaggctcggggcgaggctccaactggactgaatggagccaccgcgtcccattcagccccacccccggcctggcctcgcgccgccgctctccccctagctctgggtccttcccggccgctgccgcccccgggccggggctcccccgaggtccagcgcctcccccgctcccccgggtccggctgtcagctgtcagggggccgcgcggcggcggccagaggcaggacgtggagtttctctcaggcacggagcagttccagcccgcagctccccccgcccgctgggcccttgggccgccgcccgcaggggccgctcaccctccatcatctcctgcgactgttgctgccccgcgccgcgttccgccgccatgttggctgctcttcccctttccggaatctgtcgcctcagacccctcagccaatcagggctcccgcctcagagccggccctgccaatgggattccggcgcggcgacttcagccgcgccgcgcctgcgtgggcccagcgcctcatgggagttgtagttccgtcatgaggccgcgcgccgcgcctcccccagagcaggtaatttcaggcggcggagccggaacagtctggaggcgagaagctgggaaggaaagcagagggagtcgaagcgggacgcacagagccgtagctgcaggcagacggagtggacgtctaggcagagtggagagacgccctgggcttgagagttgacttatgtcactgtctcgacctcggaggcgtggaggggccgcgggccaggcggatctttccgtggctgcaaggtgcgggccagtcctacgtgcatccctgacctctgcgagcctcgctggctgcgtctgtacaatgggccgaacggcaagagcaacaacattctcccggcgtccccgcgcggattttacccatgcgaaatgccgccttctcttgacgctcggagcaggcgggcaggtgcggggcacttgcgctggtggggccgctagccagctggctggctccggggcgccagctgggctccccttgcaagtcgttcccagcccagtgcggacgctgcagccttcgtctaccctgcggagccacccggcccatgaacgagccgccccgcgtcctccgccttcagaaagaggcctccaagaggcgagctctgcgctactcacccattttgatcgcgagtcgggaggaaaccgcatctgcccggcccgggggcggaggcgcccattattcctttggctcctccgaagcgccgtaggggtgtttggtgcgtccctagcaacccttagcgcgggcttctagactctggctagcttagtcccgcccatacgcgcaagtggctggtccgtggagcttgtcaatcggtgctagtcgctgtgcgattggtcggtgggataaaagcgcggaagggctcctttccgtggtgtgtagccggcttggcgtgaccctcgcctgatccaggtgagatacctgcgctcgggagagcgggccgggctccgccatctccccagggcggctgtggggcctgcgcggctccgcgcccctggcccaggaggatccgccgcccgactcttagaccagcccgaccccgggtctcccgcccctgcgccc

SEQ ID NO: 25869 - DNA, 2300 bp, Homo sapien
gggagagaaagttctactgcatgacaatctggcacaaaaaccccagtaagaggaggagtggtgtgaggttagcaaaggcttagctaacgaaggttggccaaagtgaagcctgagggcagcagagagggtctggaacatgggacagtggctctgcatgtaagaaaatgactttggtgtactggggatgatgggctggtgaacagggacaatcaatctagcctagagatgatgaaggtctgagttaaggtactggcaatgggaatggaggacgtatcggagatttggagatactttcaaaagtaaaagtcagagctccttgactaacaggacatgggtgggagtgggacagtgagaaaagccgggcttttatatctgtcatttaccaagacatggaaacagctgaagagggagtgggaggatatgaagaggcgcttcttaaaaagactcaaagggtatgaagtccaagacccttaacactaccgcccccatccccaccacatacgatttggtcaaactctcctccacaccttttgacagcagttttctccgtcttgagtgattcttgctcttttccctcaccctatccccaacctcgttgccttcgagttattcttcaggctccagctcagagctcgccctgcttctgcagctgtcaccactccctaacatgtcaggccttcctgctgcacccgccctccttccccagctccacattcctcttccctacccctttcacataaggcagtgactgctcttctgggaggtctgtacccctcaccaaaccatgggacccaaaagtacttaagctgatgacacaactgattccccagttgctaagtgggtgtgtgcacgcatttttacacacatactgtacgtgcacgtatatgactgtacctacagatatgcagaaaattataaacacatgtgtacgtataacatatacatatatgcatgtggtttttttttccaacaaagtgaatgaggaggaagaaagttgaattcagactttttggaactatgacagctttgaaaacaggtatcaccttgtgtaactcaatcttccggttccttgttaccccttcccaacagtccattcgatttcaagagaagacccttctccaccctcaccacgtgaaccaaggagcagactctggtagatcccagcgcctcagtttcctcgtcagctgaccgaggaggctcccccgcccgtcaatctcagaggctcggggcgaggctccaactggactgaatggagccaccgcgtcccattcagccccacccccggcctggcctcgcgccgccgctctccccctagctctgggtccttcccggccgctgccgcccccgggccggggctcccccgaggtccagcgcctcccccgctcccccgggtccggctgtcagctgtcagggggccgcgcggcggcggccagaggcaggacgtggagtttctctcaggcacggagcagttccagcccgcagctccccccgcccgctgggcccttgggccgccgcccgcaggggccgctcaccctccatcatctcctgcgactgttgctgccccgcgccgcgttccgccgccatgttggctgctcttcccctttccggaatctgtcgcctcagacccctcagccaatcagggctcccgcctcagagccggccctgccaatgggattccggcgcggcgacttcagccgcgccgcgcctgcgtgggcccagcgcctcatgggagttgtagttccgtcatgaggccgcgcgccgcgcctcccccagagcaggtaatttcaggcggcggagccggaacagtctggaggcgagaagctgggaaggaaagcagagggagtcgaagcgggacgcacagagccgtagctgcaggcagacggagtggacgtctaggcagagtggagagacgccctgggcttgagagttgacttatgtcactgtctcgacctcggaggcgtggaggggccgcgggccaggcggatctttccgtggctgcaaggtgcgggccagtcctacgtgcatccctgacctctgcgagcctcgctggctgcgtctgtacaatgggccgaacggcaagagcaacaacattctcccggcgtccccgcgcggattttacccatgcgaaatgccgccttctcttgacgctcggagcaggcgggcaggtgcggggcacttgcgctggtggggccgctagccagctggctggctccggggcgccagctgggctccccttgcaagtcgttcccagcccagtgcggacgctgcagccttcgtctaccctgcggagccacccggcc

SEQ ID NO: 25870 - DNA, 2300 bp, Homo sapien
cgaggcgggcggatcacgaggtcaggagatcaagaccatcctggctaacaaggtgaaaccccgtctctactaaaaatataaaaaattagccgggcgtggtggcgggcgcctgtagtcccagctactccggaggctgagccaggagaatggcatgaacccgggaggcagagcttgcagtgagccgagatggcgccattgcactccagcctgggcgacagagcgagactccgtctcaaaaaaaaaaatgttacagccaaagaaagatggtgcagcagattctgggcctgggctcttcccaaggcctggaacctggcgggccccctgtgctggttgcggcttttctccctccctcccttccttcctttccctcagaagtaacacaacttgaaaaaaccacccacccaaacagagttgtatgaagtaaaaatggaaagacactcctcagggccgaaccccctttaggtgttgtgcgtgcactgtcgctgaaagggctcccactggggtgtggtcacctccagcagccggccctgaagctcttgagtagacagccctgaggccaccagagccactttgtcaccaagagcagagagccaggagctcctgggaggtggcatgtcttcctgggagggtccttggccaatgactgagcagagtaagagcctacagttgcatccaggtgaggaaacgcttcgtcttgcctcccctgcagagtgcccatggcaggctgaggccaccctccacaggtcttggggagatggtgccccgctcatcctccctcccctcctgcctcccgactcctttcctggtttctggagcacttccccagtccagccctcgtccagggatccacctcaggcgcctgcaggctgagcttggccaagcagagacctctcatgcagatgccctgaggcccagggccccaaggtcctgccgcccaggctctgctggtgctgacagggaacccggcctgcagggccttcccgctgttccgaggcacaacacaggtccaagaacagggccccttgggaggtgccaagcacagaggggcataggtataagggaaagctgcagccaggatgagggtccgcctggagggatttcaacaggcagaagggggcacctggaacagcaagctgagcttggggctccccagtgcagttgtgcatggagggcgaggagcacgggtggtaggttctcagacactgccaggcaccaaggaggaaagggggagggggagggagaggggaagaggaggggcggggagaaaggataggaggagaaggaggaggagagggagaagtggggggagggggagaaacaggaggaggggagtggggagaaaggaggagaaggaagaggagagggagaagtgggggggagggggagaaacgataggaggagggggagtggggagaaagaggaggaggaggaggagttggggggagaaatgataggaggagagggagaggggagaacggataggaggagaaggagagggaggagtaggggggagaaacaataggaggagaaggaggagagggaaggtggggagaaaggataggaggagggggagaaaggaggagggggaggagggctaggaggagaaagaggagggctaggaggagaatgaggacgaggaggagggcggaaaggatgggaggaaggctaggacccctcctgtccttttgcagatggggccctgagcatgggatgtgcctgaggtcacccctcaggcattagcagagccagcagtgtgatctgggtctcccaatctccccagcccccgggtgaaaccctggcccaccactcagcacatgctacgtaacctcaaggagcctcagtttccccccacataaacagagcttacgaggtctgcctggcaaggcttccagcagaggtggcacttgtggctgttcctgtggaatcccacctcctcgagaccctccaaggcagcaactatgacagctgatgccagccctgaaatctctaagcaaataaggttcccaggaggacggcagcatttgcatgcgggtgtgtgaaagcccagccaagtgggctgcctctgtctgcagctctgagccccacaccccctatttaaacaaagatagatcctgctccaggagccgggaagccttgccctggccagctgtgctgggcacctcccctgcctgcttcctggcccacttgcaggcaaggtgagggcatgcgaatggctgccactgcctgggcggggctccaagggccacccctccccaccctctgtcccgcagtgaggacgggactctactgccgagaccagg

SEQ ID NO: 25871 - DNA, 2300 bp, Homo sapien
caggggccctgggaggacgactatgagcttgtgccctgtgagggtctgtttgacgagtacctggaaatgggtaggagcccgttagcagctgcggcaatggctggcgccgtgggcagggatgggtggccactctgctcaagggcctcccagcctgacattcctgtgtctgcatctgccctgaaatgtgctgtgggggtggggtgggaacagagggtcgggcctgtggagaatccagaaaggaattcttttcccctgagagtgcccaagagggttggctgaggacagaggggcaccggcacggggaggaggcccccgcggccgttgcagagctcccctggggtccctggacctagaaagcatgggccagagcaagggaagaattaggagagcaggccctgggggctgacagaagtcctccaagggtgaagccacagtgggaggcagcggcctggagagccaatgttcccagaaatctcaatgcccacgctatttgcagacctaccactgtcaccttaccaggtggtggccagtgccaggggctcactgcctgcacgggtggtgcactctggagggtgggtctgtatcacctgtgccgtccctgcagtgcagggtctgactctgagctgacaaaagggagaaggaatcatcaggcagtttgtttgtttgtttttgttttgttttttgagacggagtctccctctgtcgcccaggctggagtgcagtggcgccatctcggctcactccaacctccacctcccaggttcaagcaattctcctgcctcagcctcccgagtagctgggattacaggcgcccaccaccacgcccggctaattttgtatttttagtagaggcggagtttcaccgtgttggccaggctggtctcgaactcctgacctcaggtgatccacctgcctcagcctcccaaagtgctggggattacaggcgtgagaaactgtgcccggcaggcagctcttaacctagcaagcgggcatgtgagccggcaggccccggagctccccagcgtagccgcggcatctgtggaaagggagcaggccagttcccagggcgaggagtggacgccctgaccctcctccactgaaccctggaccccaatgatctcactagtaattctcggcgaagacccagaagccccttccaaagagccctctcctaacagctcccctgtggggtgactggagaagctggttgtaaaatcaggagcaggtttctgccccaacgcctgccctgagttagttcctgagctcaccgagccggagaaggcccgtgaccagccagaagcacggagcgcagggcaggacagccggcctgaggccggtcaggagaggcggccctggcgctgcgcggtccaggacgagggagaccaggaggtgggggcggaatgagccgcgatggggtggcggcaccacgtggactggccggtcctccgcggggggcgcgttccgagggctgagggcggacggtggcggagagcccggccgtgaccccctccccgcagtgctgcagttcggcttcgtcaccatcttcgtggccgcctgtccgctcgcgccgctcttcgccctgctcaacaactgggtggagatccgcttggacgcgcgcaagttcgtctgcgagtaccggcgcccggtggccgagcgcgcccaggacatcggcatctggttccacatcctggcgggcctcacgcacctggcggtcatcagcaacgtgaggcccgggcgggagcgcggggcggggcgggggcgcgcaggggcgggggcggggggggcagcgggggcgcgcaggggcgggccgggggcagcgggggcgcgcaggggcggggctgggggcatcgggggctcgtaggggcggggcgggggggcggcgggggcgggcaggggcggggggcagcgggggcgcgcaggggcggggcggggggggcagcgggggcgcgcaggggcggagcgggggcgcgcaggggcggggcgggggggcagcgggggcgcgcaggggcggagcgggggcgcgcaggggcggagcgggggccgcctcgcgctgacccctccggcgcccaggccttcctcctggccttctcgtccgacttcctgccgcgcgcctactaccggtggacccgcgcccacgacctgcgcggcttcctcaacttcacgctggcgcgagccccgtcctccttcgccgccgcgcacaaccgcacgtgcaggtgagccccgcgccaggtggagggggccgcgggcgcacgaggacgaggcggagcggggctcgggtggggtgggggtgcggcggtggg

SEQ ID NO: 25872 - DNA, 2300 bp, Homo sapien
atttacagtaaaattggccattcttcaggtatagttgagttttaagtaacatgcagtcatgtgaccacaatcatcaaaattcattttccatcacccctaaagattgcccatggaattgctgttgtccttgtgtcaaaacccatctgtgggtatgtttccgggctcttctggtgacaccaggtttatgggaagtctggaaatcagtagtgtgagccctcttaactttggctgttctacaccccttgctgatcagcctgtcaatttgtaggaaaaaagcactttcacgttttgattgggattgtgtgaaatttgaagatgagactggcgaggattgacagctcagcagttttgacttttgcaggcatttctccattttttttaggtctgtgattctttattggtgttttataatttttagcacatttttatgttcgacttaacagatctaactactgttactcttttagtgctattgtaaatggcactttttttccatttccagttgttagcacatggaagtgcctgtggtttttgtatgttgaccttcacgaggctgctaaataaagctcatgtatattagcgccagtcactgttttgtggatttttttttttttttttttttttttttttttttttttgagacggagtcttgctctgtcgcccaggctggagtgtagtggcgcaatctcgcctcactgcaagctccgcctcctgggttcacgccattctcctgcctcagcctcccgagtagctgggaccacaggcgcccgacacctcacccagctaattttttgtatttttagtagagatggggtttcacagtgttagctaggatggtctcgatctcctgacctcgtgatccgcccgcctcggcctcccaaagtgctgggattacaggcgtgagccactgcgcccggcccactgttttgtggatccttattttatatgtcacaatcacgtggtctgtggacagttacatttctctctaatctggagccttgtatttcttgtcttttttgttgttgttattagattgatgtttttgtctttgtgtttaaccagccttgcgtttctggggtaatccctgcttggtttggtaggttgtctttggccatattgctagattgcatttgcctaattgattgcctaatgtttgactaatgctgctatttgtggatgtctttgaaaagtagcagagtctctaggtggtatttggtgaaacctgcacttaaaaggtagcaaagttgttatttaatatttttgtgctagcatgtttttctttggtatttttgcttgcgggccagatcttgggtccggagaaaggcaagagctccccgtgtggacctgagtcccgtggagcagcgcccttctcggggcccctgcgtgggtctgccagaagcactggtgtccacaagcagtgtccggggcctttccaggaccctcgttttcttactgccacacaagggcgtcgcactacacgaggcctctgaggaccggtctctaactgtagccttggttggcttgtgtccctctgagcttgagcttgagcctggggagtggctggttttgtggaggctgatctgtagcactcgtgggaagaaagggagcctggcccagatttgtgtgtgcttggtctggaagcaggtagaagagtgggagcatggtgcacacctcttgggcagcttgcttcctgctctgctgggcacaccccacgctccccaggacgtgcactccgccaacatatcgtccggcgcgttgctcccacctccccctgtgcagatcaaaaatggcttggagaagtttggtcagtgcttgtaagtggcaggaccagggttctaagcctgtgtgttcatcccaccagcatctggttgttgtggaagagaagtaggtgtgcagtctgggtattcatctgtttattcagtgaggtgtgctagccccattttgggggtattggtgcaacatcaggacactggtgacaatgtaaggggagcccgagcttgctgtcctacagaccctcttgtcttcctcactgtggtccaggcacgtggtgtcaggctaacacagtgggattggtttctgcagcaaaccaagagtttcactgttgacatccgcgccaagccagaataccacaaattcctcatcggcaaggggggcggcaaaattcgcaaggtgcgcgacagcactggagcacgtgtcatcttccctgcggctgaggacaaggaccaggacctgatcaccatcattggaaaggaggacgccgtccgagaggcacagaaggagctggaggccttgatccaaaa

SEQ ID NO: 25873 - DNA, 2300 bp, Homo sapien
agattaaccggatggactatgtggagatcaacatcgaccacaagttccacaggcacctcattgggaagagcggtgccaacagtgagtgaggctgtctgttgcggtggggccagtgtgccctgagacccttgtggggggtgtcagctgtgagaactgtgacgtccgtgcagacagtccaggcccattgctgcctgtaatgggagttacagactttacatcctcctgcctgctggaagaggccacttttccttttccctttggtgcagtggttggattagagctgcttggccagtgggtgaattgtcacttttggaaatccatctaagccctccccaaataacccacagaggccatgttgaaggcatgcccaagggcagcattctctatatttccgtcagacctgctaggttagccaatcagtgttggtagtactcatgccttctgaacgtggaaactgctgatctggaactcactgaagagtaaaaacattctagatttgtgcccaagtaaaacaacatggggagggatacttttttgagacagggtctcactctgtcacccaggctggagtgcagtggcgtgatctcagctcactacaacctctgcctaccgggctcaagcaattctccagcttcagcctcctgagtagctgggactacaggtgcatgccaccacagccaattaatttttgtatttttagaagagacggggtttcaccatgttggccaggcttgtctcaaattcctgggctcaggtgatctgcccaccttggcctcccaaggtgctgggattaaaagtgtgagccaccacacccagcagggggattctgttgaagaggcagtgatatgtcagccaaggtcgctatatgcctcacctgtgccaggttgtaggtgtagcacagttacaggacactgttggaagtatgtcatgtgggccaaggtcgctgtgtgcctcacctgtgccaggttgcaggtgtagcacagttacaggatgctgttagaagtgtgtcgtgggcattctgctgcaggtccaaggatgttttgtgttgtttgtttgttttttgggacggagtctcgctctgtcaccaggctggagtgcagtggcgtgatctcagttcactgcaacgtccacctcccaggttcaagcgattctcctgcctcagcctcccaagtagctgggattacaggcgtgcaccaccacacccagctaatttttttgtatttttagtagagatggaatttcaccatgttgtctaggctggtgtcaaactgctgaccttagttgatctgcccacctcggcctcccaaagtgctgggattacaggcatgagccactgtgcccaaccaagaatgtttttttacacctctttgtttaactgtatggctatactcacacactcgcgtgttctgaaaacaagtgcacacgtcgcgtgtgttacctttgggtggaaggtgagaaggcaagcacgtcctccattcctggatagttcagtggatgaaggagcctttcccaggtagtgggacaccgacctgcataacatgactgacgtccgtgtatccgtttttgttatgagtaaacatagccttggcagctgtgctgtggcctgtgcaatggtgagctctctggtgtcagtcttatgttttgtgggcattttacgtgacagcgacgagagtctgtaggcacaaagtgacctttttgcgcactacttgaaccacacatacaccataaacttgcttttacggttttgttttggttttggttaactgtagcgtttgtttaggcctgacacggtggctcttgcctgtaatcccagcattttgggagaccaaggcaggaggatcacttgagcccaggagttcgagatgagcctgggcaacatagtgagacccctgtctctacaaaaaagaaaaatttagccaggcctgtggtccccgctgctctggaggctgaggcaggaatatcacttgagcccaggaagtcaaggctgcagtgagctgtgattgtatcgtgccactgcattttagcctgggtgacagagcaagaccctgtctcaaaacacatatatatggaagtacagtagtgtaaatctaacattaatttctggtttctgcccccgagaaattgcagaatgtagcttagtcagtcatgtctgttctgttttcttctcatgcagttcctaactcttgtcttctttcgtaatctaaaaaaacctgctgcccagctcccatgtcctctgcttctcttgtcttgtgttgcttcacctggcacagctgcatgtccatgttcccccctcagtgcat

SEQ ID NO: 25874 - DNA, 2300 bp, Homo sapien
tcattacatcttctaagtagttgttgtttgtggaagttaatgttgttaacttcttgatttcagtcttttctctttgctataaatagaatttcacccagtagttttttcagggtttctggatatgcagtcatgcttcttcctgtccagcttttgtggatgttaactcttgtctccctttgtgggtgtatattccagtggatgttaagtagtggtgcagatacactcgaacttaccctaacctgggagtcagggcaaccttccccaagcatgtgatgtttaagctcatgctgttttaatggatgagttggtgctgctgggcaggaataagcaaagatggtgtttctgccagaatgtcttggaaaaatatgctccttcagaacctacaaatattcttgttttcttttattctcttcttgctataggcctcagcaactgttgccattcccaaagaacaccatcgctttgttattggcaaaaatggagagaaactgcaagacttggagctaaaaactgcaaccaaaatccagatcccacgcccagatgaccccagcaatcagatcaagatcactggcaccaaagagggcatcgagaaagctcgccatgaagtcttactcatctctgccgagcaggtgaggcctgtgtgagtgcctcgtgcccctgcctacctgcttgtgcagacctcactccctcatgggttgccgtgtccagtgtggacttcaaggcataatgtggtgggggtggagggcttgactccaactctaaaaagccctgtctgtccccagtttgttttcaaaggcctgttctcatcagatcatcccttcctttccaggacaaacgtgctgtggagaggctagaagtagaaaaggcattccaccccttcatcgctgggccgtataatagactggttggcgagatcatgcaggagacaggcacgcgcatcaacatccccccacccagcgtgaaccggacagagattgtcttcactggagagaaggaacagttggctcaggctgtggctcgcatcaagaagatttatgaggagaaggtacacgatttagaggaggcaaatccccatgggcaggaatagaaatgaggatttgggtctggagattcagttaaggcctggttctgccccttatctttttgtccttgatgaagatgcttattgtctctacacttgagtgacccgggtgagatcggtgcccgcccccccttgctgttgagcatctgcctggcagttgtccttgccgtcctgggcctctgactgtgctgacaggctgccagctgggctgccccgggtcagatgcacatcccggacttgttcacgtcttagattaagctgttagctcagcttagtgaactttgaggtctgaaacgtgttccttaattgagggaaaggattgggtgttttgcagtgttcaaggacgaagttatcagccggcgggtgactagactgaggggaaaaatccagtccttgaacagtgaagtttctggggattggctagtcctgatcacttgttgttcacttcttgggatcagcatctatagtctgggccgctttggcttgctttctgcagcagtggccatgcccacctgcccgcttcccacacctttccctttgactgccccttatggtgctcttatttagaaaaagaagactacaaccattgcagtggaagtgaagaaatcccaacacaagtatgtcattgggcccaagggcaattcattgcaggagatccttgagagaactggagtttccgttgagatcccaccctcagacagcatctctgagactgtaatacttcgaggcgaacctgaaaagttaggtcaggcgttgactgaagtctatgccaaggtaactgcctccgagcatgaagtgtgtctcctttgagtggagtccgcggggccttcatggatgagctctcgatttgtaaatcctggggcctggacacagtgcaggtgcccaggtttggggagagcgtgcctctgagccccaggtgagcagcctggctttcactgtgacacgaccttgagctctgcaaacccatggctgttctcccattttcttaggccaatagcttcaccgtctcctctgtcgccgccccttcctggcttcaccgtttcatcattggcaagaaagggcagaacctggccaaaatcactcagcagatgccaaaggtaaggacacgtttttcacctgttgtattgaatttgtcttgttttctgtctttctgtttctgatattgctttgttgacctttgtactgtggatgcccttgaaaactggtgtatttttctgaa

SEQ ID NO: 25875 - DNA, 2300 bp, Homo sapien
taggaattagtgttttgccgtctcatcagcagtatgcaagagccaggctcttcacattcttgggttttagccgatgtgagaggcaaccaaatatactttaaatttgcatttttctgatgagcaagattgagcaccttttcaatatataagggccacttgcattttttattatcttgagtcattgttaggaaagttttttcactatcaggtcataagaaagtttatcttttcttctgctgcttgtaaatgtgttcttacatttcagtttctgatctatttggaatttattgcaaatagggttgaggcactgattgagtttcacttttttccatacggctttcgagttgtcagcactatttttttgtttgttgtaacacagggtctcagcctgccacataagctgaagtgccatggcatgatcacggctcaccggagcctcaacctcctaggctcaggcagttctcctgcctcagccaccccagtagctgggaccacaggcacacgtcaccatggccagctaattttttttttttttttttttttttttttgagacggagtcttgctctgtcgcccaggctggagtgcagtggcgcgatctcggctcactgcaagctccgcctcccgggttcacgccattcgcctgcctcagcctcccgagtagctgggattacaggcgcctgccaccatgctaatttttgtatttttggtgacctcgtgatccacccacctcggcctcccaaagtgctgggattacaggcgtgagccactgcgcctggccttggccagcttatttttaaaatttttgtagaagtcaggtctcaccatgttgcccaggctgatcttggactcctgggctcaaacaatcctctcatctcggcttcccggagtgctgggattacaggcgtgccatcactgtcttgaaaagacgttttgctctagtgaacttgagtggctgcttttatcatgtcctaaatgtttatattaacttagctctgtttctgggttttcagttcagaccagcaggtctttccgtatactggtatttcctgtgttaatgataatggtttcatgtttaatgtctaggaccactgttaacacctccaccctgcactattctttttcagggttttcttgttcatttttgttggttctgtgttacaacctttataatcaactgtttgaaattgtattaatattttaaagttaattgggatgatcgccatctacttaaaccttctgttagctattttaaggagtgttttctaatttcgaatgcacatactccaccttgtgttgggcttgtgtcttgctattttcttgtccttttttcttttttccttttttctattagaaacacatcttttggccaggcgcagtggctcacacctgcaatcccagcactttgggaggctgaggtgggcggatcacaaggtcaggaattcgagaccatcggggccaacatggtgaaaccctgcctctactaaaaatataaaaattagctgggcatggtggcgcacgcctgtagtcccagctaatcgagaggctgaggcaggagaatcccttgaacccaggaggcagaggttacagtgagccaagatggcaccactgcactccagcctgacgtcagagcgagactccgtctcaaaaaaaaagaaacgcatctctttcattacatcttctaagtagttgttgtttgtggaagttaatgttgttaacttcttgatttcagtcttttctctttgctataaatagaatttcacccagtagttttttcagggtttctggatatgcagtcatgcttcttcctgtccagcttttgtggatgttaactcttgtctccctttgtgggtgtatattccagtggatgttaagtagtggtgcagatacactcgaacttaccctaacctgggagtcagggcaaccttccccaagcatgtgatgtttaagctcatgctgttttaatggatgagttggtgctgctgggcaggaataagcaaagatggtgtttctgccagaatgtcttggaaaaatatgctccttcagaacctacaaatattcttgttttcttttattctcttcttgctataggcctcagcaactgttgccattcccaaagaacaccatcgctttgttattggcaaaaatggagagaaactgcaagacttggagctaaaaactgcaaccaaaatccagatcccacgcccagatgaccccagcaatcagatcaagatcactggcaccaaagagggcatcgagaaagctcgccatgaagtcttactcatctctgccgagcaggtga

SEQ ID NO: 25876 - DNA, 2300 bp, Homo sapien
taggagggtatctcttctcacctcctaccttgagcagacccaaacttctcccccgtccctttgagggctgaaaactcaaatgtcacagacagacgttcacacttcatttggtctgaatattgctagccatggaatttctaaaatttgcttctacgaactatttattagtttcagtgtgctaagcctgctgggaggaaatgctggttgtgagcatcagcacagaagcattctggacggttattagcacaaagttagcatatgattttgtaatctcttctgctaacagtgttttttaaactaactctttacggtgtcctgtgtactaggtactgtgcctgtgctgacttcctagctttattggaagttccttgacagcggaccgaatccctacccgttactctttctccatctccctctgcagtgctgagccctcaaaaacaaaacagcaacaaaaaacacacttgcactagttgctgattggttaatccccacggaaaggttaccaacaaaccacagcagtgacacagaagggaatgcctatttccacatctagggaggcccacctgcccagttccgtgctgctgacttagagcacggctttgctgatgatatccttggctccttctctgcgtcaagccgcaggtgttctctgccttctgtgattctgctcccctccctaggtggtgtcatgaagtgcatggtatttctgctggctcctaggcttttcccctgaccttgcacatacagttgcctgctccacttccccacctgcccagtcagggcatcacacccccttatccatccagtcttccttgaattttacccacctcagtgagggcagctcttcccagtcactcaggccaagaacctgtgtctttcttaacttcttttacacccctcttctggtcaataaggaacttcttggtgcttctttctgaatatataccaaatctggccatttatttcctccattatgcccaccataatgcaagccattgtcatctttagactgaactatagtaggcctcccctgccctcccctcccctgccacttagtgtcagtgttccacgaaaaaaaaaaaaacacgtctgatcctgccttctgctgcttgcagcccccacccagctcccaccatcctcaacagcacccgtggcctggctgcaggctgtgcggacctgaccccattccctgggtaaggctgggtgtgcccctacctcttcccctgtgtgggacggtcttgtccccagatacctgtagttgatcctgtgccctatgcaggattctgttgacctgcgactttgccagaggttcagactgacatctctacagattgctcgactccctttatacccttaaaagaaacagtggcagttatcacttagtaaacacaatggatgcagaagtgacaagtccttcccggagggtggagaccccgagagtagggattccgttccgcccagtcctgcgtatccaccgtgggctcagaggccacacaccggttcttttgcgtgtatacatctatgtagagatggagccataagtaatacacgctttaaaggaaggggattttacattttgggggggagattaagttgattgccaaggaatcgggtggggatagtttataaaagtgagggacataaggaataggcacgcaggaatgagggaatgaaagccctggagccgcctgggagcctcactgcgctgtaggacctcgtgccagtgtggccatccgtttacgatgtggtgggcatcctttgaggtttttcttctgattttggggaggtgggcggtactggtgacatctgcttccagagcagccgtccttcctgctccctttctggtcttcggttgtttccactcgggttcttgcggggcgcgctccctctgctttctggaggtgattaatttcccaactcctcggcaccgccttccccacccgaaaaaaggatgcagaaccacgcctgcagttgggtgggcctcccgggtgctgggcggcccggggcggcggggaccccagcggcggggcgggcgggcgctgacgtgtccaggcgggattgggccgccgccctatatagcagccggggcccgggcgccgcgcctcggagcgtcccggcttctcccgcgcggggggcgagtaagccagcggcaggaccagcgggcgggggcccacgagtgagcgcgcaacacggggctgggaggcctgggcgggcgggcggacggggcgggcgggctgccgggcgggggggtggggggtggctgctgacgtggaggccgcggagggggaggggcccgggtg

SEQ ID NO: 25877 - DNA, 2300 bp, Homo sapien
attactcttctacaaataagtctctcacactagaccacaagctgcctgaggaaaagaaaagtctatatcctctttttttgttggctttttgagacacagtctcactctgtcgcccaggctagagtgcagtgctacaatctcggctcactgcaacctccgcctcctgggttcaagcgattctcatgcctcagcctcttgagcagctgggattacaggcgcgcgccaccatgccaggctaatttttgtatttttagtagagacagggtttcaccatgttggtcaggctggtctcgaactcctgacctcaagtgtccacccgcctcgacctcccaaagtgctgggattacaagcgtgagccactgcacctggtcgaaaagactatatcctctcaacctttgtatctgcagaacccttaaccctacacagcaatttccagcaaatatttttttgaattgaaatgaagaagtgaggtcatgaggctgaagtcagacaactggaaggccaaaacaacaaaacctggaaaaatacgtatttactcaagaagaaattctcccaccaggccactgagaagttagctttgcccactggagaggacactgtaacagggattcaagtaagcctagtggcgctgagggacgtgatataggtcaactatatctttgaggtgctctccttacactcaatgcacttttacccgaatgacgttaatttgactcctgataagatgagctaagtcccttcaacagtgcttggcaccaagcaaaactaatagcagtaacaggaaagtttaatcctcatgatgaattatttaatggggtttcaaacgctgtccctgagacttgaggcagtaggctccagctccattttccccaagtctaaaacttgataggttgatgtttcagactcagagattcggtaatccaaatgatggaaataattcttacccaaacaccttttcaactatttttaaatactgttgccaagcatcctaatatcatgtgtacttaatgaatttagcctagggatacttttacatgtcaaaaaatcaaaatataaacctaagcactacgtttcatccagtgtttcagcatcccagatttgcttccctaaatgaacattaagcttattatgcaatgtgccgctaccaggagccttagacaaaaccctaattgtgacttaacctatcttaatagggttttaaggaagttagctgctaagaaagtgactatccttaagcagacaccaaataaatgtgaagtcattgattgagggcttagggtataggtagctatgaatctgaggacataaaacgcaaaactgaggggcaaatcgtcatgttccttaagattacgactcatccacattccttcagccgtttaatttcaccataataggcactgtttaataagcaaagcccaagtcgacttccttcgattttacatggcgtccaaacaccatgtcaagtctgaccctctcattttttaagtcgaatggagaggatatgtagcagctagccttgagcacctaaccacttttcaaaggagctacgcacaaaaataccctagcaacatgccacggtgtcagaaaggctcaggttcccaacaccatgcgggtcagccattaggaactcaggaagtgtttcctctaagcgggggaaacctaggaaggcttcctgaacgaggggtatttgcgccaagccttgacgtgagtctcgaacagttgcagtgcctccaggccacgcgggagggaggaaaggacaccccgggccggggcacaacccgcgggccggagccgcccgcgcccatcccgctcaggccgcagccaggcacggcaccctcccgtccccgagccacgtcgctgctcgtgggctcgcggagcactccccaggtctcacctcgggccccacaccagaaggagaaagctaggggccgcgccagctccgccctcccccgcggggcggcgggccccagcccgggcacaggaaggccacgtccccggggagggacgcccgactcgatggtctgcgcagggcccgtcggccccacgtgacgtgcgcgcagccaatcccagagaggccccccgatcatcgagacggcggcggtggtgggctagacgagtttcgcgcggccgctcgccgtcccccgcccagtcgtactcggcgccccagctcggtgctgccgccatcttcttggaggacaggaggagaggcgaaggctccccctccccgtgatcgctccgcactcccgccaccacctgccctcccgcgaccgcctctctcctcctcagtgggcacttgtctc

SEQ ID NO: 25878 - DNA, 2300 bp, Homo sapien
ggccactgagaagttagctttgcccactggagaggacactgtaacagggattcaagtaagcctagtggcgctgagggacgtgatataggtcaactatatctttgaggtgctctccttacactcaatgcacttttacccgaatgacgttaatttgactcctgataagatgagctaagtcccttcaacagtgcttggcaccaagcaaaactaatagcagtaacaggaaagtttaatcctcatgatgaattatttaatggggtttcaaacgctgtccctgagacttgaggcagtaggctccagctccattttccccaagtctaaaacttgataggttgatgtttcagactcagagattcggtaatccaaatgatggaaataattcttacccaaacaccttttcaactatttttaaatactgttgccaagcatcctaatatcatgtgtacttaatgaatttagcctagggatacttttacatgtcaaaaaatcaaaatataaacctaagcactacgtttcatccagtgtttcagcatcccagatttgcttccctaaatgaacattaagcttattatgcaatgtgccgctaccaggagccttagacaaaaccctaattgtgacttaacctatcttaatagggttttaaggaagttagctgctaagaaagtgactatccttaagcagacaccaaataaatgtgaagtcattgattgagggcttagggtataggtagctatgaatctgaggacataaaacgcaaaactgaggggcaaatcgtcatgttccttaagattacgactcatccacattccttcagccgtttaatttcaccataataggcactgtttaataagcaaagcccaagtcgacttccttcgattttacatggcgtccaaacaccatgtcaagtctgaccctctcattttttaagtcgaatggagaggatatgtagcagctagccttgagcacctaaccacttttcaaaggagctacgcacaaaaataccctagcaacatgccacggtgtcagaaaggctcaggttcccaacaccatgcgggtcagccattaggaactcaggaagtgtttcctctaagcgggggaaacctaggaaggcttcctgaacgaggggtatttgcgccaagccttgacgtgagtctcgaacagttgcagtgcctccaggccacgcgggagggaggaaaggacaccccgggccggggcacaacccgcgggccggagccgcccgcgcccatcccgctcaggccgcagccaggcacggcaccctcccgtccccgagccacgtcgctgctcgtgggctcgcggagcactccccaggtctcacctcgggccccacaccagaaggagaaagctaggggccgcgccagctccgccctcccccgcggggcggcgggccccagcccgggcacaggaaggccacgtccccggggagggacgcccgactcgatggtctgcgcagggcccgtcggccccacgtgacgtgcgcgcagccaatcccagagaggccccccgatcatcgagacggcggcggtggtgggctagacgagtttcgcgcggccgctcgccgtcccccgcccagtcgtactcggcgccccagctcggtgctgccgccatcttcttggaggacaggaggagaggcgaaggctccccctccccgtgatcgctccgcactcccgccaccacctgccctcccgcgaccgcctctctcctcctcagtgggcacttgtctccttctaacaaacggccttccccccactccagttacccaccgcaaggcgaagattctcattacctgttccactcttataagcataagaaaaccgagctcataaggtaggaactgtggcgaaacagggacaagccgccatcttggtaaaggagaagaggctacgcttgacctccccccccacccccagcctctatatggccaactgccgtgggaggagcacggcgcttgcgcagaggcggacaacgcggacgactctgggcttgcgcactcggaagccggccgcatgggggaggggaagaaggccaggtcgcactgagccaggaagcagttggcaaaggggcggggtgacgcggtgacgcaatccgcctgcgcgctgggcggggcggggcgggctggggcgggctgtgagcggaccgcgagcgctgggcgggtccgcggcgcggtcggtcggcgcctgttctcgggctgtttggcgggtgagtgtctcgccggtgtaccccgcacaagttgtgggccggccctcccgaggagctgcgggggacgcgccgctcgtcccata

SEQ ID NO: 25879 - DNA, 2300 bp, Homo sapien
ttttgttccttcagatcgtgtttattccacatgccagaagttgtttaaagttctttaatcttgacccacagcttatttcttccacagaataaccccaatacacataaaaaaccaattttcgcaaaacaaaagatagaagatgaacaacatctggcgatgtagaacccggaaggtccatgatcttattcaaagcatctggattctttggattcggggaaggtccacgttcagtatacccacataacactcctaacagggactggggcagggataagtggcatgtatgactactaacagaacagacaatacaaatggccttacctcacctctgctgccaaatgagttttggtgtccccattcctccagacaaaaaaaaaaaaaaaaatacccacaacttcttcttttacagcagtttctgtatgctggtattggggataaaaaggggccctgaattacatttatgaatgatagagggaaaccctggcccctttccctaggtcaccttgctagtttaagagccagtcagaatgtaaatctgatctaattaaaacgctcttgttctttattcctggctgtggcactggtgagagaaatcaaggtggaagttgaggaaaaaaaatcaggacaacctttatagctaatgagatcaatgccaagattatacataacagtacacatcatgagttaggatgctgggtggtgcaaagaacccattaatgggagctatcaaaaatcactgaaaacaatgaggctcaaatcagaagtatcaagaatcagctttcatgacccctacaccatgatgtttttctttatgacggcagaactattttgaaacattaaatatatcggcaggcactgtgattcaaaaagtatttgagaacctactaggtgctagacaccaaccgaggcaatgagtatgggtgacaacatgtgccctgccctcacagcaccaatagtccactggacaaataccatctggaacatcaggtaaacacctaagcctgtctggaggaaatctaatttgggcggaatcccacaagcacagactaggtaaggagaaggcagttaaggtgggaagtagccagatttaagagtttgggcaatggccaaaggtgcagaagtttgaactacaagaagttcagtgtagttggttcgtgtgtttccgtggagagaggacaaggtctggtggcactgacaagaattagaccgaaaaggtaaaaaagcaagccaggtttgtctgggccagtaggccaggtcacagttgggactccactgagaccacggaagccacaggtttgctcctcatccccgggccaactcggcggcctccaaccctataccctaccccctgctgcctgtccgtgcctcgctggtgcagaccttcgtcgcctctcctcgccgaaggtacccgcagacagggcctagtcgctctcccctcgcttatccacggcatccagccgatgggcttggaggtttgggggctggccagtcctccacgcctcagggaggaaatggcaccgttagaaagacaagatggccacacaagctctaagtgtttgtcgggcctaaacctgtatcctccctccaagcaccaaacctcccgacctcgaccgcactcgacgccccgaggcccagcaccgacgacagtgcagaggaattcccgcagggtcaacaaggggtcaccggaatccccactcccgcgcccgggcctgcccgtgtcggagccactgtcgccggcactaggaccgcccgggacgggggagcccacgataagtgccgaagagcctgggctcggccgcccctcccccacaccgccccgccggcaccccagagccagccgaccaccgcccgagagtatgggacgagcggcgcgtcccccgcagctcctcgggagggccggcccacaacttgtgcggggtacaccggcgagacactcacccgccaaacagcccgagaacaggcgccgaccgaccgcgccgcggacccgcccagcgctcgcggtccgctcacagcccgccccagcccgccccgccccgcccagcgcgcaggcggattgcgtcaccgcgtcaccccgcccctttgccaactgcttcctggctcagtgcgacctggccttcttcccctcccccatgcggccggcttccgagtgcgcaagcccagagtcgtccgcgttgtccgcctctgcgcaagcgccgtgctcctcccacggcagttggccatatagaggctgggggtggggggggaggtcaagcgtagcctcttctcctttaccaagatggcggcttgtccctgtttcgcca

SEQ ID NO: 25880 - DNA, 2300 bp, Homo sapien
ttacccacaagaaatgaaaacatgtccataaagatttgtatatgaatattcatagctacttttctcaaaatagccccaaactggggacagcagaggtatctagagagtggattaacaaattgtggtgtagccatacaatggaatattgccaagcactacaaagaaacgaactactcgtagatgcaacaacatgcatcagtctcagagctttgttgagcaaaagcagccagacacaaaacaggccatgttgtatgatgccatttaaaagttttagaataagcaaagctgatacatagtgacaaagtagattggtgtttgcctgcggtggggactggagagggtagacttcacagttacacaaagcaactctagggttatgaaaataatctttatcttgagtggagtttgattatctgagtatctacttttgtcaaaactgtacagtttaaatgggtgtattttagtatttgtaaatcgtgcctcaaagtggctttaaaataaaacaggtagggggttgagggtgagtagtgaaaagtaaaactagaaagccacaagaatcctcaacttttaaattgtagtattaatagctcaagaaaaatgggtgtatcaggaaaaccctaacacacctaattagtaaatgagagactattgaagaggaaaggcagtttttaaaattttgtcagacttctaaagaaacaggtaaaggggcattgcaccaccgtttattaaaaggatgacttaatgggataacaggcatttagtcaaatttttacactcatatttaggcatgttcaacacattgttttgttcttttcatgtgtgaaaattgcagttcacttaaaatgcagtcctaattttgtatgtctgcatgtttctttttgttttgttttgttttttgagatggagtctcgctcagtcgcccacgctggagtgcagtggtgcgatctcggctcactgcaagctccgcctcccgggttcacgccattctcctgcctcccgagtagctgggactacaggcgcccgccaccacgcccggctaattttttgtatttttagtagagacggggtttcaccatgttagccaggatggtcttgaactcctgacctcatgatccgcctgcctcggcctcccaaagtgctgggattacaggcgtgggccaccgcgcccggctgtgcgtctgcacattgcaaattcacttatttgttcttgattttcccagaattgttttattctgtaagggacagggtctcactctgtcacctaggctgaagtgcagtggcatgatcatagcctgctgtaatctctaactcctgggctcaagcaatccttctgccctagcctcccaagtagctgggactctaggtacaagccacaacacctggctaaggttttggggttttttttactttgttttggttttttgggagatgggggtctcactattttgcccaggcggggtcttgaattcttagcctcaagtgatcctccagccttggtctgctaaagtgctgggattataggtgtgagccactatgcccagccagaaataatttttcaaaagagatgtgtactccttcctcatgctttgcagaacttaacagagggtggtttagggtacccagaggacagtccagcaccagtagtaccaagatcagaagcagttctccatgcagaattgagacctagatgatcatctgcaatgaagcagtgggatttgtgcttccttcaaatgtaaaatttaatttttggtattttgcatcttttttgaagttaaatttcaaatattcagaatatgtagtcacagtagttcaagagagattctcacctcattgaaagcttacatggatatgtgtcacctgaattagtcgtgtgaactcaacaaagtgagcgggaaagttgcccgacatatgacagttgccagtgctgggaaacggggatggatttaaagcaggaagaagacaaggtggcagaagggggaggttgcagagtgagggtgtgcatgtgagcccaccagaccacaggccctgtcctgctcacacgtttctgcagctcgggaagcacaagggttgttgacactatgggatagatatgttcagttttctgaaaatgtggtgagtttagtgactagcagaactgataattgaaaacctgctttgcattctatttgtcaaaaataaaaaccaacctctaaagtacattcctcacatttgtgaacagttatgtttctaattatatgatgttcaagttctgtagtctcatagacctggattcaaatcttggccctgctctggatagtact

SEQ ID NO: 25881 - DNA, 2300 bp, Homo sapien
agattggaaaggaattatttacaggtgatcagaacatctacttagaaagtacaagacatctggtgaaaattaacactaagaagtcagtgatatctattttctaattagaaaatgtagtgagaaaagaaatcgcattgataatagcaactactaaattactggaaatataagtgaatgattgaaatatatctaggaagaaatttctaacctataaattttcaagaataggctaaggcggctctgccacttgagtaaaggaaactggaaacctgaattgatctgggtggctggacacctacactccaaggcctctagccttcttcctgcccactggactgatcatcccaggaccaccttgggccccttttaccttgctatcagtgttttctgagcttccttatagacagacccctggatactgaaacttgctctctctagttcctcagctgacagctgccacgcctgctgccttccctccagactgccagcctcaggtcaccagcacacaccctgcatcctaccaggggtcagtaccaccctctggccaggctctcacctgcactatccccacccggccctgcccgtctgcaggcagggatcctctgttctggggtgtgtgcaccactctgggcctggtggtgtcattgggggttggttaaaggaaaagccccagaggtgggtggcacatgaggggagcatcccgcacagctgagcccagtcttggtgtgcctgggtctcagaccccatagttgtctcaggagaaatggaggttcccctgagccagcatttctcctgtctgggcttctgggaaacgaagggtcaggtttcactctggaatccacagcaccataggaggagtctcttaagtgcccgggtgtttcctgaagttaattattccctcaacagccacatggtgacagtgggtgacagggccgggctaggagagcacgatgggtagggtcttgaagaacacataggagttcaatgaacttctcaagagaagggaagtgtgccacagcaagtcagtcttccattctcgggtgggggtccctaggccagaggaaggccgtcctggccgccaccacggagcagcctgtctcagccttagcacagcctcgcgcgatccttcgatgatccccttcggtccctgtagtcccacgagggatgcaatgcgttggaggaaggaggaggctggcagccagggactgagccaaagggtgcaaggacagccggcaaggcccgggccaagacctatccccgcccagcgagccaggcctcgcccagcacctatccgcgcccagcaagcctaggcctcgcccagcacctatccgcgcccagcaagcctaggcctcgcccagcacctatccgcgcccagcgagcctagacctcgcccaagacctagccccgcccagcgagccgactccccgcccaggacctagccccgcccagcgagccgactccccgcccaggacctagccccgcccagcgagccgactccccgcccaggacctagccccgcccagcgagccgactccccgcccaggacctagccccgcccagcgagccgactccccgcccaggacctagccccgcccagcgagccgactccccgcccaggacctagccccgcccagcgagccgactccccgcccaggacctagccccgcccagcgagccgactccccgcccaggacctagccccgcccagcgagccgactccccgcccaggacctagccccgcccagcgagccgactccccgcccaggacctagccccacccaacgagccgactccccgcccaagatctagccccgcccagcgagccttggcttcgcctaggacattgcctcgctcagcaagccgacgccccgcccaacgagccgagcgctgcacagatttatatcctacgcagctgcctgcctgctcccgccccttctccgtccgttcaccaatcagaactcgatcttgcgctttcaggccgcgggacgggaaggctccgccctggcgccccgcaggccaatcgactgcgcgtccgcgtcgcgggggcggggtcagggcggggcgcgctgcgcgggggctgccggcgggcagttgggagcaggcgacgccgacgcgagtctggcggctgctgcttgcgactgcggaggccgggcgaggccggtgaggacgcggcgggcgagcgagaggccgagggtgaggacgtgaagcggcctgggcgcgtggggcaggggtgggcctctccgggtgggcggcgaagcccgaggcccgaggcgagaggcccaggcggggggggcgctgag

SEQ ID NO: 25882 - DNA, 2300 bp, Homo sapien
gagaccagcttggccaacatggtgaaaccccaggtttaataaaatacaaaaattagtgaggcatggtaggcgcgtataatcccagctactcgggaggctgagaccggagaattgcttgaacctgggaggtggaggttgcagtgagccgagatggcacattgcactccagcctgagtgacaagagtgaaacttcatctcaaaaataaataaataaataaataaaacctttacgctttcaattttcttccattccattttaaaagccacatgagaatattgaatatggttgaataattgagacatgataagatcagcatttgaaaataggttaatcttatggactgtggcctactattttgtttctgaaagcctagtaactaagccttgtgcagttacatttgcactttttacatatggtaacacgtgcatgtgtatattgcctgtgtacatattgcacaaaaagttattcagttgtgtttggttatattttggtctgaccacactcttaacgatgtggcgtgtgtatatatagtaagggatgtccccaaagcgtgactgcatcccgtgatagcgcgcgaggagtgacgcttagtgagtagagggggctcagccgtgtccttgtgtgtggaaccatgaggggaggatgtgttagggcacctatggagtagcaggtgatgcagcatagccactggacatctggtcctggcccctcagtatttcctcatcctgcttgggagctgcttctccctcagacttgtggccactcctgtgcttttggaaggccccaggtctcttgtgccactcccattggcaaagggcatcctaggcagtgaccctcaaccttcccttacatgtatgagtggattggtgtgtgtcctaactccctcgcgacgatacatctctgacagatgagtgcgcattactgtagaacttggacttgttactcacctgtcagtactgtggtttagggttctattggctgagtggaatggttcactccctctccagctgtattttacccctcaacaaaactatgaatctcctggtaacgggattccaggaagacgtggaccacgtgtcattaggttctgcaagatggaggttttcttggccaggcatggtggcatgtacctgtaatcccagcatgttggaaggcgaagatgggtggatcacttgaggccaggagtttgagctatgatggcaccactgtactccaccctgggcaacagagcaataccctgtctctaaaaaaattaaaaattgtaatttaattttaaaaacttttctttattgtggatatttcatgtcataagagaaaaaaatggaattgtaagggtttgtaaacagacgatcctgggttgatttgcaatgctacttttacaaatcttcagttctacaagggaaagtctagtgaattgcccattttcatgaaagctgtgatagaaatgtgtggatgccctaagttaggccaggtggctttgcaacttctagtggtaatttgtaattttatatcctttttttcttttcttaactttggttcccagagcatctcattccccgagggattgaggactcctgcctccccatcttcagcgaatgccttttactcgctctctccctccactctggtcccctctggcctgccagagtttaaggacagcagcagctccctcacagatccccaggtttcctacgtcaagagtccagctgcagagaggcgcagtggagcagtggctggaggccccgacacaccatcggcccagcccctcgggccccccgcactccagcctggtccaggtgtcgggttttgtcatgtcgtgagcagctgtggttctgtctgtgctggggggcagagtttcagtgccttagacctagacacagggagggccggtagggagctcagcgctgcttgtaaaaatgacaatggtggggatgactttaccacaggctcatttccttccggtggggagcaccggtgtgaccggcagtgtcgtgggggggcccctgctttcacattgacaaatgcccagctgcaggtatctgaggagttcatagacgatgacccagcagacatctccttctttgctggaggctctgaggcgttttcttttccttatggctctgtagtcccacaggaatctcaggcctctgcccagcctctggtggcccctcctttgtgtgagcttccagggtctgctcggtccagcccagacaggtactccatggaggcagtagatatgaacacagaagacggttttgcatttgaggaggaaagtgacttcaatgggaacgcacacccc

SEQ ID NO: 25883 - DNA, 2300 bp, Homo sapien
ctgcgccccctctctgaggcaggaggtcttgaggatgaacagggaatctatgtcagctgctcagccctgggccttgcatgaagtagatgctgtgcaaattcaaataataatttgttattattagtcaaaatctctaaagtcatgtctggatagcccagaatttcttgtcttcctgagttaaatatgtgtgtcagtcaacagacagaaaccatgccagttatttgagcagaggatgtaatagcaaggattgttaaccaggtataaagttgatgaggtgccaaagggtaaaaagaactgtgaagtgtcagggaggtggcagaactgtgagccacagttactaccctagggctggggaacaaatttgacagcttggtcaaaggcccacggtgctgagcctcacagctggcagcggggccagtgcatggtggagaaggcgccccgtgggtctgggacgcacatcctgtgagggagctctggagagggggctgctgcttagccagtgctggggtctctgagggtgatgctgctacctgtggctggaaggaacggccactcccagggccaagcaattgccagcagctcacagggacctcggcgtgcggtctccagggctccctgtcacgcccctgtggcctctcagagtagggctaggaggcagatgtggagtgagagccacaagcttagttaccggccccatccagttaacgcaaatgcatccatatgaccaccttcttcattgtgtggggtggacgtttctgtttgggctggtttttcatcctgcgtttctgtgaggattatctgtgtagtgtgctcctccttctgccttcacgcagtatgttgggactgctcatactaggaggcccctagcacattctccggacacctgctgctcctcctgtttgtctgaaaggaacagatggtggaagggctccagagcagtccaggttaggaatctgaggggctcccaggactctcgcttaccctatctgcgcaggtgtctgatactggcaggattcttttttcttatctaacgccctgtggtggacgaggtggtgctaatttgaatacttaggagaaccctcctttcctcctcccattctcgaacctgctcttggtgctaatttgaatactcgggagaaccctcctttcctcctcccattctcgaacctgctcctggtgctaatttgaatacttaggagaaccctcctttcctcctcccattctcgaacctgctcctgtccaatgttttcaaagctgatctcagatgacatctttgtggctgaaccttccagaagcttctcctcagcaagaacaatactccgggctctacctcttggttgtatcagggctccagggctcctagcccagagcaggtgctcagtagatggtttgaggactgaatttgttggcaccaagacaggacctggtgaccaagggcactgctgagggtagaggagccccattgggaggctccactagaggaccctcattgggaggagccagaggagcacaagcggccacaaggctattcctgaccctcagcccggctagtgcatccgccagctgccctcagcccgctgaaaggggactctgtctctgtctttcaggagttcatccgtgagggctgccttcacaagctcaccaagaagggcctgcagcagaggatgttttttctggtaggttctctccccactcaagctgtgcttccccccgagggggatgggcagcagttctgttagggacatcgcctgcagcggcagcccattggcctctgggtagtttagcacttggaggctttggtccaggtgggtagcgttggagtcagacagggccaggggagggtcacagagtgggaagaagcagaaaacagcttccccacccaccccagggccagcctccttcttcattccaggttctgagcacctgactatgggacaaacagaagccaaaagattgtaaagtccacatacatgtggctgcaagaaggtgctactgatggcccaatggccagtcgggacagtttcactgttggctcagaagcccctcccagcatgtccttgttcctaccagttagtgggttccagcctgaaacatgtggatgaggaggtaactgagtcagcaccagccagaattccttactgcctccagcttctcagccaagctagctgggagctgacccagcagatgcactggttcctgtggccctttcctgcctctggtcaaaaacgaccaaatgaatgaataaaagtcccctttctgccaaaaatctccagcaagctgcacagatctgatgtccacat

SEQ ID NO: 25884 - DNA, 2300 bp, Homo sapien
gctcatctgccaccaccggaagcagaccccatttgttttaaagtatacttttaaaaattacacctttattatagaaaaaaataattgaaagtataagacagaaatcactcatcactggccagttgctgtggctcacgcctgtaatgccagcactttaggaggtcaagatggtaggatcgcttgaagctgagagtttgagacctgcctggggaacatggcgaagccaaatctccaaaaatcttttttttttttttttttttttaattagctgagcaaaagtggtgtgtgcctgtagtcccagctacttgggaggctgagatgggagaatcacttaagcccaggaggtcaaggctgtagtgagccgtgatcgtaccactgcactccagccccagtgacagagtgagacctcgtctcaaaaaaaaaaaaaaaaaaaaaaaaaacacagagaaaagaaacaagaaaaagaactctatcatcgtacccactcagcagtgatggctgcaggcatctgctgcatggttgccatcacccacgggctgttttgtcaggacactggttttcctttcctttcatggcagccccagttcacttaactagtcacctgtcactggacgcttggctgtggctggttgttgaggactgtaacattgttggatctctgtctttctgcacatccttaattatgtccttcagatcaattccaaaatgtagatttgtctgagcaaaggtgtttacggccttgggcactcctgctaaattgctgttggagcacctgcgccagctgaccttcccacctgcaggagctaggtctaaacatgcatctttccctccaccatggaaagtgctaggcacctgtctctcttactcttcccaagtgggtaaggtaagcagccccatcgagcagccccatcatttcactttgcatccctgcggactgtcggtgaggccagcctggcccctgtgtcctggcattccatgcttttcctctcaggaatcactcagcgtgctggtcactctggtctccattggtctgtgagttttttgtacacattagtgaaatgtttatatgataatgctcaccaacactattaagtcacaaattattttctcagtaactgctttttactttgcctacaatttagttttaccttgtagaatttaaactccatcttgatgggttctgtttctcttactctagaatggcatctggcacatatagggaacccagcaaatgcttgttgaaggtgtgaattgaaacagacactcctcaacttatgatggggctatgccctgataaacccattgtaagaggaaaatagtatagtcaaaaatgcatttaacagggcacggtggctcacgtctgtaatcccagcactttgggaggctgaggtgggtgaatcacctaaggtcaggagtttaagaccagcctggccaacagggcgaaaccctgtctctactaaaaatacaaaaattagccaggcgtggtggtgggcacctgtagtcccaactactcgggaggctaagcacaagaatcacttgaacctgggaggcggaggttgcactgagccgagatcacaccactgcactccagcctgggtgacagaacaagactccctctcaaaaaaaaaaaaaagaaagaaaagaaaatgcatttaatacacttaacctctctgatgtcatagcttagcctagcctactctttttttttttttttttttttgagatggaatcgctctgtcgcccaggctggagtgcagtggtgccatcttggctctctgcaagctccacctcccgggttcacgccattctcctacctcagcttcctgagtagctgggactacaggcgcccgccaccacgcctggctaattttttgtattttttagtagagacggggtttcaccgtgttaggcaggatggtctcgatctcctgacctcgtgatccacccgcctcggcctcccaaagtgctgggattacaggcgtgagccagcctagcctactctaaatgtgctcagaacatacattagcttacagttgggcaaaatcatctaatatgaagcctattttataacaaagtgttgaatatctcacataatttgttgaataccaaactggaagtgaaaaacagaatggtcgtatgggcacttgaagttccgtttctactgaatgcttatcactttcacaccatcataaagttgaaaaatcagggcctatcagggtcagctctggctgtcttttccttgagggtttctatccttagtatgggctcaggaagttcttccccatgccaatattatattg

SEQ ID NO: 25885 - DNA, 2300 bp, Homo sapien
acgaggtcaggagtttgagactagcctgaccaacatgaccaacatgatgaaaccccgtctctactcaaaatacaaaaattagccgggggtggtggcgcacgcctataatcccagctactcaggacgctgaggcaggagaatcgcttgaacctgggaagcggaggttacagtgagccaagatcgcaccactgcactccagcctgggagacagagtgagactccgtctcaaaacaaacacacaaacaaacaaaaaccccgaagaataacagaagtatacaacaacaaaaaagaaatggaaaacaagagaaacgggatgaagggcctggaaggtcaatgcaggaaaagacatggtgatgatcacgtccggacggcagcttagcaagacagcagccaggagcaaagggttaacaattggccaaaagcaggcaaaggctgaaaaactcttctaggcacttttattaatttgttttttgaggcagagccttgctcggtctcccaggctggagtactgtggcatgatcttgactcacagcaacctccaactcccaggttcaagcgattctcctgactcagcctccctagtagctgggactacaggcacgcactaccatgcctggctaatttttgtatttttagtagagatgaagtttcaccatgttggctaggctggccccgaactcccaacctcaagtgatctgcctgcctcagcctcccaaagtgctgggattacaggtgtgagccactgctcccagcctcttctaggcacttcggaaaagtgcagcgattactgaccacacgaaggccagagatgcagcaggcatctatttacatgcattaaatacatatattatcttcatgcatttacacattcattcaacaaacattactgagcgcctgccgtgggctggcatggtcctgggcacagctccgcttgcaggaagcccactttctcctggggagtcaaagcacaaacaaagccaagtcagtacgtaaagaagcaggggtgatgagagatgcggacccaggaggggttcaaggggctgtcctggacgcatgacagggaagcatagcttcttaaaggactcggcagtgcaccatgagaagacacgcaccagggagcagagagaaacgccagaaccctctcgaagaaggagggatgtgaggaggtcaggatagtcacctgtgctgagccatcatggagagtgagggcctgtaagggtggacacagtatgcaggagggacaaatcttcctcaccggacaggtggggatccctgcggtgcactaggggaatgcacacagggggcactatgacctggcggcccacggggcacggggacgcaccaggtagccttgggatctgcaagtccctcccggaccctggggagtgccatgacggcttccagcagcagtcactgtcctgggcgcgtcccgcgctctagcccaggtgggtcccacaacggtgtgaccaaggacgtcctatgaccaccccttgacaggtaaggaaactgaggcaggagaggcgaagcaactcgcccaaggaatgggctgtgccggtagcttctccaaggcctggtgcgccctggcctgtgcgcgtgatcccgggcggggtctcagtacgaacaggggcttcgcgatgtggccagcgcgggcttatctccgtgccgtgacgacaaggctagaagcctgggcggccgcggtggatcctcgtggcgaggcggggagggcgccgggcctcactggcccgctcgaaccagggctgcgcagggcagagcccaagggagagggccgcgcggccgccgtaacgtcggagacgacgcctggcaggcgccagcaaacgcagaagacccgcgagggcgaggcagggagggcgcgacgcgacaacgaccacgtgccccgcccgcccaggcgcgcggcctgccgggagacgcagtccaaacctttcgggagcaggactaggggtcccagagagcctcgcggcgcgcatgcgagccccggccccctctcgcgcagcctgccgggacttgtagtccaacgccagcaggcttccgggcccggagtgggcggtgggactcggggtcccagagagccgtgcgcgggccgcgacgccgagcaccgccctcgccgtcgcctccgggctttctccggtcgctgccgccaccaccgttgcttcgcgggctgggaggcccggggtccccgggcgaacagaggctgcgggtgggagccttcgcgggcgctgcagagcgggccgggggaggccgggatggagccccgcggaggtgggcgcgctgccgggcggggc

SEQ ID NO: 25886 - DNA, 2300 bp, Homo sapien
cagatagaagttccatagctttcctagcttctggtaatgttcctgacaggtttcggtattaaaattacattgacctcataaaatgagttgggaaatactccctcatttttagtctctgtgcaggtttgtatgagactggtggtatttttttaactgttgagaagaatttctcaatgaaaccatctgaacctagaattttctttgtgggaagattttaaattacagattcaatgcatttaattggtgtaggactatccagattttctatttcttttagtgtcagttttggtaagttgtgtatcatctaaaatttcaaatgcactgtcaaaaagtcctccatactatctttttatccctttaatgcttgtagtatctacagtgatgtcctctttttcattcttgatagtgaaatttgtgttatcttttttcttactcaatctttctggggatttatcagttctattaatctcttcaaagaaccaatttttggctttgttgattttctctattttttgctttattccattaatttctgctcttatttttattatttcctttcatctttagttttattgttcttttctagcttcttgagtggaagcttagagcagtaattttatttttctttttccttttttttttttttttttgagatggaatcacactctgttgtccaggctggagtgcaggtgggatgatctctgctcactgcaaccttcgcctcccaggttcaagcaattctcctgcctcagcctccttagtagctgggattacagacacctgccaccacacccaactcattttttgtatctctagtagagacggggttttcaccattttgacccggctggtctcaaactcctgagctcaggtgatctgcccacctaggcctcccaaaatgctgggattacaggtctgagtcatttcacctggcctaattttcaatccttcttctaaagctatcaaatttcctctaagcagtgttttagttgcactgtacagcatttgatatgtcttatttttcactgttcttgtcaacatattttaatcttccactgtgattattgacccattgattatttagaagtgtgacatgtaatttccaagcatttgcagattttccagtaatttttctgttattgacttttaattcagagaggacacactgtaagatttcaatccgttgagatttgctgagacttgtataaggtccatgatatggtctatttcgataaacatcctatgtgcacatgggaagaataagtattttatagtgttgtacacacgtgaattaggccaagttggttaatcctattgttcaaactgtgtgaggttgattcaaggataaagaaataaaccagtgggatagagttccgagacacacacacacacacacacacactcttcagctgatttatgttgagatgttggggactcctccaattcggtggaaaaaaaatgatgcttttcaataaatgatgccaggtcaattggatatctacacgaaaaaaaatgagctctagccccgtaccacaccattcacaataattaatatgtaatcaatcatagatctaaatatgagccctaaaacaagcttctaaaaggaaatacaggaggatatcccaataaaaaggtactaaccataaagaaaatattgataaattggacatcactaagagtaactcctgttcatccaaagcaaaagtaaaccacaaaatagaggaagatatttgcaataacttcaataaatgcgaatccaataatccatctacaatacaaagggcatgcgtccggaccaagaacacgtctccagactctggaaagaacctctacgaacgaagaagacaacccaattttcaaatggaccccggggaacacccaggcggctggggctggctctaggtccccactgctctgccttgcgggggccgctccggcctggtcgccttctccgggcgcatccagggaactcgctcggtcctccttaagcggggaagctcggaaagcgtctccccgactccgcccccagggttgcctttcccttagaaggccaagccccaagcccagcctctcgccagctgggagtcgcgcgctgcccacctcgctgcccaggcccccgacgccgcggcaggagccccccaagagcgcgggaagccccgtggacctggcgctcccggctcgggcgtggacggggcgggcgccggggcggggcgcgcgtcctcgcgggtctgaatggaagggtcgaggtcgtcgtcggcggcgagcagatcctgaagccagaactccaccccggcgcccgc

SEQ ID NO: 25887 - DNA, 2300 bp, Homo sapien
gacagcgctcagacccctctgctggggccttagctttagcatctcgagagattgaggtcacgtggtctgcgggggctgtggtctcctctgaaggctgaattgggggtgcagagggcaatgtcccaagatgtcgcacatggctacaggtgtccctcagcacagaaaccccaagacttccgtcccctcctgtcttcctcctgtggagtctggcatggggctgggcactgtgtgcccagtgggcgacgacactttgagcaacgccaaggccacaggtccaggctgcagggaaaagccttcatgtattagcaggaagtgaagggaataagagaattggacgttcattcacttccccagaaggaacttcagagtccagggagtccgtgggcttccggaaacgcagtccctgctgttgttccaggcagagtctgaatgaagctgggtttgccccttcctggtagcccaggctccaaggccccacaggaggatgacggcggcatacctgtagcccctggggggcagcaggcaggtggccgaggggagctggcaccctggtctggatgtctggagccccagcgagggccatgaaggcctctctcctgctcggcaggggccctccggccggcctgcctggctgccatctgtccccacctcccgtgcctcctggcccttcacactgtctgaatgtgcacggcatcgggtctggtcttgtgttggagccttcagtccaggccacagacctccttcccgaacagtctcctgcattcccttcatgcaattttgctgatattctggtgcacggtgctggggggcctggcggtgctgggggcctggcggtgctggctctgctttctaacggtctccctcttccctcccagactgatgtcctcaagtgtgtggtcagcacagaccctggcctccgctcccactggctggtggctgcactctgcagcttcggccgcttcctgaaggctgccttcttcgtgctgctgccagagagatgagctgcccacctggcagtggccgcagcctggccctctgggcccaacgcaggaggccctcagcacccgaacacatcttcctcctccccacccgagcctggagcactctaaccctcggagaccccctaagccccgttcctccgcagacccaggccctccggaaggggtgagtggggaggggctttcctgagcctggagctgggctttggggcagcctgcgaccctccccgcttgtgtcccttctcctgtgatctctgtgttttcccttttctttctggggccaggaagtcagggtcaactcccaggcctcagatgcaggggcccagaacacctgctctcacctgagccccaggtgaaggggcccgggaacacctgctctcacctgagccccaggtgaaggggcccgggaacacctgctctcacctgaaccccaggtgaaggggcccggaacacctgctctcacctgagccccaggtgaaggggcccggaacacctgctctcacctgagccccaggtgaaggggcccgggaacacctgctctcacctgagccccaggtgaaggggcccgggaacacctgctctcacctgaaccccaggtgaaggggcccagaacacctgctctcacctgagccccaggtgaaggggcccggaacacctgctctcacctgagccccaggtgaaggggcccgggaacacctgctctcacctgagcccctggtgaaggggcccggaacacttgctctcacctgagccccaggtgaaggggcccggaacacctgctctcacctgagcccccggtgaaggggcccggaacacttgctctcacctgagccccaggtgaaggggcccggaacacctcctctcacctgagccccaggtgaaggggcccggaacacctcctgtcacctgagccccaggtgaaggggcccgggaacacctctcacctgaacccgggggtcccatcccaggaagaagggccatctcaggacatgagtcctcaggggccctgcacattcaatctgaaggtgaccctggcctggctgaagctggaagagctgtggggactcagcctgtaaacagagcgtaaggttcacatgctggttgcttaatccgtttctggaggaagagtatgacacccacttgtgatggggtccttgtgcggtggggaccggggccggcgggctccaggccagcacacctaacccatggatgtggaacctacggccgagaaggaatgttgcatgagtcggatcccagtccattgtcagtggagggtgagggtgaccccatctgctatttttg

SEQ ID NO: 25888 - DNA, 2300 bp, Homo sapien
gtgaaccattttttgtctcttatgccatatttttactgtaggttttctatgtttagatgtgttttaggtacacacacccttggcactgtgttacaactgcctacagtattcagtaacacactggggtgtgtagcctgggagcacaggctgtgccatacagcctaggtgcgtggtacgcggtaagtgcactctgtgacgtttgtacaatgatgaacttgcctcatgacgtgtttgtcaacgcatcccccatcagtaagtgctgcttgactgaaaggtgaagtaagtgtgccttgtttggagggcatccatccccttaacctggctggcactcgggctgtgtttaatcctgcagtggctgtaaaattcctcgagtgtccttgttttgtctccctgttgtcgtggagtttctccgagcatgccttccacagcctgcgcctgggccctttccactcccacccaggatgttatgctggagcctgcagggctgggaggggaagcaggctccagcctgtgactcgatttaagcccttcagtggcccgtgtccctgagccgtgaccttcacacgtgtctttccctttctcctccccgcttgggtgagacggaagactggtggggctggagcagtgaaatgcccttcccagctgagatgaggtcctggtgaagtcagcttcgctacagagcaggcctggcctttgcctggagaacgctctgggctcatttcaaggtggtcacctccccctcctcatcccagagacatgaggtgtttttttttttcttggcttttcgtggggagaacctgatggggttcctggaggtgaaacctatgaaaatgtaggaccccaggagattctcacacctgccatgttcagcctccagcattttgtccaaatcaagttcccaccagttccttcccctgtagactgtagattctgctccacgtgagctgatctcactgctattctctgtggcaggagagacatctgtgacctcacttccttatggatccaagaaaagttgttgattttcacttctttcagtgttttttgctgttgttttaaggctgtggtatatgactcctaagctctttacatgtgagagtggaaaccggaagcttactccccacccattatttttcggttattgctagcgtgtgggaaagctacccattttagtaattggccatcttatcaaattcacttgtagattctaatagttcttcaattgagactcagattaacgaggaaatcaaacataacatttgcaaattatttgtatccactttatggcctttttatattttatagaaatacttgctgtattttctctccatcatgatttctgtttttcccctgggcatgcaactccttccgtttcatggttgataagttgagggccttgatgtcactttaaaacaacagttccctgctggtatgccttgtcagtggacccaaacatatcacggtgttcctggacagctcctccccaccttgggacagctggtgcgggccgcgcaccctcagcttccatgcaccctgttgtactaagcagtaagtgtccctttctgtgtgtgccttggcaggaaacaacgtgtcactaacacaaagagatgtgagggtgggagctccaggaaggagccgtccccaggtcccagtgggtgcatttgctcacttcctgtcctgggttcccgggccgcttgccaggagacaggacagtctctggagcctccatgtccaggtgaagatgagtctccagccaccctctaggagacagaaaaggacatgccaggggtggccagagggactgctctggagagagaaagcatttaggatgtgcctgtctctgtggtgttgccttcctctgctgtagctggtggaggaggctgagggtagaagccgcactcgtcactccgcccagacctctggccagtccctctttcataaaattcacctaacctccaaagctccttccagctctgaaattctgtgatctgggctgtcattgtcttttactttcttctgagacgtgatctttcatagtggaactacaattcccagaatgcaccatttaaagttagcattcacttcctgcagagccattaagagccaggtgcaaacatttcccgtcaattggcagaaaacaaccttgaggaaccttgacgagtgtccggagtttagaaaacttagggatgggtaagcctgctttcagtgtcttgggccaaaacatgaaaatttaaatttcttgcaggaaatttaaatttttgtttttgtgttttggttgagatttcaataaaagaaaaatg

SEQ ID NO: 25889 - DNA, 2300 bp, Homo sapien
cccaaagtgctgggattacaggcataagccaccccgcccggcccaggcctatgttcttaaacacagagtttgccttaatgaagaaatggttatgaaggatctttattaggtaataaagaaatgactaaacatcctattcagtatcttcctgcgctggttgcttttttctcaccatttttaaattatggtataatacatgtaacatgaaatttaccatcctaactttttttggagacagagtcccactctgtcacccaggctggagtgcaatggtatgaccgtagctcactgcagcctcagcctcctggacccaagtggtcctcccatctcagcctccagagtagctgggatcacaggcatgagccacggctcccagcctttcctaccgctttttcagtgtacaattcatggcaacaaatacattcacgttgttgtgcagctgtcactaccatccacctccagaattatttttattttgtaaagcggaatctctggactcattaaacattaataccccagtcctcctctccctaggctctgggaacccgcattctcctgtctctatgaatttgattactctgagtacctcatgtgagtggtatcatgcagtgtttgtttttttgcacctgccctatttcattcagtataatgtcctcaaggatcatctgagttggttgattttttttgaggggagaagaccgggtttcactctgttccccaggatggggagcagtggtgcagtcttagctcactgtaacttcgaatttctgggctcaaagaaccctcaagcctcaggctcccaagtaactggaactgcaggtgagcaccattgtgccctgtccctgggctggttgacttttaaaaggagcatttttactcctggaggtgggcatgcaacaggaacacagaactgtagctctggagtcttctggaggtctccagattctcagctgcttgcgcacagccagggctgcctccatgcagtcctgacctctcacgccctagtgtctgtggatgctggccctggttttggtacccagagtcctaccttccaggcaagttgggagggttggttagcagtcagcttctaggagctatttcctgctgtcctgaggccatcctggcactgtctgtcagcatcctgtgtccccattgggcatttaccacagcctggggagcagttggttaccttctttcccatccgccctacagactataagctctgtatgggtagacaacgggtctttcagatttctactccagtaataactgcaggtagaagatgttctttaaatctttttgaagtatttttttaagtggatgaagtcaatacggcttagggtgcgtgcaaaaatacttgttttgcttttacagttgattattttaaggggagacatttaattatttctaattactttttgtcatttgtcctgtaggttccccctaaaggactcaaaacgtctaatccaatggttaaaagctgttcagagggataactggactcccactaagtattcatttctctgtagtgagcatttcaccaaagacagcttctccaagaggctggaggaccagcatcgcctgctgaagcccacggccgtgccatccatcttccacctgaccgagaagaagaggggggctggaggccatggccgcacccggagaaaagatgccagcaaggccacagggggtgtgaggggacactcgagtgccgccaccagcagaggagctgcaggttggtcaccgtcctcgagtggaaacccgatggccaagccagagtcccgcaggttgaagcaagctgctctgcaaggtgaagccacacccagggcggcccaggaggccgccagccaggagcaggcccagcaagctctggaacggactccaggagatggactggccaccatggtggcaggcagtcagggaaaagcagaagcgtctgccacagatgctggcgatgagagcgccacttcctccatcgaagggggcgtgacagataagagtggcatttctatggatgactttacgcccccaggatctggggcgtgcaaatttatcggctcacttcattcgtacagtttctcctctaagcacacccgagaaaggccatctgtcccccgagagcccattgaccgcaagaggctgaagaaagatgtggaaccaagctgcagtgggagcagcctgggacccgacaagggcctggcccagagccctcccagctcatcacttaccgcgacaccgcagaagccttcccagagcccctctgcccctcctgccgacgtcaccccaaagccagccacgga

SEQ ID NO: 25890 - DNA, 2300 bp, Homo sapien
caatttccttcagagcttgtgtcctagaagttttgttattgttttttgaaaacgaggcaacgtgttgcaacggtctaacatggtatgggaggaaaggacatcggaattgggggtgggggggtacctttgcagttggcctcacagtgttcagaaaggaggttagaaggtcctgttgcttagaacggcccagtccatcctgttaggatttgtcctggtccacactggcctcaggtggagcaaatagcagttagaactgaccaccctgtcccttatgtgcacattagggcctggtttttttttctttttttctcttttttttgagaaggagtctccctctgtcgcccaggctggagtgcattggtgcgatctcggctcactgcaacccccgctcctgggttcaagctattctcctgcttcagcctcccaagtagctgggattacaggcaagcgccaccacgcctgtctaatttttttgtatttttagtagagacagggtttcaccatattggccaggctggtctcgaactctggcctcaaagtcctgacctcaagtgatccacccgcctcggcctcccaaagtgctgggattacaggcataagccaccccgcccggcccaggcctatgttcttaaacacagagtttgccttaatgaagaaatggttatgaaggatctttattaggtaataaagaaatgactaaacatcctattcagtatcttcctgcgctggttgcttttttctcaccatttttaaattatggtataatacatgtaacatgaaatttaccatcctaactttttttggagacagagtcccactctgtcacccaggctggagtgcaatggtatgaccgtagctcactgcagcctcagcctcctggacccaagtggtcctcccatctcagcctccagagtagctgggatcacaggcatgagccacggctcccagcctttcctaccgctttttcagtgtacaattcatggcaacaaatacattcacgttgttgtgcagctgtcactaccatccacctccagaattatttttattttgtaaagcggaatctctggactcattaaacattaataccccagtcctcctctccctaggctctgggaacccgcattctcctgtctctatgaatttgattactctgagtacctcatgtgagtggtatcatgcagtgtttgtttttttgcacctgccctatttcattcagtataatgtcctcaaggatcatctgagttggttgattttttttgaggggagaagaccgggtttcactctgttccccaggatggggagcagtggtgcagtcttagctcactgtaacttcgaatttctgggctcaaagaaccctcaagcctcaggctcccaagtaactggaactgcaggtgagcaccattgtgccctgtccctgggctggttgacttttaaaaggagcatttttactcctggaggtgggcatgcaacaggaacacagaactgtagctctggagtcttctggaggtctccagattctcagctgcttgcgcacagccagggctgcctccatgcagtcctgacctctcacgccctagtgtctgtggatgctggccctggttttggtacccagagtcctaccttccaggcaagttgggagggttggttagcagtcagcttctaggagctatttcctgctgtcctgaggccatcctggcactgtctgtcagcatcctgtgtccccattgggcatttaccacagcctggggagcagttggttaccttctttcccatccgccctacagactataagctctgtatgggtagacaacgggtctttcagatttctactccagtaataactgcaggtagaagatgttctttaaatctttttgaagtatttttttaagtggatgaagtcaatacggcttagggtgcgtgcaaaaatacttgttttgcttttacagttgattattttaaggggagacatttaattatttctaattactttttgtcatttgtcctgtaggttccccctaaaggactcaaaacgtctaatccaatggttaaaagctgttcagagggataactggactcccactaagtattcatttctctgtagtgagcatttcaccaaagacagcttctccaagaggctggaggaccagcatcgcctgctgaagcccacggccgtgccatccatcttccacctgaccgagaagaagaggggggctggaggccatggccgcacccggagaaaagatgccagcaaggccacagggggtgtgaggggacactcgagtgccgccaccagcagagga

SEQ ID NO: 25891 - DNA, 2300 bp, Homo sapien
tgtacactgaaaaagcggtaggaaaggctgggagccgtggctcatgcctgtgatcccagctactctggaggctgagatgggaggaccacttgggtccaggaggctgaggctgcagtgagctacggtcataccattgcactccagcctgggtgacagagtgggactctgtctccaaaaaaagttaggatggtaaatttcatgttacatgtattataccataatttaaaaatggtgagaaaaaagcaaccagcgcaggaagatactgaataggatgtttagtcatttctttattacctaataaagatccttcataaccatttcttcattaaggcaaactctgtgtttaagaacataggcctgggccgggcggggtggcttatgcctgtaatcccagcactttgggaggccgaggcgggtggatcacttgaggtcaggactttgaggccagagttcgagaccagcctggccaatatggtgaaaccctgtctctactaaaaatacaaaaaaattagacaggcgtggtggcgcttgcctgtaatcccagctacttgggaggctgaagcaggagaatagcttgaacccaggagcgggggttgcagtgagccgagatcgcaccaatgcactccagcctgggcgacagagggagactccttctcaaaaaaaagagaaaaaaagaaaaaaaaaccaggccctaatgtgcacataagggacagggtggtcagttctaactgctatttgctccacctgaggccagtgtggaccaggacaaatcctaacaggatggactgggccgttctaagcaacaggaccttctaacctcctttctgaacactgtgaggccaactgcaaaggtacccccccacccccaattccgatgtcctttcctcccataccatgttagaccgttgcaacacgttgcctcgttttcaaaaaacaataacaaaacttctaggacacaagctctgaaggaaattgtcaagaaagtgcgctggctgacttgtgaaataatctaatgttactaattcttataatacattgtaatgatttaagacttacagcaaactactgtgaactttcaataaccctataaataacacgtgccattcccgtctttaaaacttaaataacaccatgcaacataaaacagaaacatctccaaagtggtttttaaagtctgttcgcggttctggtgcctcccgcgtgtaatccgcagaaatctcactgaaataggctgaactcacaaggccttagaggggtttgggccctgccgcgggggcccacgtgggaagcggccgagagccccgggccaggctctaagggagcgcaggaggatgccgtccccagccggccgtcccgtagactctccgcgcgtacccgcgtcctgggctcgggggcccagtcccggaaagccctctcgggggctgtcagctacggaggcgcaggtcgcgtctgcccggtcgctcctgctcgcagacatccaggccgacggcccgcgcggtccggagagtcagcagtcgcggccgagcaggacaatcggcccaggacctgcgcttccagagcgtgcggcttctgaagcctaggcgccggccggatcgatcgcgcgcagggcggacccaggcggccggggtgggggcggctgcgctgcccgaggcgcccggcccagagacggcggccgggccaaggtcacacagcgcccacgcccgctcccccgcgccccggccgccgaggcccggcgcccccgccccccgcgttcgggccggccgcggggcctcagtttccccgcagggccgggtcggggcgggggcgtggcggcccggggcccgcgtacctgtggaaggagacggcgcgcttctcgccctttccctgccggttggagcagttcacggccgcacagcagatcaccatcgcgggccttggcccagccgcgcagccaggccccggccctagccgcccgcccgcccgcggaccgccccgagggagggagcgcggcggcgacacggctcgggacgtgggccggcccgcggcgtccgcgccgtacggcaagatggaggcgcaggcgcccgcagcgggcccgcccccgccccagcccccgcccgcgtcctcgccagccgcgggttcgggcgtcttcggaccagcggggcgccgcaggcccctcgcagcgtccgtcggcaggcgggcagacgggcgggggagtcgccccggcggggcaagtccgtaccgcgacatgggcgcgccgagcacgtccgtaccgcaagatggctgctcggacggggacagagctcgcctctgccgcctcgaca

SEQ ID NO: 25892 - DNA, 2300 bp, Homo sapien
caacaccccctcttgggcttcagggttgtaagcacccctgcttgggcgccactaccttccccttgtctggacaccagaatccactgtccctttgtctggacgctggagtccgccgtgggagttgcttgccacatgtctagctgtaagctctgcagagcccactctggtgcctgcgcttgaaacagctggcgggacccggcactcactcacccacacacccactcccgccaggggctgagcatacagtcatggtggccatggtatccgtgccatagtgcaaaccaggtgcccaccggtggaccaagtagatggggtatctcctgcggcgagcctggacccaagcaaggcctgggcaggggcctcgccagccggaggtctctggctgccagagtggctgagaaaaatcctgcatcacaaacaataacacctaaaaagatataatacaacagttgtaaaatagtaaacaacaaatagtacacagctgcaaatagttcaaccgtgaatgacggttattctaaaagacaaacttcacaagatatacacctggtcaacatgctccttagggagtcagggctcctgtttcctccagccacctaccacatttaagtggtgagctgctacaaatcattttaatagatattggcaatacacattacagttttccaactcagatcttaataaatttatgttgtagctaccagaaaaataaaaagtaaaaacaatcccattcagaatgacagaattaaaccagatgaaaatctttctttacagatgggggatacttggtaaaaggcaaatcagttcccacaaagaatgaatgagctaaaacttctgtgtaaaaatatttctagggctactgggctagcgatgggtttggcgctgacttaaaataatcttgctagcaaaaatggagcggaagcatgaaaggataggaaaaaaaccaacactccctatacacacacacacacactccttctctttctctctctcttaggaccccaagaaactaagacccgatgatacaaattcactgtttctctttctcgtcacggaaaagcagcttggagaatctactggttactaaattgaagacaaaaacaaaaaagatacgtatactgtgatgaacacgtcacgtttctctcctccaacctaccaataacttcataaaagttaaagagcttccatcccttcacgctcagctgcggaaaggctacgctttcgcccgccgctcgcgtccccggcccggaccgcggccgccccgttcgccgccgcgcctctccccgcccggcaggctccgccgccctccacggccgacctggcgcaagggcctgtgcagccacaacctccggagcgctccggacgggaccggaaaagcagaagctccagcgcaaccgacggcgggttccgcggcgcagtgcgccgccgtccccctcccgctcccaccgcccaccacccaccaacaccgccccgcgctcccgcagcgcccgccgccccggcccagcctggcccgcaccggcgtgccccgaggcgagtcgcggcagcccgacccgagcaggggaggccaatgataaggcgagcacctcctgcggaaagaccgacccccggcaactcctcacctgcgtccatcttcccagtccggccgccgactgacccgagcggcgtcgctccgacgggccagcaacgcgacgcggcgacgggacgccgcgggggccaataggtgtgccggcgcaggcggcgaagacgatacggcgcgcgagcggaaatacgcgggagccgccattttggcgtacggccgggccgacgcgagccccggggcgccctgcgggcggcatggggtcgtgtcgtgggacgacggctggttctgctgtccgacgggacactgtgtgccatgggtggcgcttcctcctcttagaggacccaggagcagttgtcgaggcggcagaggcgagctctgtccccgtccgagcagccatcttgcggtacggacgtgctcggcgcgcccatgtcgcggtacggacttgccccgccggggcgactcccccgcccgtctgcccgcctgccgacggacgctgcgaggggcctgcggcgccccgctggtccgaagacgcccgaacccgcggctggcgaggacgcgggcgggggctggggcgggggcgggcccgctgcgggcgcctgcgcctccatcttgccgtacggcgcggacgccgcgggccggcccacgtcccgagccgtgtcgccgccgcgctccctccctcggggcggtccgcgggcgggcgggcggctagggccggggcctggct

SEQ ID NO: 25893 - DNA, 2300 bp, Homo sapien
tgttaatgacagagcggacattgcagcccttctgtctgccagccagcacctcattggaagtgtttcattgaaacgtcacacccatatgctgaggctgtcctgttgttatcccattttatggatgagggaacattcacacttagaagttaagtgagtggcccaggaaactacagtttaccagtacccaagctgggctttaaattctgactgccccctgcctccccaaggggattgtgcacagcacagaagttcacacacgatgctttttagtatcagcttaggtggagatctgtgtttatgtagaatgctgaggaaaccacaggcatagtatgatttcacgtacgaacctgtgcataaagacttctggaaagagtcattgctgggcaacgaggcttcacgtgatttgtgtatttttgtagtcttcagaattttttatgattagcatatgtcattcttattgaagtgtggggttgttatcaaaaagtaaatttagatgtgggagaaattcatatgtgattgattttcaaaagattgctgtaaagttgctggtgaaggatgagtgatcagacaccatcagagctggagaggcagcagatgggaattgtgtgttcccagttccctgaagagcagctggagagagatgcctctggtgccgccccagaatacgcaatgggcatctcgccacatgggtgtttgggctggtgcattgctgctggctggcgccttcttttcaggaacattgtgggacatgggtatcctcagccacagttctgtggacaggaagaccctgggcctctctagtttctttctttcttttttttctttttcttttctttttcttttttttttttttttgagatggagtttcactcttgtcacccaggctggagtgcagtggcacaatctcagctcactgcaacctccaccttctgggttcaagtgattctcttggctcagtctccctagtagctgggattacaggcgcccgccaccacgcctggctaattgttgtacttttagtagagacggagtttcaccatgttgaccaggctggtctcaaactcctggcctcaggtgatctgcccacctcggcctcccagagtgctgggatcacaggcatgagccactgtgcctggcctagtttcttaattgaagtaaaacagagtaagatggcatgcagggctaatcattagcccagcaggtaagcaccatggctctgcagccagctgcctccttagaaagtggggtgttgccccatggaagtggtggcatgctcttctggtagcattgttgaaatgaaaacaggttcagtccttgatcactaggctttttgtacccgggtacctctggggacttggcagagagtttgatctctcagtgtccaggggttaactttctacctgagagtagcaccccatgcttctccagcacctgctcctaaccaggaaattggggtagaccagaaccccagtcttcccagcagctcagtgtttcttgccccggagcatctgccttcatcacagtgactctgaacacgctgccatggtgacatctggtaaaccttaggatggccatggaaaacgactctttgccctgtttcttcttggcttcccttgcgtacaaggatgaaggaggtggtttaactttatttttgtcctttactttttaagtctaaagtaagtgcttgaatcgggtgggttttcatttttttgctttctcacccctcaggttggcccctaacttggcctctcaccctcgtgtcagctgttagacactgactcagtggctcagaatatgaaaggctcaggaagtagcatgctggccccacctccctgtccccataccttagcagagcagctgcccagcagggcctccttctctttcctaagagtttactccatccatggtgggtgtcttggtaggcccgagatacgagagggagtgctgctgttacaagaatttacagttgttctcttcagcacagaaatgctgtaaatggcctctttcgatactagtttatgaaattataagtgtctgatgattgtgcatctttggtttcaacagctactctgacctacgacactctccggtttgctgagtttgaagattttcctgagacctcagagcccgtttggatactgggtagaaaatacagcattttcacaggtatcggccatgctggagcccaccctggtctgaccgcttggcctgcagaagcattttgtgatcactgttctctgctaactctgccataacttgtgacttgcaaacttaaggcgttgtgtgtgtgtgtttttttt

SEQ ID NO: 25894 - DNA, 2300 bp, Homo sapien
ctccatgctcccggagtgtcttctcccatcaccgcaccctccggttgatgtgtcctccggaccattgactcacgggtgtgtgtaggcagaaggggtggaagcgaggaaaggcgttgctgaggaggcccggagggagcgggttctggctgtgctggcactagccaggctggcaggctgcgtgggtacttctgtgattttcctctcaagtgcacgtggctttttcttgcactgtttcgtgtgtgtgctttatttcacaataaaactcttgaattaagtatgcatagaaactatttcttttttctctgggtggcaagattatgaaaaaattttcttacgcttttctatattttccaagtttgaatttcactgtaagcacctggctttgtaccgccctttttctgttacacagtcatcatttgcttgcttgttgtgggagcacttttgcacaggtctgcttggttagtgaaagcatgtctccctttctaggaaggttgtgcaggaccagcgttccctgtgcaggcgccactgcgtttcctgcagattccgaccggcactgcaacggattccctgccggagctgaggtcaccaacaggccgtcgccatggagacccctggtacttctcattcccctgcgcctggggctcacggacatcaacgaggcctacgtggagacgctgaaggtgggtcctgccgtgcggcgcttgccctgagtccccgtccccttctcccagttcttagtcactttcagcgcatcgtcgtcacgtggccatttgtgcagccggctctcgggggaggggtaaacaaccctggtttacaccgttgcccaaggggtgagtgggcgtgaggcacgtccatcagtaggcacgtgctgctttcgttctgcaagtgtcaaggcgagtgtcgaggatgaaagcatgaggcgcttgcagggggtccttggaaccaggtgccactcctcggcctgacggggagccccgccccctcccgggtctccactgtgccccaggcatgcccaccccactcccccacagccctcttggcctgaggtcccttcggagggtgggttggcctgtgaggaagggacgtgtgggcagggcctggggatgggcagggctgtgtgaggagctccagccacaggctcccccatgtcatgaaagcaaaagggggcggggagcggtggctcatgactgtaatcccagcactttgggagggcaaagcgggcagatcacgaggtcaggagtctgagaccagcctggccaacatggtgaaaccctgtctctactaaaaatataaaaattagccgggcatggtggtgcgcgcctgtagtcccagctacacaggaggctgaggcaggagaatctcttgaacccaggaggcggagcttgcagtgacccgagatcatgccattgcactccatcctgggtgacagagtgagactccatctcaaataaaaaaaaaaaaaaagcaagcagaagggaaaaccatcctttcttcaggtaactcaaattttagaccaaggagtcacatttgtatggaactgaaatgtggcttcctgttaaaattattcagttgtctgaacttggcccctccgtccagccttctgcccatcctgtggggtctcagctgcccccacacataggccccgtctccatcgcttctgccctgtcaggtcaaagcactcagcagggccacctcccgcacccctgctcacatctcctgccaggccccctcactcccggcctccccaaagcccacctctgacatgaagcttccctgagctgagcctgcagattgggtttcttgtgcctgtgggatgtcctgtggtctttcctggacagtaagctctttggtaccatgtcccctcctgtcccctcttgtgtcacccagttgggcctcagcaggcccttgggccccctatggcagtgggtggggggaccgtctgctcccacctgggacctgtgctcagtcccccgcccctccacagcactgcttcatgatgccccagtccctgggcgtcatcggagggaagcccaacagcgcccactacttcatcggctacgttggtgagtccagggttcccaccgtgtccctgtgggcctgggccttttaagggcattccatgagcaggtaccacaccccaggtgaccacttgaggccactggtggaaaagcagcatgccctggggttcattttcagcctggtcgcgggcggcctcctgtgtgcccctttccctgatggtctggtgccctcggctccctccccacctcctgcccactgcttctcagtgtgatgtgggtgca

SEQ ID NO: 25895 - DNA, 2300 bp, Homo sapien
tagtggggaggctgaggcaggagaatgggatgaactcgggaggtggagcttgcagtgagccaagattgcgccactgcactccagcctgggcaacagagcaagactccatctcaaaaaaataaaataaaaatacaaaaattagccgggcgtggtggtgggcgcctgtaatcccagctactcaggaggctgaggcaggagaatagcttgaacccgggaggtggagggtgcagtgagctgagatcgcgccactgcactccagcctgggggacagagcaggactccgtctcaaataaaataaaagcaataaaagtaaattaaaaaggaagaaagggcataactggtaataacaatataacccatatccttccagaaccccaaactgaattggggaggcttcagtctggaaaacataaagctactctaggtatgcaatgataatataatcgcgagcttacacaaatgctgggagtaaagtccgggaaattgttgccaatgacctcagcccaaagcactgaagtgggtggtggtctcaagagctcatggggaaaaaaccaatgcaaactcaacacttagaaagctaccagcaatttcttggtctacatcagaggcaggtggttctgaaaacagaacagctttgaatttcatctatatttctggctgagggtgcctcccaagaataatcgcctcgaaaggtaagagtgcctcgtctggtagactgtaatccagggctacacagatgattctgggaaatgcagttcctaccatttcttctgctaagcagagaaagtgatgtctagctgacaactgacaatatggcacatatagatagtagtattttagatatctaaaataacaaaaagtctcacctgagaaatgtccaggcagcctgatatccctaagataacagcaaacactactgagcgctttctagataccggggacacttcgcgggactttttccacctctctatggcagagacagtttttcctattatcatcatgacccacatttcagaggagttggaggcatggaaagaggaaacaacttgcccgttccctctccgtgctataatttgtatacatcatcttttaaaacggacttttcggccaggcgcggtggctcacgcctgtaatcccagcactctgggaggccgaggcgggcagatcacgaggtcagatcaagaccatcctggctaacacggtgaaaccccgtctctactaaaaatacaaaaaattagccgggcgtcgtggcggccgcctgcagtcccagctactcgggaggctgaggcaggagaatcgcttgaacccgggaggcggaggttgcagtgagcagagatcgcgccaccgcactccagcctgggtgacagagcgagactctgtctcaaacaaacaaaaacaacaaaaacacacacacggactttccagagccctgcagttttgcgcttcagggacaacagtgaacatttatcgatcccatggttctcctacaattgccacgtggccagcgtctacacagccccccatcctgcccctgctgtcaaacacagcgtttccagaacgcagtcgtgctgggctccaggtgagctttgggaggagccccggctgagcccctgcactgggccccgcgcttcgggaagcatctcgctcgttcgtctcgcgcgccgcgtgaccggagccctcacgctggcagcgggcaccgcagggccctgagagtcgggcccgctgcgcgcagccaggggccaacgagagccgacgctgggcgggcagcgtccgggagcccctccgaccctgcgctcccctcgtccgcgccctgaccccgcgtctccggccgtccagcccgcgccgcgtcacctcccctcccggagcgaagggccctgctcgcccgaggacggaggcccgcacgggacacggggccccagtttccgccccggaagcccaggacacggctccagtggcggcgcggcccagggcgcaggcgcgggtgtcggtcccaccgcgcgtcgtcctcgccccggccccggccaatcccttcgaatttggccgaggccgggaaatactagctaatcacggcgcgcgctgttgacgccggccaatgggagctccggaaggctgcgtggagacgccagcggcgggcggtggacagtcatggcggcccggcgcggggctctcatagtgctggagggcgtggaccgcgccgggaagagcacgcagagccgcaagctggtggaagcgctgtgcgccgcgggccaccgcgccgaactgctccggttcccgggtgggtgcgcgcggcggggggtgcg

SEQ ID NO: 25896 - DNA, 2300 bp, Homo sapien
gagaagaatcaccccaaagactaatatttaaacactttaaattattttattttatattttaagatggagtctcgctctgtcacccaggctggagtgcagtggcacgatctcggctcactgcaacctccacgtaccaggttcaagtgattctccttcctcagcctcctgggtagctgggattacaggcaccagccattatgcccggctaagttttttttttttttttttttttttgggacggagtgttgctctgtcgcccaggctggagtgcaatggcacgatctcggctcaccgcaagctcagcctcccgggttcacgccattctcctgcctcggccgcccgagtagctgggattacaggcgcccgccaccatgcccagctaatttttttgtagttttagtagagatggggtttcaccgtgttaggcaggatggtctcaatctcctgacctcgtgatcctcccgccttggcctcccaaagtgctggaattacaggagtgagccaccgcgcctgccctattttattttatttttgagatggaatcttgctctgctggccaggctggagtgcagtggtgcaatctcggctcactgcaacctccgcctcccaagctcaagcgattctcctgtttcagcctcccgagtatctgggattacaggtacttgccaccatgcccggctagtttttgtattattattattttgagacggagtcttgctcttgtcacccaagctgcagtgcagttacatgatctcttctcactgcaacctccctctcccaagttcaagtaattttcctgcctcagtctccgagtagctgggagtacaggcgcccgccaccacgcccgggtaatttttgtatttttagtagagacatgatttcgccacgttggccaggctggtctcaaattcctgccctcaagtgatccgcccgcctcggcctcccaaagtgttgggattacaggcgtgagccaccgtgccgagtctgaaacatattttaattatgtttctccagtattttttttttcttaaaattttcttttttttttttgaagacagagtcttgctctgtcgcccaggctggagtgcagacgcgatctcagctcactacaacctccgcctcccgggctcagcctccggagtagctgggactacaggcgtgcgccaccacgcttggctaatttttttttttttttgtatttttagtagagtcggggtttcaacacgttggccaggctggtctcaaattcctgccctcaagtgatccgcccgcctcggcctcccaaagtgatgggattacaggcgtgcgccagcgcgccggccttctccagtatttttgcatgcatcttacggcacacctttgcacgccatcttattaactatatcatactgccgcacgtgccttttcggccaaggcatccagatggtgcgggtcctgcctgcctcgagaggtggcagcaaaggagccagtgccctcactggtgctgggcggggcggccgctttcctcggagggaaggggcggcgttggcgggggaagggcgccagggcccaggccctgagggaggggcagctcgcccgggccacgcggtgccggccctcggctcaggccgggctgaggccccgggggctcggggtccgggggaaaggcgctgagccagacaggtcccaaggagccttcgggaagggagggcctcgtggcggcctgtccgggacccggccgggagcaggggtcgcgtgggcgccgtcaggacgggcgtgaggtccccgggaccacgtgtttgcgtttggtggcccaggggtcgctgacaggtgcggaggggagacgcccacctgggtgccctgggccgcacgccgggcggtggggccgggaacccctgctcctcctcggcctccgatccgctgcggccctgggtcctgctcgctgcccgacgccgctgccacaacctccgcccgggccccgcagcccgccgcccgccggaagctgaaaggcgtgtccgaccccgcccccgggcgcgaccaatcagcgcgcgcgactcatgaatagtgagcgcgctggcaccgccccgcccccgcctcccgcggcaccgcccgcccgcgcagaccccgagcgcggccgcggacgaagatggcgaccgccatgtacttggagcactatctggacagtaagcgcgccccacgggccccgcgcccgccgcccacgcggagtcctccgtgccgcagccccccgcgcgccgggcaccgcatgcagaccccgtgggctcgggagggcggcgggcgcggccgggcgcgacggggggcgc

SEQ ID NO: 25897 - DNA, 2300 bp, Homo sapien
gatttcgccacgttggccaggctggtctcaaattcctgccctcaagtgatccgcccgcctcggcctcccaaagtgttgggattacaggcgtgagccaccgtgccgagtctgaaacatattttaattatgtttctccagtattttttttttcttaaaattttcttttttttttttgaagacagagtcttgctctgtcgcccaggctggagtgcagacgcgatctcagctcactacaacctccgcctcccgggctcagcctccggagtagctgggactacaggcgtgcgccaccacgcttggctaatttttttttttttttgtatttttagtagagtcggggtttcaacacgttggccaggctggtctcaaattcctgccctcaagtgatccgcccgcctcggcctcccaaagtgatgggattacaggcgtgcgccagcgcgccggccttctccagtatttttgcatgcatcttacggcacacctttgcacgccatcttattaactatatcatactgccgcacgtgccttttcggccaaggcatccagatggtgcgggtcctgcctgcctcgagaggtggcagcaaaggagccagtgccctcactggtgctgggcggggcggccgctttcctcggagggaaggggcggcgttggcgggggaagggcgccagggcccaggccctgagggaggggcagctcgcccgggccacgcggtgccggccctcggctcaggccgggctgaggccccgggggctcggggtccgggggaaaggcgctgagccagacaggtcccaaggagccttcgggaagggagggcctcgtggcggcctgtccgggacccggccgggagcaggggtcgcgtgggcgccgtcaggacgggcgtgaggtccccgggaccacgtgtttgcgtttggtggcccaggggtcgctgacaggtgcggaggggagacgcccacctgggtgccctgggccgcacgccgggcggtggggccgggaacccctgctcctcctcggcctccgatccgctgcggccctgggtcctgctcgctgcccgacgccgctgccacaacctccgcccgggccccgcagcccgccgcccgccggaagctgaaaggcgtgtccgaccccgcccccgggcgcgaccaatcagcgcgcgcgactcatgaatagtgagcgcgctggcaccgccccgcccccgcctcccgcggcaccgcccgcccgcgcagaccccgagcgcggccgcggacgaagatggcgaccgccatgtacttggagcactatctggacagtaagcgcgccccacgggccccgcgcccgccgcccacgcggagtcctccgtgccgcagccccccgcgcgccgggcaccgcatgcagaccccgtgggctcgggagggcggcgggcgcggccgggcgcgacggggggcgcgcggacggggcggggcagggccgcaagggaggggagggcgcggggggcgggcgcggggggtcccgccggctgggtcgcgccaattccaggtgcgtcacggcggggcggggcctggcgatgctgggcggggcttgcggcctcgaccccgcccacatattaggtcccgcccctacccaggccccgcctcatctccgcccccagctccggccccggccccgccaggtcccgcccgtccctgtcccgtctgcaggaggagctggcgcccgctgcggggctccgggccttgggggctccggggtctgggcctccgcctggctgtgcgcccgtgtgcgccggcctcttgtgtgaccgcggctggggagggcgtgcgggccgcggggcgtctctccccggcactggggactgcggcgcggaggcggggagggcggtgccgagtcggccctggtgggcgggctgtgctgtttccaggtggcagcaggtcggcgcccccagcggctgagcggacggtgctttccctcactttacacaccagggaaggtccagcgctgccgagcagcctgctcagggtctcccgctcgtagaggggcagaccccacgcgggacccctgacgtcggcccgggatgggcacagctttggggtcgcggtgtttggggttgtgccgggtggctctggagggcccttgtgggggcgctgcactggggatcctcatggtcttcggcctggcacccgcccaggggctgagacagtggcgagtgagccgtggcctggagctggagaccgctgccctagagggacgcccgattctgcccatgtgctccgctgtctcttgggggtctgagtagtggggggttccctgggtagaagagtcaagctgg

SEQ ID NO: 25898 - DNA, 2300 bp, Homo sapien
gagcgtgaccactgaagcacagcatcacggggagacggttaggcctccggataactgcgggcgagcctgactgatgtcaggtcctccacaagaggtggaggagtacagtcgtctctaaactcccccggggaaagggagactcccttttccggtctgctaagtagcgggtggtgtttcttgacacttttcgctaccgctagaccacggtccgctaggtaacgggtgtcttcccagacgctggcgtcaccgctagaccaaggagccctctggtggccctgtctgggcataacagaaggctcgcactcttctggtcactcctcactatgtcccctcagctcctatctctgtatggcctggtttttcctaggttatgattgtagagcgaggattattataatattggaataaagagtaattgctaccaactaatgattaatgatattcatatataatcatatctaagatctatatctggtataactattcttattttattatactggaacagctcgtgtcttcggtctcttgcctcggcacctgggtggcttgccgcccacagttggtatcgaactcctgacctcaggtgatccacctgcctcagcctcccaaagtgctggtattatgggcgtgagccaccgtgcctggtcagaaaaatcagttattttaggggatggtatgggtggtaatctttatgggttttgaatcattcctaatcccaggggtccaagatgccactggcctgctagtcaaagggagggcgtgtggaggtcaggtggtaagggggtccacagacctcatctgtggtcgtctttccagttcctgaatgtgtaattgcaacagttacccttgacaatgggcaaactcccacactcatctgcagagcaagggccagccaggtaggaagggccaggtggatgtctcctttccagggttgtatgaatgattcacctgggaagaaggtgagtggcctctggggatgtggttaaggaggacaggaatgactccttgcaactgctgctccagagcctcatcaccaggacaaatccagctcgccggttttctgtgtgactaccaggacccatctgctgtcacgggcgtagcctccacctcttgcacagctccgcagtcctgcctcgggccaagtgtggtctcctgctctctgccctcatctgctcagagattggcatcctctgcacccgctagggttctatggaattgggtgagctgaagtaacaagtgctttgggaggccgacgcgggcggatcgcttgagtccaggagttcgagaccagcctgggcagcacatgagacctcatctctacaaaaatacaacaacaacaaaaaattagccgggtgtggtggtgcacgcccgtagtcccagctacttgggtggccgaggtgggaggatggtttgagctcgggaggcagaggttgcagtgagctgagatcaaccccagaactccagcctgggcaacagagctagaccctgtctcaaaaaaacacaaaacaagtgctggcgatgcctcaggcaggggatcccaggccgggaggctcctcgggacagcagttactgcgtcaggagggcaggagctccccaggtgtgcaaagggtttgagggcacggagggctgaacaggcagaagggacagggaggcaagaaaacacctgcaggaggcagctgccccctaagctaaggctggggacccaggaggggtggtccgtgcaggagctggggaggccgctggggaaaggggcgccccctgggctcggcctcggaggagcgggccggcccccaggtccctcggccgagcccacgtcccgggcctcgttctggagaaccctccagctgctgcttgggcgtcttgggctgcgctcagcctagtcccttctctacctggagggatgcgcccgacagccggcgcgccggaggccctcaggaaacgcaggacgaggcggtggccgtcgagcctccggtgccagtcggggcggggcttggacggcggggcggggactgtaggcgcgcagggctgggcctggagggcaggcggggcggggcccgttaggcgcgcggggcggggcttcggccgctgggcggagccgtcaatgcgcaggcgcggcgtcgccccgcccactccggctcggcggctctgggcctgcggcgggcgctgcgggttggagctcgggacgtgatcgtgggtgcgtgcgcgcggccgcgcggagcgctgggctgagggtcccggtctgcggttcagccgcgggtcggggtggcggggcgcgatctcgggcgccgtcagccagtcgg

SEQ ID NO: 25899 - DNA, 2300 bp, Homo sapien
aaaaaaaaaaaaaaactttgaataattttttgtgatgttttataatcaggcaattccattttttcaagtctgtgtagtctgtgaaagttttttttagagacaaggtctcactctgttgcccaagctgaagtgcagtggtgtgatcatagcccctgggttcaagccatcctcttgagtagctgggattacaggtgcacaccaccatgcctaggtaattaaaaaaaattttgtatgtagaaacagggtctcatgtaactcctgggctaaacgatcctcccactgtggcctcctaaagtgcgggggttataggtgtgagcctgagccgctgcacccagcctgtgtggtctgtttttagtgtctgttgtttctgctggttcatgctcctggctccttagtttcttgtgtgcttggctgtctgtggcagtgtgcagctcattatgtttgaagaattatttgtaggggttcctagatgccaaagacgaggtaccttcctccagagagggtttgcttttgcttttgcttttgctaggtgtctttgggtctgttcagcctgagagtgaccaagttcacaggatgaaattctgtgaaactcccaggtagcaagtcagtgtagggctgtgtcgggctgatccatggtcatgatttatcaggagagtgtttttttttttttttacattattcttctgtatttttttgagagacaaggtctcactctgtcatccaggctggagtgcagtggtgcaatcgtggctcactgcagccttgaactcctgcactgaagggatcctcctgcctccctagtagctgggaccaggtgtgtaccaccatacctggctacatttttaaaattgttttatagagacagggtctcccatgatgcccaggctggtcttgaactcctgagctcaaacaattctcctgccttggcctcccaaagtgctggggctacaggcatgagcacctgcgtcgggctccattctgcttttttctcattctgttcagccatttcccctgcagtcttcggggcaagttggttgggacaggcttgcttctggccctgacttctaagatgtggccctgtgggggtctcctggattcctcactctgggtaggctgggaagcttgaggccaaacctgctagcggggcaagggctgtcggccaacagcgttgacttggtgctactcagcccccaggtcaggctcttccctcgctcttgatgctcttcagcgtttttttgtttttgtttttgagacagagtctcactcttgtcaccaaggctggagtgcagtggcacaatcttggctcactgaaacctccgcctcctggttcaagcgattctcctgcctcagcctcccaagtagctgggattacaggcgcccaccatcacgcccagctaatttttgtatttttagtagagacagggttttgccatgttggccaggctggtctgtgactcctgacctcaagtgatctgcccgcctcggcctcccaaagtgctgggattacaggtgtgagccactgtgcccggcctcttcagcggtttctttggtgttttttggcccagcgtttgtggtgttttcactgggcactgggtcacgtggcctagcccattgctgctgggtggaggccccttctcctggatctgccccaatcaggccttgcccgcttcactggtgcccctcccaccatggctgccactgtcctcccacagccaacccagccatcagttctcattgcccctctcgcccattgcctccggcacaagcctggcctgtgatgctgcccccacaccgcctcctccccgccctccaccttcagcccctggtggggctcctcaccacctgaccccggaacggctggggcagccttgactgcttctgccgacttactctctgggcggcagtgccatctggatcggtggttcctcttcatccaggttttctgtgttctgctctgatcccactccaactgcagtcacctgtgtgccgcccgcctgtggtcctgggagcccgaggccagcccggctgccgcatcctgctcttcgcactccaggtctcagacaggagtcactcgcctcttcgtgccacgcccacgtctaagccgggtggaacaggccctgtgaggatggtcctggtgtccctcgtgctcgtgggctcggtccagctctccagggccccagtcagccctggctcctgctctcctgcagctggggcgacttccgacgaggcactcttgtcccacttcctggggattcctgcccactctgagcaagatgcccagtccccaccgccagaccctc

SEQ ID NO: 25900 - DNA, 2300 bp, Homo sapien
taggctgggaagcttgaggccaaacctgctagcggggcaagggctgtcggccaacagcgttgacttggtgctactcagcccccaggtcaggctcttccctcgctcttgatgctcttcagcgtttttttgtttttgtttttgagacagagtctcactcttgtcaccaaggctggagtgcagtggcacaatcttggctcactgaaacctccgcctcctggttcaagcgattctcctgcctcagcctcccaagtagctgggattacaggcgcccaccatcacgcccagctaatttttgtatttttagtagagacagggttttgccatgttggccaggctggtctgtgactcctgacctcaagtgatctgcccgcctcggcctcccaaagtgctgggattacaggtgtgagccactgtgcccggcctcttcagcggtttctttggtgttttttggcccagcgtttgtggtgttttcactgggcactgggtcacgtggcctagcccattgctgctgggtggaggccccttctcctggatctgccccaatcaggccttgcccgcttcactggtgcccctcccaccatggctgccactgtcctcccacagccaacccagccatcagttctcattgcccctctcgcccattgcctccggcacaagcctggcctgtgatgctgcccccacaccgcctcctccccgccctccaccttcagcccctggtggggctcctcaccacctgaccccggaacggctggggcagccttgactgcttctgccgacttactctctgggcggcagtgccatctggatcggtggttcctcttcatccaggttttctgtgttctgctctgatcccactccaactgcagtcacctgtgtgccgcccgcctgtggtcctgggagcccgaggccagcccggctgccgcatcctgctcttcgcactccaggtctcagacaggagtcactcgcctcttcgtgccacgcccacgtctaagccgggtggaacaggccctgtgaggatggtcctggtgtccctcgtgctcgtgggctcggtccagctctccagggccccagtcagccctggctcctgctctcctgcagctggggcgacttccgacgaggcactcttgtcccacttcctggggattcctgcccactctgagcaagatgcccagtccccaccgccagaccctccaacaccaccaccacctcccacaccccagccctctacgcgtctgcagccacaccccgacatggtgctcgggtcacaggccttgaggtgctcctgtgtcacccagtgcaggtgtctgcccccagcctctgcgcctgtgagaccttctctctggaaaattcttctctgatatccacatgcctttgcattgcctccctgtctcgccctgaaaggtgggcacgggccccctcctgctgcagcgtctctggggctgcccgcctgcagacatctccactcagttcctttccatctttgcacttgagggtcggcttccccagggcagcggcctcactggtagcccccaccaaccctggagcactaacacgcctgttggatgaggtcctgagtgcagggaagacctgagtgctgattgtgttaagagaaatgcagccattcccaaaggctgcctgttgctggctctgtgtttgcagaattcccaagatacgccccctctgagtcccactgccgtctcaggtgctgtgtggttcttcggcgccttcccctcctgatttgatgctggtggtgacaccaggcgtgcacctgtccctcctgatctgatgctggtgacaccaggcgtgcacctgcccctcctggcatctgatgctggtggtgacaccaggcgtgccctgcccctcctgatctgatgctggtggtgacaccaggcgtgcaccttctcctgatctgatgctggtggtgacactaggtgtgcacctacccctcctgatctgatgctggtggtaacaccaggcgtgcacctgccaggcaaaccctgggctgtttgttgcagtgccagtcctcgtgctcctcgtggctgcccagctcacccacccacatgagtcgggctgatgttgctgctttgaagggggacttgggtgggctgggtttagctccgtgtggtgcttgacatgctgtgacccgtttcaggctgcccaggctttgctgaggttctgcagaccttcagcacctgcaaggggatgctgggtgagatcctgtctgcattcgagttcatggatgctgtgtgcatgcagctggtcgggcgccatctccacctggccagcccggtgcaaggtac

SEQ ID NO: 25901 - DNA, 2300 bp, Homo sapien
gatgcccagtccccaccgccagaccctccaacaccaccaccacctcccacaccccagccctctacgcgtctgcagccacaccccgacatggtgctcgggtcacaggccttgaggtgctcctgtgtcacccagtgcaggtgtctgcccccagcctctgcgcctgtgagaccttctctctggaaaattcttctctgatatccacatgcctttgcattgcctccctgtctcgccctgaaaggtgggcacgggccccctcctgctgcagcgtctctggggctgcccgcctgcagacatctccactcagttcctttccatctttgcacttgagggtcggcttccccagggcagcggcctcactggtagcccccaccaaccctggagcactaacacgcctgttggatgaggtcctgagtgcagggaagacctgagtgctgattgtgttaagagaaatgcagccattcccaaaggctgcctgttgctggctctgtgtttgcagaattcccaagatacgccccctctgagtcccactgccgtctcaggtgctgtgtggttcttcggcgccttcccctcctgatttgatgctggtggtgacaccaggcgtgcacctgtccctcctgatctgatgctggtgacaccaggcgtgcacctgcccctcctggcatctgatgctggtggtgacaccaggcgtgccctgcccctcctgatctgatgctggtggtgacaccaggcgtgcaccttctcctgatctgatgctggtggtgacactaggtgtgcacctacccctcctgatctgatgctggtggtaacaccaggcgtgcacctgccaggcaaaccctgggctgtttgttgcagtgccagtcctcgtgctcctcgtggctgcccagctcacccacccacatgagtcgggctgatgttgctgctttgaagggggacttgggtgggctgggtttagctccgtgtggtgcttgacatgctgtgacccgtttcaggctgcccaggctttgctgaggttctgcagaccttcagcacctgcaaggggatgctgggtgagatcctgtctgcattcgagttcatggatgctgtgtgcatgcagctggtcgggcgccatctccacctggccagcccggtgcaaggtactgaccccccacacagggggcagctggtcctgcagctccttctgcacgtctggacacatgggacggctcagagaccccgggtgggcggggggtgcccgggcgggcgggtggggggtccctgggcggagcatggagtggccgttgggctcatgtgtaagaaagctgctcttaacatatttaggacaaagaacaggctgccctggtcctgtgtaaggtttgtagttacacagatttcctgatcttctgcaggaaggacgggaaggaactaagtggctatttttggtgagctgggagactttctttccatttcttcttttctttgttttcccatgttgctttctgtaagcacgtttttcttttatgctgggaaaaaagccaataattttttgttgttgggggatggagtttcgcactgtggcccaggctggagtgcaatgtcacgatcttggctcactgcagcctccacctcccggattcaaaccattctcctgcctcagcagcctccacctcccgggttcaaacgattcttctgcctcagcagcttccacctcccgggttcaaacaattctcctgcctcagcctcctgagtagctgggattacgggcacctgccaccacactcagctaatttttgtatttttagtacagacagggttttgccgtgttgtccaggctggtctcgaactcgtgacctcaggtgatccacccacctcagcctcccaaagtgctgggattacaggtgtgagccactgtgcccggccaaagacgactttttaaaccttctgaaagtcagcttaaccagagagctgtgtgctccgcaggctgcctgggtccttcttggccacgaaagatcagtggttgctattacagctgttctgcccgagcagccctgattcttgccctggcagccggagcctctgctcactctgccttccttgctcacttctagagagtccgttttacgtcctcatcgagacttcaggctccaacgcaggccatgacgctgagaagctgggccacttcctggagcacgcgctgggctccggcctggtgaccgatgggaccatggccaccgaccagaggaaagtcaaggtgccctgtgtcctgcttgcaggtccccgctctctgtccgtccagtccagccttgtcttgggatgcctggaac

SEQ ID NO: 25902 - DNA, 2300 bp, Homo sapien
tggagcacgcgctgggctccggcctggtgaccgatgggaccatggccaccgaccagaggaaagtcaaggtgccctgtgtcctgcttgcaggtccccgctctctgtccgtccagtccagccttgtcttgggatgcctggaacggtcattggtgcagcctagacagtgtgggatgtggctgaaatgtgactgggtttcatggctttgagagagtagcctctttggatggaaaatgtattcctggtgtctaggccattttcattaatatttaaaaagtacttcctccccaccatgaccctccccaaccccatgctgtgggatgagcaaggggactgccccattgctggtcccctgcagcctgtggttaagcggccagtcagcggcagctccgcatagagtcgtgtggaaggagtggaggcaggaggagcccctggggctgtggaggcttagcctggacctcgggagtcctaggatgggcagttttccttccctaggaggaaggggcgttgactgtgtgaccagatgatttggccttttgaggccaaaggaaggaggggcaaggcctgggcagggggagccctcggtcaccgtcaccggggcctgggcagggggagccctcggtcaccgtcaccggggcctgggcagggggagccctcggtcaccgtcaccggggcctggatagtgggagccattggtcactgttaccgggacctgggtgggaggagccctcagttaccttcaccggggcctgggcagtgggaggcgcccttggtcaccgtcaccagggcctgagcagtgggcgcaggactttactcccgcttagttgatttcaggctcgtgttagcctgggtgttgcccttgccatcttcccccctcacctttgccgcctgactgtcatgattccagtgcttctgggcaaaacggtgtctgctcccaagggctggggtgcggtcggctgggctcacttgtgtgtcctgatgcccagcccaggggcgtcctctgggcgaatggcagctgtgtggtgccatctctgttgactgaggcatgatcaagtgtgcgtccttcctaggtctctgcctgccattcctgcatttttctaagtggactgtgacagtcagctcccttacattctgccgcagtaacaagcaatccccaggccccagggaccacacgaacagaggctcaccctccctcgcgttccgtgtgggtgatcgctgtggctgcatgtgctcctgtggcttccagtccaggggcccgggctgaggcagctgcccagccagtcagtctgttttcccagcagaaagagcaggacagccgccggggattctctcagcttctgcttgagatggggcgggaacgtgagcccaactgcccttggtggtgcgggtggggaccctcatcccgcactggctgctttgctggagtggcagtcagtcatgcagcccccacaccacccccaggagggcgaccctggcaccccagcctccacacatcagcccccatgcccccacaaaggaaggctgcccccaacacccccaacctctctaccagcccccatgccacccccagggcgggccgtcctccatgcccccagcctctgcacatcatcccccacgccacccccagggcggactgtccccaacgcccccagcctctgcacatcagtccccagcccctccacagcctggtccagtcctagacctgtgccttgaacattaatgcccagagccgggttcatgaccaggacagggccgaatggggctggttctgtgttcacaaagtcacctccagacgcttcctgggacgggttcaggagacgccttgtgtgtctgtcacctcgttctggctcatgctcgacgggtaggtaatctggcctttgttttctgcagatagcaaaacgaccctttcttaggtgtgcggctcgatgagttgacccggatatgcggttgtgtgcagttgctctgaggcttttctgtgctgttgtccggtgttggcgaggctctgggcaggtcctgaggcttttctctgctgttgtccggtgttggcgaggctctgggcaggtctgggcaggtcctgaggcttttctctgctgttgtccagcattggcgaggctctgggcaggtcctgaggcttttctctgctgttgtccggtgttggcgaggctctgggcaggtcctgagccattctgctttccactctgtggtctttcccttctgggagccctgggtttttggacatgttgagacaatggggcttgcgcaggtccagccgctgccgcgggggccctgtgttcaacggggga

SEQ ID NO: 25903 - DNA, 2300 bp, Homo sapien
gcactgcctatccacccgtcacgtgtcattcagttagcaaacctgctagggagatgcctcctgtgccctgtgcctgccgggcgacagcagtgaccagggcgggagaagccttgccccataaactcacgcagcagaaggaacaagctcagcccatggcccctcagagccaggaagcgccggggaggagggcagggccaggcagggtcatggggtgtgccggggagtgccgggagggccggaaagatgaccctgaggggtcatttcagcaaagacggggtgtggggagcagaacgtctggtgcaggagcaccaagaccctgaggggcgcgtgcctgccatgttctagaaccttccagagatggtgggtgtggagctgagtgactgaggcgtgagcagacaagggtagagcccatcttgtggccacggggacacatggggcggccggtctgatgaggaggtaagaaggcctcacaggcagccgatgcccgccagaccatggaggcgaaagccggcctcgcagccgtgcccgtgcggctgtgacgaagggaccgtaggaggggctcttgctcagggcagggcgtgacccaagggtctgatctgaccgaactagctctagaagtttgtaaaaggggccgggcacggtggctcatgctgtaatcccagagctttgggaggctgaagcaggaggatcacttgagcccaggagtttgagacgagcctgggcaacatcgggagacttcaaaaaaacaaaaaattgatggtggggaaatgcgggaattttgggcgccggccggattcccagtggtggcgaggaggtggtatttttttaagtgtcagtgtggcattgtggttgcctcaataaaacagagtctttttttgtcttttttttttgagacagggtctcgctctcacccaggctggagtgcagtgacacagttgcagctcactgcagcctcgacctcctgggctcaagcaatcctcccgcctcagcctcccgagtagctgagtctacaggtgcccaccaccaaacccagctgatttttattgtttttaagagacggggtctccctgtgtggctcaggctggtctgaaactcctgggctcaagtgatcctcctgcctcagcctcccaaagctctgggaatacaggcgtgagccactgcgcccggccaagtgtttctcttagaatttcctgaaatgatagggtctctggaggggcaggtgctgggcttgagccctgggtaggaccctgcaggggagaggtggtcctgcagcccacagaggatggctctgtcctgttcctcatggtgcagatctccacaatggaagttcgaagcaagcaaaagccacgcaaaccacaggccgatctgtctgagccctaggatttggcccggttctgcttcagccaccagcaccgtctgctcctcctcagaatccttcctcccccgtggcccgcccgccgtgtccctcctcctccacggcccgcccaccgtgtccttccctcccccgtggcccacccaccatgtccttccctcccctgtggcccacccgccatgtccctgcctcccacccgacatgccccttgagctgcctgggccctgctgttgtccccactgcctgtgtgactctgcgcccccttccctaccctgccccaccctggttcagggagcgtccaggcccattctcatcctcagggccttccctggcccttgccactctgtgccgtgtcatgacctgaagctgcaggtgggcgcctcccccttccgtcatggctgtcccccttctgtgaggtgtcccagccgcctgattgccggagtcccagggtgctcggtgctgtcgtggagcctgggacattcactgtctgggattgattccagggttggagccacacctggtctggggcattcgctgtcctgggtcagagcccctcctggtctgggacattcgctgtctggggttggagccacacctggtctggggcatttgctgtccggggtcggagcctcacctggtgaagatacagaacatgctgctgccctaaccccgtgtggtgtgccccctgtccccgggtgtcgttcccatagccagcccttgtctcatctcgtctcatcctctagatgctgtgggccctgagggaaaggatcacagaggcgctgagccgggatggctacgtgtacaagtacgacctctccctccctgtggagcggctctacgacatcgtgactgacctgcgcgcccgcctcggcccgcacgccaagcacgtggtgggctatggccaccttggtgagcggcgccccggggc

SEQ ID NO: 25904 - DNA, 2300 bp, Homo sapien
gagatggtgggtgtggagctgagtgactgaggcgtgagcagacaagggtagagcccatcttgtggccacggggacacatggggcggccggtctgatgaggaggtaagaaggcctcacaggcagccgatgcccgccagaccatggaggcgaaagccggcctcgcagccgtgcccgtgcggctgtgacgaagggaccgtaggaggggctcttgctcagggcagggcgtgacccaagggtctgatctgaccgaactagctctagaagtttgtaaaaggggccgggcacggtggctcatgctgtaatcccagagctttgggaggctgaagcaggaggatcacttgagcccaggagtttgagacgagcctgggcaacatcgggagacttcaaaaaaacaaaaaattgatggtggggaaatgcgggaattttgggcgccggccggattcccagtggtggcgaggaggtggtatttttttaagtgtcagtgtggcattgtggttgcctcaataaaacagagtctttttttgtcttttttttttgagacagggtctcgctctcacccaggctggagtgcagtgacacagttgcagctcactgcagcctcgacctcctgggctcaagcaatcctcccgcctcagcctcccgagtagctgagtctacaggtgcccaccaccaaacccagctgatttttattgtttttaagagacggggtctccctgtgtggctcaggctggtctgaaactcctgggctcaagtgatcctcctgcctcagcctcccaaagctctgggaatacaggcgtgagccactgcgcccggccaagtgtttctcttagaatttcctgaaatgatagggtctctggaggggcaggtgctgggcttgagccctgggtaggaccctgcaggggagaggtggtcctgcagcccacagaggatggctctgtcctgttcctcatggtgcagatctccacaatggaagttcgaagcaagcaaaagccacgcaaaccacaggccgatctgtctgagccctaggatttggcccggttctgcttcagccaccagcaccgtctgctcctcctcagaatccttcctcccccgtggcccgcccgccgtgtccctcctcctccacggcccgcccaccgtgtccttccctcccccgtggcccacccaccatgtccttccctcccctgtggcccacccgccatgtccctgcctcccacccgacatgccccttgagctgcctgggccctgctgttgtccccactgcctgtgtgactctgcgcccccttccctaccctgccccaccctggttcagggagcgtccaggcccattctcatcctcagggccttccctggcccttgccactctgtgccgtgtcatgacctgaagctgcaggtgggcgcctcccccttccgtcatggctgtcccccttctgtgaggtgtcccagccgcctgattgccggagtcccagggtgctcggtgctgtcgtggagcctgggacattcactgtctgggattgattccagggttggagccacacctggtctggggcattcgctgtcctgggtcagagcccctcctggtctgggacattcgctgtctggggttggagccacacctggtctggggcatttgctgtccggggtcggagcctcacctggtgaagatacagaacatgctgctgccctaaccccgtgtggtgtgccccctgtccccgggtgtcgttcccatagccagcccttgtctcatctcgtctcatcctctagatgctgtgggccctgagggaaaggatcacagaggcgctgagccgggatggctacgtgtacaagtacgacctctccctccctgtggagcggctctacgacatcgtgactgacctgcgcgcccgcctcggcccgcacgccaagcacgtggtgggctatggccaccttggtgagcggcgccccggggccgcggccctgtgtgtgctgggtggtgggccccacggtcaccgtcaccctgccaggcttcgaggcagggcagtttgaccatggtctctggcttagcatatctcccgtagacactggcaggaccacggtgtctgacagggaagggaaaatcctaatcgttgtcatgactcgttttgagtattttggaaaagactgccatcgtgcacttgtaatggcagagcgcatggctcagcttgtcagaacgttctgggatcttcagtggcatgcagggttggagggcatcagccttaaccccggagtccgggatgcgggtctcaggggctcctctcacagggcccggccccgaggcctttgca

SEQ ID NO: 25905 - DNA, 2300 bp, Homo sapien
cccggctgctccccagctgctccccaccggccttgggtctggtgggtgtggccctcctagtgggaccaggccacacactggagcacatgggcacggcaatgccaatgccgatggaggcgggttcctgggcatgtggacctgtcccttactcgaagcagctgaggggcctccagccagccccgtccgcaccccaggggttagggctctgccatgggggcgtgggcatctgctctgacaaacaacgtgtgcatttgattggtgttcctgagtcaccgtggaccaggcaggctgccagagcggctgattcttagcggggagctggggccgggcagacaccctgactccctggggctcccagcagggccccactggcaacaggcagcctcctccctctggccgccgggcctccgtccctttcccagcctggggctgggaccaccgctccacaccacactgcactgcccttgtctgccccagcagggggtgaaggtggctggtggctgaggaccccctgcccaggcccacacttcttgctcaggccccataagtcacttgggatctggagagctggggactttgacctgggagggaggcatctggtcgtgaccctcaggcgtgtgtagggaggtgcctggccgtgaccctcaggcgtgtgtccctggcaggttgctctccaccggccccaccgtttgtaacacatggctcggccaaggtgattctggggtaaggacccatgaggcgccatcttctttgttcctaggctgagcctgtggtgccctgggcagggtgggtggaggaagcagcagggaggctccttaatggtggagtgaacacccacacggatgtctctggatagtggaatgcggaggatgcagggcacgccggtggagagctgcccagccgtgccagcaaggccccggcatccctcccacctgccgttagcaccgggagctgctctgctggcccctcccacagactcgggctctggaggtctacagagcagctgggagggtgatgcctaggcgggggcggagatgccaggcccctgggctgcaggtggaggtaaatggggaagggaggctgggggtctctgggcctttcgccagcagccgcccagcccagggtctctgatgccagggaggtccatgtgtgctcggcccctcctctgagcccctcagcccagccttgtttctgcctccatggctatggggcctgcacccatccgagccaggcactggctagggcagggaggctgccttgggctggggccagtcccggaatccaggctcagctggcaccgacagggaggggttgtgggaaggtgaccagccgtgtggagagcttggcgtcggagggcatggtgggcaccagcgctggtgggatgtggcgagggtggtggtgactcatggcgcgtggcccgtagctctgaggagcatttgcgttttcctgtggattcactgtagcgcctggtcacaatgttgcagcatttccctggctgcttgtctcggaattaatatctatttcctgaaaagagaaatgaactttcttgcagtaaaatctaaacaaatatttatatttattttccacctccatgtcctgtttcaaacttattgtccagcccaagattttaaaaagtcagattttcttttggtgtgaagcaggctcaggaggaggaggagggggaggaagaagaggaggacgaggagggggaggaagctgggaattgggctgagctttcctcgctcatccttgcagtggccacagggccctctgccctctcgtctgcgtcaggtcctgagttctgagtccagaagccgtcgctgtgctgttggagcccaccaagcccgtcccttgtggggacagctccctccaagccccccggggggatggacactgagggtggggcaggggagcaggggtaggccccaggcaggtcctcccagggcctggggaacacaggggcccatcgagggctccccagactccctcagccagttcttcccgagaacagaacagttaaaaccaagccctccgatggaggtgcggggagagggcgtggctcccgtcccaggaggcaggtgagcttctggggattccagttcacctgccccacagccgcaccctgcctgtgcctgcaccctggggagcccagagccggcaggggccgaggcggtgggacctcgggggagctcaagcctcgactgtcccctcgctggaggccagaggccaagatgatgtccatgctgggcggcttgcagaggtaaggggggcagttggaccccccaggtggacaaagcgct

SEQ ID NO: 25906 - DNA, 2300 bp, Homo sapien
ccaccctccctcccccctcaacccagggacctccgcaggccaccctccctcccccctcaacccagggacctccgcaggccaccttccctcccccctcagcccagggacctccgcaggccaccctccctcccccctcagcccagggacctccgcaggccaccttccctccccctcaacccagggacctcggcaggccaccctccctcccccctcagcccagggacctccgcaggccaccctccctccccctcagcccagggacctccgcaggccaccctccctcccccctcaacccagggacctccgcaggccaccctccctcccccctcaacccagggacctccgcaggccaccctccctcccccctcagcccagggacctctgcaggccaccttccctcccccctcagcccagggacctctgcaggccaccctccctcccccctcagcccagggacctctgcaggccaccctccctccctcctccctcagcccagggatgtctgcaggccactctccctcccccctcaacccagggacctccgcaggccaccctccctcccccctcagcccagggacctctgcaggccaccttccctcccccctcagcccagggacctctgcaggccaccctccctcccccctcagcccagggacctctgcaggccaccctccctccctcctccctcagcccagggatgtctgcaggccactctccctcccccctcagcccagggacctccgcaggccaccctccctccccctcaacccagggacctccgcaggccaccctccctcccccctcagcccagggacctctgcaggccactctccctcccccctcaacccagggacctctgcaggccaccctccctcccccctcagcccagggacctccgcaggccactctccctcccccctcagcccagggacctcggcaggccactctcccctcttagcccagggacctcggcaggccaccctcccaccctccctccctccctccctccctcccccctcagcccaggaaaggcacaggagaggatcctgccaggtaaagggaaagtggcccgggaggagcccacgtgccaacaacaggagtcccagaagacagaaaagaccacagatgagaaagcagttcacgcagagaacaaaacgttcccggaccaaacccagggtcgggttgctcattcccgaggcccgatagcgagatgcagatgaactggggaagaagagggattttatttctgtaactggttacagggagaaggcctggaaatgatcgccagaccaactccagattacagtttttccagagcttacacaccttctaagctctgtgtctccgtgtcagtgtgcattcgtctaaagacgtacgtgattcaattcttctcatctctaactgaggtttggtcctgaagatcttcctctgaagactcagtaaatttacttgatctaaatgggcccaggtgtttacccttatcttgttttctgctaaatcatggaggtttggggagttccttctccacttgtttgtggaggcctggggagttttttcagacccccagtaaaacttgcttaatcctaaacgggtcctggtctcgtcatgcttcaaggcccaagaaagccctgggcaaaactcttgatgggcttttgttacgtcccagccctcgtgtgagggcgctggctctcagctttcaggatttcacttcaccctcagtcagtgctgaacagttgtcgcggaggcctgcgtgagtgaggcctggcgtgccctggaaacattcccctgagttgaagaaagactcacagttttcagcatccagttaccctctgagcatcaggcagaacccgccggccccaaaaccaggcccccttggcacatgtgggcccgagtgagtccagcatgaggaggtgccgcttctgagcagagctcaggttgtctctgggaggaggagcgagcgttgggtgcggtggccgctgcgttggcagccctgtccctgagcggaacgcaggtcgtctctgggaggaggagcgagggttggactcagtggccgctgcggtggcagccctgtccccaggcgtggactctgccctcagcttcacagtcaccgaagaaatgaagttacaggaggggcacaccgtccttttgtctctgcctttgaggttggcgggaactgaaactggtacggtctttttgaatagaaatttggggtctttctggcgacgtaaaactgtgtgtagtttgcagtagagagtgttgagaacagcctgtctgggctgtgcattgagaaggggcggtta

SEQ ID NO: 25907 - DNA, 2300 bp, Homo sapien
aggcctgcgtgagtgaggcctggcgtgccctggaaacattcccctgagttgaagaaagactcacagttttcagcatccagttaccctctgagcatcaggcagaacccgccggccccaaaaccaggcccccttggcacatgtgggcccgagtgagtccagcatgaggaggtgccgcttctgagcagagctcaggttgtctctgggaggaggagcgagcgttgggtgcggtggccgctgcgttggcagccctgtccctgagcggaacgcaggtcgtctctgggaggaggagcgagggttggactcagtggccgctgcggtggcagccctgtccccaggcgtggactctgccctcagcttcacagtcaccgaagaaatgaagttacaggaggggcacaccgtccttttgtctctgcctttgaggttggcgggaactgaaactggtacggtctttttgaatagaaatttggggtctttctggcgacgtaaaactgtgtgtagtttgcagtagagagtgttgagaacagcctgtctgggctgtgcattgagaaggggcggttaaaatgctgccacgtcgtgcagcccataaaagggggacacagagtagccgaaactgctcttgggggagggggcacgtcccagccttccgtgtgatgctggggtcagcgtggcccctcggctgccagagctcacgaagacggttaaggaaagcttcccccgggtggctttcaccccacggggacagagccccagatgggcccagggacctctgagcagccgtgggccatggggtgacagttgggggttggtgggacccgtggctgtcatataccctgggtagacggtggcttgtccaggcagagatgcccaggggaagtgggtggcacctgagggcagatctgacttttcaagagaagctgaaaacacgggtttttctgtgaaatctctagattgaaaacagtgggcttgaaaagcctggagcagagggagtgaggcctgctccccaccccagctctgcgggcacaccctggccagacagccctgctccagacctggcctgtgtctcagggtggcccaggaggggactttgcaaggtgacgtggggcttggaggtcccgtttccctgtaagcctgggtacttaggggatggccctggtcagactccaccagtcccagacttgggggacacgagaagggagatgggccacccagttctggttgggctggggtggggcttctgaggggtggggaggttgtcccttcccacccacctgcccctgccccaggattctcggctgtgagcaggaggatgtgtacgatggccaagttgcctggactgggtccgcccctcctggggctgtgagtgcacaggacactgggcccacaggcacctctggggctctgtccccgtggggtgaaagccactggggggaagctttccttaaccgtcttcacgagctctggcggccgaggggccacggggggcattcagatgagtcagaaggagctggggcccacccctcctgcttcctcgccgcccccctcccagctgcccccagtaaatcccctcaggcccctaggacctggagggacgcggcaggtttatcatctcagcctggaaaccacgtgacctacctgtttcccaccacagcgccccaggtttcagaagcagctgaggatgcccttcgcaggggagggagggacagtgagaaaggagggtgttcagggcccagggatcccccacggaggctgccccatcagaacttaccggggacctgtggcctcctctgagattctggcctgggcagtggtcatttgagcattggttaccaaggctgcctctgaaatggcaggctgggggcaggccagcgtgaaagggactggcaggagtcctgtggggacaggctgggggcaggccagcgtgaaagggactggcaggagtcctgcggggacaggctgggggcaggccagcgtgaatgggactggcaggagtcctgcggggacaggctgggggcaggccagcgtgaatgggactggcaggagtcctgcagggcagctgtgctggggaggggtcaccctgggccctgagaggcacaggacattgcgatggggtgctggcctgccaggagcacagatacagagctagagcccagcgaggcctgtgctgcgaggggctgtgctgtgccaggggaggccccgcacccgggaagcccagaggagagtgtgcactcacggagccctcctggcagggccgcgtctctggagcagcagacccgtgtccctctgggaggtcaactgcggcc

SEQ ID NO: 25908 - DNA, 2300 bp, Homo sapien
caggccctgggttccacagagcctccgtgtcctccatgtggccaggccctgggttccacagagactctgtgtcctcaggaggtccctctgtcttgggggaccagccgtgctcagtgtggccaggccctgggttccacagagcctccgtgtcctcagtgtgaccagttccctgggttccacagagcctccgtgtcctcagtgtgaccagttccctgggttccacagagcctccgtgtcctcggcaggcccctctgtctcggaggccagccccgctcagtgtagccagttcagcacattccaggggtttggcttgactgggacagccatgtcctggacattaaccagtgccccccgccctccctgacagggccctccttgggggtgtggagtcacagaaggggaaaccgaggcccaggggagatgggacctccaggagaacctggccttctggtccgtggacccctggaccggttgtaggggtcactctggctcagcagggggccatcacagaccaccccccccacccccgccaacccctcacagcccatcctgtgtgggcgccccaagagccttgaggtcagaccaggccctccacgcacaccctctggggtccgcacacaccctctggggtccacgcacaccctctggggtccgcgcacaccctctggggtcagcacttcttgtcgtgggaagtgtcaggtgcagggtaggaacatcttggcgaggggcattcacatgcacccacataaagtgcagaggccctttgcacagaatcccggcagggggccctcggcggctctgaccctcagcctgcaccgtgagcgtcctgggccctggccagggcgaagactccgaccacagacccttcacctggtagagcgtccccgaccagcccatctgcagaacgaccctgtgggctggggccggccccctgcattgggcccctcacaaccagtctgtctccatcccatgccctgaatctgcccccaggaaccctcagtgtcacacccaccctgtgggccaggtaagtgtcccattgggagatgcatgtgggacctcttgctggaggggccctcggaatccctgcagcccgccccttgtttgagagctgaggagccaccctggggttggcaaggagtgggactcgtccagcacccccagacagagggggcggccagctggacagatacctcaggagcgggtcctgaccccgggcgcccgggtagaggggtgagggtgctgggggtgcaaagggcagggactcaccagccaccttgggaaggctgcagagctcatcatgggtggctgcctcgcctgacccagagcagagacaagggcccactgtgcgggcagcaggccagggagctggccacgtctcagggctacgtcaggaccctggacactcccacggtggcacggctccactgaagcccagagcagggccaggggtgcagatgggcacccaggagccacacagacgcccgggaccagcacaggctcccctctgcaggtcaatgcactcaacactggggtgctgaggacacgggggtgcgccctccaacaagggctgtgctgggacaggcccagctgtgaggccgcagttgacctcccagagggacacgggtctgctgctccagagacgcggccctgccaggagggctccgtgagtgcacactctcctctgggcttcccgggtgcggggcctcccctggcacagcacagcccctcgcagcacaggcctcgctgggctctagctctgtatctgtgctcctggcaggccagcaccccatcgcaatgtcctgtgcctctcagggcccagggtgacccctccccagcacagctgccctgcaggactcctgccagtcccattcacgctggcctgcccccagcctgtccccgcaggactcctgccagtcccattcacgctggcctgcccccagcctgtccccgcaggactcctgccagtccctttcacgctggcctgcccccagcctgtccccacaggactcctgccagtccctttcacgctggcctgcccccagcctgccatttcagaggcagccttggtaaccaatgctcaaatgaccactgcccaggccagaatctcagaggaggccacaggtccccggtaagttctgatggggcagcctccgtgggggatccctgggccctgaacaccctcctttctcactgtccctccctcccctgcgaagggcatcctcagctgcttctgaaacctggggcgctgtggtgggaaacaggtaggtcacgtggtttccaggctgagatgataaacctgc

SEQ ID NO: 25909 - DNA, 2300 bp, Homo sapien
aagccacagcagagacacaaagaggtgagcccacagggacctgtgggagccacggggctctctggggacaggggatcggctcccacttcctgaacgtcatcgggggagtcacggggctctctggggacaggggatccgctcccacttcctgaacgtcatcgggggagtcacggggctctctggggacaggggatccgctcccacttcctgaacgtcatcgggggagtcacggggctctctggggacaggggatcggctcccacttcctgaacgtcatcgggggagccacagccagggatcctgcaggggacaggtgcttggtgatcagacccctgcctgcaggcagctggccccacagtgccctcattccagtgcctggtgcttcccacctgcagggccctgacctgagaagcgcccacaggaatcagaagctccaaagccgagtggggcccggcggccattctgggagtttgctcccaggcaacacccaccagggcagggcccgggtgagggggcatttggggcacgcatggggtctgcttgttgcaggcgggacctgcctggggggtctctcagtctgatcgcacaaaggcagacggagccgagcgtgagcacgcacagcccggcacagggaggtggcacagctgcagacagtgggaacgctggtcctccaccatgcaggagcggtcagatccacggccagccgcccaggccgggcacacggggcacctggatgcggggctaagggaaggagggaggagggagatggccggatgccggacaccacgcctggccagggcagaacgcctgcctacgacggggacccatgcacacccacgggtcaggcgggacccactgacagagacccgggtaaaggcgcaacactcgtgtaaaacccaagcaggccttgccccgacacctgaggcccaaacagacagctccacctccagccacctctgccctgggccaccggttcctgaaaggctcttggctaggacagctggccggccccttcctgctgctcccccaccaccagtgcgcggcttctgagagcagcttccgtccccaagaagcccctggctctgctctcaaagggcaattgtgcccaagcgggaagcaggtgcagacgccatgtgtccctctgggctgagcaggcacaagcaagacattctctctgcacttggctccctccccaaggcccggaccacaggagcaggtgtcagcaccccctgcagacatgaggcccaggcccacccctggggacagagagggagaggaggagactccagaaaccagctggtcactccccttgttgcacagaggggaaactgaggcccacagagaggacaaggctgacacacacttggcttggggcttccttgccacggccaggccctgggttccacagagcctccgtgtcctccatgtggccaggccctgggttccacagagactctgtgtcctcaggaggtccctctgtcttgggggaccagccgtgctcagtgtggccaggccctgggttccacagagcctccgtgtcctcagtgtgaccagttccctgggttccacagagcctccgtgtcctcagtgtgaccagttccctgggttccacagagcctccgtgtcctcggcaggcccctctgtctcggaggccagccccgctcagtgtagccagttcagcacattccaggggtttggcttgactgggacagccatgtcctggacattaaccagtgccccccgccctccctgacagggccctccttgggggtgtggagtcacagaaggggaaaccgaggcccaggggagatgggacctccaggagaacctggccttctggtccgtggacccctggaccggttgtaggggtcactctggctcagcagggggccatcacagaccaccccccccacccccgccaacccctcacagcccatcctgtgtgggcgccccaagagccttgaggtcagaccaggccctccacgcacaccctctggggtccgcacacaccctctggggtccacgcacaccctctggggtccgcgcacaccctctggggtcagcacttcttgtcgtgggaagtgtcaggtgcagggtaggaacatcttggcgaggggcattcacatgcacccacataaagtgcagaggccctttgcacagaatcccggcagggggccctcggcggctctgaccctcagcctgcaccgtgagcgtcctgggccctggccagggcgaagactccgaccacagacccttcacctggtagagcgtccccgaccagcccatctgcagaacgaccc

SEQ ID NO: 25910 - DNA, 2300 bp, Homo sapien
gatgggacgtgagatcttggtgtttctcctggaggaaacgctgtgctgctgtgttgatgacggggcgtgtgtggggttgatgatgggtgatggagtgtggggttggtgacaggtgacggagtgtggggttgacgacgggtgatggagtgtggggatgatgatgggtgatggagtgtggggatgatgacgggtgatggagtgtggggatgatgatgggtgatggagtgtggggatgatgatgggtgatggagtgtggggatgatgacgggtgatggagtgtggggatgatgatgggtgatggagtgtggggatggtgatggagtgtggggatggtgatggagtgtggggatgatgatgggtgatggagtgtggggatgatgatggagtgtggggatgatgacgggtgatggagtgtggggatgatgatgggtgatggagtgtggggatggtgatggagtgtggggatggtgatggagtgtggggatgatgatgggtgatggagtgtggggatgatgatggagtgtggggatgatgacgggtgatggagtgtggggttgacgacggggcgtggggttgatgatggagtgtggggatgatgatgggtatggagtgtggggatgatgatgggtatggagtgtggggttgatgacgggtgatagaggagtgtggggatgtgatgggtgatggagtgtggggatgatgatggaatgtgggattgatgacggatgatggagtgtggggatgatgatgggtgatggagtgtggggatgatgatggagtgtggggttgatgatgggtgatggagtgtggggttgatgatgggtgatggagtgtggggatgatgttgggtgatgaagtgcggggatgatgatggagtgtggtgatgatgacaggtgacggagtctggggttgatgacggggcgtggggttgatgatggagtgtggggatgatgatgggtatggagtgtggggatgatgatggatatggagtgtggggttgatgacgggtgatacagtgtggggatgtgatgggtgatggagtgtggggatgatgatgggtatggagtgtgggattgatgacgggtgatggagtgtggggatgatgatgggtaatgaagtgtggggatgatgatggagtgtggtgatgatgacaggtgacggagtgtggggttgatgacggggcgtggggttgatgatggagtgtggggatgatgacgggtgaccgagtgtggggttgatgacggggcgtggggttgatgatggggtgtggggatgatgacggggcatggggttgatgacggggcgtggggctgttgatggggtttggggttgatgacggggtgtgtggttgatgacggggtatggggttgatgatggggcgtagggttgatgatggggtgtggggttgatgatggggcatggggttgatgacggggcctggggttgatgacggggtgtggggttgatgacgtggtgtggggttgatgacggagtatggggttgatgatggggtgtggagttgatgacggggtgtggggttgatgacggggcatgtgtggggtcgatgatggggtgtggggttgatgatggggtgtggggttgatgaaggggcgtggggtttatgacggagcttggggctgatgatggggtgtggggctgatgatggggtgtggggctgatgatggggcatggggtttatgatggggtgtgggattaatgacggagtgtggcgttgatgatgaggcgtggggtttatgacagagcgtggggtcaatgacagggtgtggggttgatgacggggtgtggggttgatgacggggcatggggtttatgacagcttgtgtcagacgaagccacatcaactcattctgagcacccctttcctcaaaacataaggatgagcatgaccaaaatctcaagacatttttcctaagtccttaagacggatgaacttctacaggtaagtaggtagattaataaacagaggtaaggaatgttggcatgaagaagctccctaggctgctgtgtggctgaagctctgactggtcatgctggttaaggatgcgtctgagcaagatcggtcgctgacaggtaggtgtgtagaaaataacctatatgtggtggtccattttcagttctaagtgccttcatataggtttaagcaggctatgtggaaatagagaaataaagaagcagaaatgtactgagtcaccaccctgccctccttcctgctttccctttcacccagcggccacgtgcctatcagtaggagccccctcaactaccctctcctcacccca

SEQ ID NO: 25911 - DNA, 2300 bp, Homo sapien
tgcctgtaacaccagcaatggattcgggcctgtggacttcagcagcgctgccctttgtgtggaagtgacggagtcagcctgccccataggttcctgggtgtgagcttcggccgcacacaaaaggtctatttggcgactctggccacgctcttaggacaaaggacatggattgacaagtggcgggcacggacggaggtgcagatgatgtccacggacacgacaagtccatgaggcctgggagggccccggccaccctggcctcacgttccctgagtctctcctgtaagcccagcttcccacccttcagggtgtagatgcccatgttaaaatccagattccagcccgggaggcctgaggtgggcctgagactctgcatttccagcaaacacccaagtgacgtgccagcatccctgttctcatgccatctctgtgtgcgaaaccctaactcactcgtggccggtgctcctacctccttgtcactctgcagagaatgcagtgacgtcaagttcaattgaaggctcgtggccaacatgctcacgtggacacccacaaaggggccacccagactgtggtattttattgaggagcgactaatatagctccctggcgttataaatgggagaaatcaagagtgagttgcaaatacaggccattcttttggttttgtccacagatagctgagttacagagtaactgtgtagtctgtgtggtgcagggggtggcagaggggaaggggcaggtgaggcttggcatgaggggcttctcattgcaggcgtccgagggagttcagtggaggagtaagacccagggagagcccagctgggctgaggcttgttttctgcacatgggttgctccaccgtgaatagttaatgaactaagtgtcattttcactaaatctttcctttgcaccaaactcactaccattcttcatggagtctttctggggcttctgtttgcaatgactcatctggggagaggacggaaggacagtcagtgtccagcttggttggtagatgggtaggtcagatggagatgagaaagaccttttcccctcatcactctcacgcagttaatccagagccccttagagaggtttacaactggagctgctatttaaaggcctagatgagaatgtaatagtaataatgatcctcatttttattctcagctgacagagcaagggaatgtgtgtgaatgctaatccatgcacatacatgtctataaatattctgcatggaaccatctgtgtctatgtcaagctaaactggggttcataccagggtctccaaccatagcccatccccactggggtccttccagctcactcggcttctggatgtacgactcccacaggtggaggaaggcccccagagaagtctgctgaaaattgttattcatgaatggaggttggacttcttcagatacacttcccgagtctgttaacatggtgatgtgacgtttgcccttcatgttactcatagggactattctgttagctaccaattctgctgctttaaataaaaacaccattaaaaaacaaaaagaaacaaattgtaataaaatatttgcatacatataaaatctgaaagacatatatcaaaatataaaggtccttcctttacaaatcaataaatatacctttttaaaaaaacagacaagacagacattagacaaaaggtgatacaagaatgaccaataagcaaattgaaagcactcagtatcctcggccatcaggaaatgcacattcatcataatgggatgctgtgtgacgcacgttgaaataactggatgtgaagatcctggccccaccctgtgccgggagggtctggaacatctggaatattcacgtcgccggcggggaggaggtgcacaggcacaggcactttgaccatagcatggcaggtcccccacaactatatgtacacctgccctgtgcccagcaaaatgtaaatgtcttccacaaatagtcctggacagggtctctcaaaggggctttaactgtaacagcccacacctggaattgtccacagtcctgggcggggtcactcatagtaacagcccacacctggaattgtccacagtcctgggcggggtcgctcacagtaacagcccacacctggaattgtccacagtcctgggcggggtcactcacagtaacaggccacacctggaattgtccagcattcctcaacaggaaacagttaaagaaagtgtgtctaaccacacatggaaggccactgggcaatgaaaatgcatgaacttctggcgtccacaatctagtggatgaatctcaaaagat

SEQ ID NO: 25912 - DNA, 2300 bp, Homo sapien
ctgttgacgcactgatcggcacccactgacactgaaaggatgccgatttgtttctgaaccgtgaaatgttgatctgattctgtgtcatgacattctgctgacttgcttctgaatcacgaagctttgctggtttgtttcggaatcatgaagctttctgattgccttgcatggagacgttttagccctcacggtatgatctgtgtgcactggctgtgccctccaacctgtccccccatgagaaggatgcctctgttgtgaggagtcccctcccttctcctaaacttttccagaaagtcttccacctagtagccgaccccagaacatgctcagttctgtgggcgtcttcccaagtggatccccatgttcagcttccaataaaactttatccagtcacttctgcctgcacagccttagtttccatcagaagtctacacgtgtgtatgtgtatagacacacacacacacacgtgcacacgtgcacacacatgcacgttttgtgtctggctattttcacttacaatttttttttttgtcagcctaacaggtgaatctgattttgattctttagatgctgcctaaggaagttgaagaaaaaaattcctttttttgtagtagctggatctgtatccaaaatttaacgtattgtagctctcctgctgtgccaggctcagtttgttttaaagatttcccagaggggacgactcagaaagaggctctgagggtgtggcatcctctgcacactttgggtgccaccagctgacgtgtgactgtgacttcacgggtggtgccccggcctcatatgcttcgtggttctctgtctcactcctgctcacgggcgatgccctggcctcacgtgcctcgtggttctctgtctcactcctgctcacgggcggtgccccggcctcacgtgccccgtggttctctgtctctctcctgctcacaggaagtgccccggcctcacgtgccccgtggttctctgtctcgctcctgctcatgggcagtgccccggcctcacgtgccccgtggttctctgtctctctcctgctcacaggaagtgccccggcctcacgtgccccgtggttctctgtctctctcctgctcatgggcagtgccccggcctcacgtgccccgtggttctctgtctctctcctgctcacaggcggtgccctggcctcacgtgccccgtggtgctctgtctcgctcctgctcatgggcagtgccccggcctcacgtgccccgtggttctctgtctctctcctgctcacgggcgatgccctggcctcacgtgccccgtggttctctgtctctctgctgctcatgggcagtgccccggcctcacgtgccccgtggttctctgtctctctcctgctcacaggcggtgccctggcctcacgtggcccgtggtgctctgtctcgctcctgctcacctgccgggctttcgtctctgcccagggatgaaaccatcatgtggcttaattgatattttgtgaaagctgcaaattatgtgtgcagtcctgtcaataattcctattggctgactttctctcttctccaatattctacaaccatatgtacagtcaaagctgtccaccttttacattcatgattgatgctccataaatatgctggctagataaagccgcagctgttaggcaaaggaaagaaagacacatttatctgagacccaaggcagctgtcaagcagtgggaatggccctgaaggccataaagaacccagaatgactgaccgggatccgggtggacaggagcgggggggtggactctgaccccacccacccccacacctcctatccttgcactgttccggggatgaagtggattttgggagctgggcatggggcacaaactctctctaacagctgtggtggaaccagggctcactgcaaaccccctttcctgttgggacgcctcatgggctggaccccatgagggctcttcagaaaggtgagaacacgcagtaagacctttctccaaagttaccaaagatgacagcaacccacggttagcacaattttataaagactgaaaacttgctgagcctgtgtagttaataagtggagacacaaggcaaaatccaatgataagcaagtgaagatccatcgttatgcgatgaacagtatttccatgaagttctgcttagtgagaatagagatcacatgctcccttccatttttcaaacattatttcttgttcttgcggtctggaagaaaatgactgaaagattactttgtttctctttgattcactttaaaagatgtgggaaagggaacgcgagctgccc

SEQ ID NO: 25913 - DNA, 2300 bp, Homo sapien
actggggtttgctcaacattgctcagtgtctgctgttttccccctggagacctgggcgggacatgccctgggagacaccagaatcagggctcccaggggtcaggtcagcgctcggcccctgacctattcccttgtggactttctgggcaggctggcgatctcggcgtggtgagaacacagctgcacggggtctgtcctgctctgtggtccaggtgtggtccaggtgagcccgctcgccagctgcagacaggatgagaagctcatgaaagaggcttctgcaggtgtggtggccacaacgttctctgactctgggagctgatcctagtcttgtagccgctgggcacagaccctcgggctggatgtgaagaccccagtcttctgccgccttgttccgtggtcccccccgccgagtcccagatggtggatcttcttgtgtgctaccagagggtggcaggaggggacgctgagcctgcccccagccccctgactccgtgtagtagcacatcccgtatgcagacttgtgttagaatagtctatgttgataatgtggtaaattctagactcaggataaattaacttaacatctctaccagggtgtaatgtaatattgaacacatgtgtaacgtgctttaaaggtgagtccacactccagacccagctcttgttcttcctacacgctgattacctatacattgtacctaaattggcatataacccaaataaacaccaaagtatcatccttagatccattttgggtggaaaacctcataattatcagtcttctaaaggcaagtatttacgtgcttgggctcataattattatcctaattgtgtcatttttttaagtcaaaaaatgctaaacacagagcatgtagaatcagaaattgcatagatttgcctcagagaaagacgcccctttttataacaaacataaaatataagacatctgaaaaaagctgaccctgaaaaattatcttatggtcacatttagtttccttttttctaaaaaactgtattttatgactgttttaatggaaacattaaaatttctattacattatggagtaaaagtggtagctcatgctagtgtaattatatgtaaattattcaacctttaaagacagcagtgtctcctgagtttcaaaaaatacaattttttattttagccttctctccaatattaggagtatattttactctaccaaattaaataatttaagcttaaagttggatttccttatgtagcactttaaatataagaatctcttataagtctagctaccttcaaaaacagttgtgataaaacaactgtttatgcctcagaaacatttttgagatttatattctgctccttatgttaatattccgaggattatattcatcccatttttagtggacctcaaattcatttcatgagaagtaaagacgcactcagcagcaaagtcagacagcttgacatgtcattaaaaacctcattctcttcctgtttccccttccacggtgaatttctatgtgatatcttatcacctccagggtggagagatgaaatcagctttttgaatcactcctgagaaaagaggtgtgtgagaaaacacaactgtgaaatgtcgtaccagcccaaccgaggcactgacaatcccctggccacttccctcggctgatcgtcttctcgttaatgcttcttagtgaaatgcattaatagaattttaaaaagggtgctccatttactttagacttgggaagaacaaattctcatcaactcttctttacccaaaatacaaatggccgctttttaatcttctcaaggcctattttcctattcgtttagctttttggtaagcctcattcccgagctgtgcaattcatcctccttggtctccctgcaaaaattgtagaaaaggatggaaattttctcagaaacacaacaaaacctactggagttttgaaaggagttgcattgagttactggtcagcttgaggtggacagactaaagtggagtctttcaatgtaaaaacagtatagctctcgcgtgtttaggattgacttaatttctgtcaaaaacatctcacaattttctgtgtaaggctcttacatatcctgcttagattttttcctacctatttatagttttccaatttcattttctgtttgtttctgatgtaaaattgtgtttttgtttcattaccttgtatctaacacacttactcaacatattaattaattctcataatctttccataagttccttgtggttttctataaacacaatcatgccatctttgaacaaaatgagtttatg

SEQ ID NO: 25914 - DNA, 2300 bp, Homo sapien
gagacctgcagaggagccggtgttggtgtttctagttgagggtcgtggatctggagatacagcatggagtggtgttgttctagttgagggtcatggagctagagacccggagaggagctgctgtgtttctagttgagggtcatggagctggagaccaggggaggaactggtgtctttctagttgagggtcgtggatctggagatacagcatggagcggtgttgttctagttgagggtcgtggagctggagacccagggaggagctggcgtgtttctagttgagggtcgtggagctggagacctggggaggagctggtgtgtttctagttgagggtcgtggtgctggagacccggggaggagctgctgtgtttctagttgagggttgttgtggtggagacccaggaaggagctgatgttccagttgagggtcgtggagctggaaacccagggaggagctggttcttctgttgtttaagtctgaagatcgtcgagttggagatccagggaagagccagtgctgcggttcaagtctgagggtcttggagcttgagcccccaggaggagccggtgctgccactaatgtcttaggttgtaaagctggagacccgcggaggagctggtgttgctgttctagtgggaggcttgtggagctggagactgagggaggagctggtgtgtttctagttggagggtcgtgcggttggagacccggggaggagctgatgttttcctagcttgagggtcgtggagatatagacccacggatgagctggtgctgctgttgtttaagtctgagggtcatggagctggagatctggggaacagctggtgctgcggttcaagtctgagggtctcagagctggagccccctgggaggagtaggtactgccactgatgtcttaggttttggagctggagacctgtggagaagccaggctggtgttctagtttgaggtttgtggagctggaatcctggtcaggagccagtgatgctgtttaagtctgaagttcatggagctaaacgtggagctgatgttggggaagtagagagagagagtttcaggacgccgtggaaactgtacatgtagctgaatcccaagcaagttaagcctgggagcttctcagtcctcgggattaatgcattcctttttctcttacacagtttggatttgttttctgtctcatgagacagaaagaccctgattaataccctcaggaattgaaaagcttaaaaaaactaaatgatattggaataataataatagaaattaaactatgattatcctgactgacagaatcacacaccacacacaatatatattttcaatcagttagtaaaataatatataaattgaaacatagacccatgaagagctgtaaaaagttatttcatggagaagtgatggatgacagagattaatctgagagttactgttaatggagaaacttagaacttaccatttttcctgtgaggtttcggtgctaatactgatactctgtgagttctggcagctgaatccattcacataggctggtgatgcagcaggtgtcacagaaggaccctgtcccagctggtcctgctccactgctaggatggtgtggcctctgatctctgactgtgtcttgaggggagaccaggcccttgatcacaagcgtatccatggtgaggttccgtggatggaacctcatggatgttcccttcctgatgttcattggccatcttgctatttaatgcatcttgttaataactgtcttctaaacattgaatagaaataaagtatttgtacaatatgggtaaggtataaagaatattgacacattggacacagaggacctccaccaggtttagggaatagaatctgaagagacataactttggatgctccctggaggccctgcctgagtcccagtcccttctcttctcctacagagggaaccacttcctgctttagtctttattattcccacacttttcttcatagtacgtttctttcaccgcgtatgtgtacatccctaaacaataagccatttagtttttgaactttgttttctttttgaggcagggtcttgctctgttgccttggctgtagttttgaactttgatgtgaggaaattctcctgcgtggctgctcctgcactgcatggctctgagcatctgctctatgtctatttctgtcctccattctctccttgagacccacccacactgacatggttcattttcattgctgcgtgatctcctgtctccattctctccctgagacccacccacactgacatggtccattttcattgctgc

SEQ ID NO: 25915 - DNA, 2300 bp, Homo sapien
tgttactctgtgggctctgatgttacactgtgggttctgctgttactctgtgaattcctgctgttactctgtggatctctctgtggttactctctgaattcctgctcttattctgtggacttcttttgttgctttgtgagtttctgcagttagtttacctctttaccatccagccaggaattctttcactaggaattgtgtggatgctggccaattgggctaaatttaatattactatgtcccctattgtggtggtggggtcttggcttggcaatttctactagtattccatatgcagttaatcttgacacatcagtgaaagaaaaataaaatctcaggcctccaaacttactatgccaaagggaaaagttaatattggcaacacacacacacacacgcacacacacacacacacacacatacatgccttctttttgttcccaaaagcttactttatcttatgtgaaatgtagatctactgagtatgagacagatgtataaccctcccccatacctttcttttcacatgtgaaatgtagatttgctgtactctaatcagagcctcacaaaaatgtgaccacttgcctcatagcctactctcccctctttcccctcctaccggcgcttttcccttaaatatttggaaaaaagtacaggccaaaaatcctactgtaacctgtgtttctttttccccaggcaaatccacaattttggcaaaataaacctctatatcagttgtgatctgcctcagacactttttggtttacacaacaatccaatcatagcgatttatttggaaatataccttcacaagttaaatcaaaccacagcactactgggcattatttgtaatggcaaactattgcaaacaatctaaagcccatcatagacatcatagaaactattctaataaattgatacatttatataatggaataatccgcaaccttgaagggaatgaaggaaggaataaagagagagggtaaggaagaaaagaaaggagagagggaaggagggacagacaggtgtttaaattggggatgtgcaagcaatattgcctgcttcattgccttcacattatctaaaagcatgtggtcaagaaacactattacaataagcacatcagaaataacttctaaaattacttttccaaaatatgaatccatactatacacttcctgtaatgtgcaccaaatgtagatgcacacattttaacaaggaaaagactaatactcatatttgcttgctacacaccagacactgttttaaatgttttgcacacgttaactcatctgttcttacagaaatcctgtagcgtgcaccgccacctccatgtttctaggaggaaactgaggcacgggggctgcggctcctggacgcacctggccttctcggcctgcctctctccctccagccgccccacattcttttttcctaattggaaaaaactattcacgctgctcctccagggcatttcaaccttctagaaagactcgacaagattcgaaactgtttataaagagaacgtgcttgtgcctgaatgctgagtgtgagcgcgcagtgatgccctagagtgcagtcatcccgggcttggcgcccagcgggtggaaatacggccgcagggtggaaatgcggcggcggggctgcccaggctcctgtgggacccgcgcggcgcgggcacgcacattctcagggacgcgcgtcctcaggccacgagaacacctgaaggccccggccagcgtcctccagtgaagacccggaccggcgtcgtcacccgccgcgcaggcctaaatctcaggtcttcaccgtcatctcccagcgatcgcagggatctcaggcactgaccgcgcccgtccctgcgcccccccgcccccgcccccccgcgcccccgcgcccccgcgcccccgcgcccccacacctccacgcccggcactctgggcgcgcgcggacggcggggcagtgcctactacgcaggcgcacgctgcgggcgtcaggacccggcagcaacactgccacgcgaatccgcgccggccaatcagcatggccaggggcggggcttccctgaggcgcgccgagaggcggtggcccacttccggcaataatcgcctggtcgccgtcaggtgccggcccaggtggcaggcgcgcccgttgggcactgggggacgcgggcgcgtcaggtgaagactgggggctgcaggcgcgctaggtaggtacggggtgccgcgggcgcgtcaggtgaagactgggcgccgcaggcgccttaggtgaagattggggatcgcgggcgcgtcaggtgggga

SEQ ID NO: 25916 - DNA, 2300 bp, Homo sapien
tatcttctaggattgtataagtgcccatttaataacttgttttttgttaattatactaaatatagttgggaggtggtgtttggagatgttcatctctcatttattctccatgatgtaaatattctacattattctctacgatataaatattctacattataaaatactcaagtctgttcgggacgtgaaattaaagtaacacattacagaaaccacttttacttgagtaattcagctacctttctgtagctaaattcaacgtatattttcaactcttgccatgcttggcgtttttataacattttcgtctctgtcgatcatttctttcttgaaatacatttttctcctggcttcctacttctccctctacctttttggctcttccttttcagtttttctttttggcttatatctgctggtcccttaaatggtgatgtttcttagggtttttttcttggctctcttgatttccctctcgacatattctgtgatattatttgtgtggtcttgattagtatctaaatgctcatgattttcctctttctctctagtccaactctcttctgaaccatggatctatatatttattcattcagtaaataaatacttatagagctcctgttgttttcctggcattgttcaaggtaatggaatacggacctgaacaagacattgcattttcttggaggaaaacagatgataaacacgctaatcatttcagacagcccttacaactatgaaggcactagataatgacttagactggtagggatggggttgaggcagcagaacagcactgtttggacagggagtcagggagcctttctgggatgtgacattttgaatcagcagtgtgaacatctgaggtggtttttagcctcatgcacagtctcactgtgtatgagaatcacctgtggacctttaaaaactatttaaacttagccttcacccccaaatattcatatttaactcaactaaaatgggactaagcacttgaatgtttaaaaaccttcctgtgatgttaatgcacagcagtagttgaaaatcactgatcaagaggagcagaaatcaagttaatgggaagaactagcatttgaagtctcactcttatcaaattgtgagcttcatgaagttaatcacgaagttgcatcattttttaagtcataatttttatacctggagtctagtatttcaaactgaacaggcatgtccgaagctgaaattaatatcccttatctctcctttcctaataaaaccctgctgttccttctgtatgtcttatcccagaaccaggggctacaaaacaaaatctagataacttccttgatttcctcctcacgtttccagccagtcttcaagtactgtttgactctgtttcctaaatgtttctgtagtctctgctcttctgtttcttttgccactgtacactctcaccttttaaaaatcaacattcagaagcctccagtcccaactactttcctgcaggtgatcctcaccccataccttctcccagtgtgatactgagttctttgtaaaccacaaatctaattgaatcacttacctgcttacttcccttttttggcccctcattgccctcagaatagcatccaactcctctgacttgatccagccttaaatgacttctccatccttaattctggcccactccctctcatctattctaagcttcaaccaaactgaactacttagagttgctgaacatgaatacatttcatttttggttgctcctaacttctggtaaagagaatacttgtttgggataatattccctattccacactccctgacccctgcttgtttttcaggtatgagcttgaatgtcacctctggtaaacctttcgtgggatatgcagtattaggccagtaaaaccacgtttacttaccccattttatcactttagtacaatcaaagtactgtgttattgtcactgtcaccaatgtccagccaacatttaattaatgagcagacatttaaatgttaagaactttaatctttaaaattaatgaataaatgttctaagtgaaaagaaacttttatgaattatatatactttttaacataaattaactttttcataggagaactatgccatttttgggtcaggactggagatctcctggatggagttggattaagacagaagatggctggaagaattgtgaatcttgtagtcagaaacttgaaagagagaataaccattgtaacatcagtcacagcatgtaagttacagctgagcagaaccatgccatttgccagtttagcatgtatggccttacct

SEQ ID NO: 25917 - DNA, 2300 bp, Homo sapien
aggcctgcgtgagtgaggcctggcgtgccctggaaacattcccctgagttgaagaaagactcacagttttcagcatccagttaccctctgagcatcaggcagaacccgccggccccaaaaccaggcccccttggcacatgtgggcccgagtgagtccagcatgaggaggtgccgcttctgagcagagctcaggttgtctctgggaggaggagcgagcgttgggtgcggtggccgctgcgttggcagccctgtccctgagcggaacgcaggtcgtctctgggaggaggagcgagggttggacgcagtggccgctgcggtggcagccctgtccccaggcgtggactctgccctcagcttcacagtcaccgaagaaatgaagttacaggaggggcacaccgtccttttgtctctgcctttgaggttggcgggaactgaaactggtacggtctttttgaatagaaatttggggtctttctggcgacgtaaaactgtgtgtagtttgcagtagagagtgttgagaacagcctgtccgggctgtgcattgagaaggggcggttaaaatgctgccacgtcgtgcagcccataaaagggggacacagagtagccgaaactgctcttgggggagggggcacgtcccagccttccgtgtgatgctggggtcagcgtggcccctcggctgccagagctcacgaagacggttaaggaaagcttcccccgggtggctttcaccccacggggacagagccccagatgggcccagggacctctgagcagccgtgggccatggggtgacagttgggggttggtgggacccgtggctgtcatataccctgggtagacggtggcttgtccaggcagagatgcccaggggaagtgggtggcacctgagggcagatctgacttttcaagagaagctgaaaacacgggtttttctgtgaaatctctagattgaaaacagtgggcttgaaaagcctggagcagagggagtgaggcctgccccccaccccagctctgcgggcacaccctggccagacagccctgctccagacccggcctgtgtctcagggtggcccaggaggggactttgcaaggtgacgtggggcttggaggtcccgtttccctgtaagcctgggtacttaggggatggccctggtcagactccaccagtcccagacttgggggacacgagaagggagatgggccacccagttctggttgggctggggtggggcttctgaggggtggggaggttgtcccttcccacccacctgcccctgccccaggattctcggctgtgagcaggaggatgtgtacgatggccaagttgcctggactgggtccgcccctcctggggctgtgagtgcacaggacactgggcccacaggcacctctggggctctgtccccgtggggtgaaagccacttgggggaagctttccttaaccgtcttcacgagctctggcggccgaggggccacggggggcattcagatgagtcagaaggagctggggcccacccctcctgcttcctcgccgcccccctcccagctgcccccagtaaatcccctcaggcccctaggacctggagggacgcggcaggtttatcatctcagcctggaaaccacgtgacctacctgtttcccaccacagcgccccaggtttcagaagcagctgaggatgcccttcgcaggggagggagggacagtgagaaaggagggtgttcagggcccagggatcccccacggaggctgccccatcagaacataccgggcacctgtggcctcctctgagattctggcctgggcagtggtcatttgagcattggttaccaaggctgcctctgaaatggcaggctgggggcaggccagcgtgaaagggactggcaggagtcctgcggggacaggctgggggcaggccagcgtgaaagggactggcaggagtcctgcggggacaggctgggggcaggccagcgtgaatgggactggcaggagtcctgcggggacaggctgggggcaggccagcgtgaatgggactggcaggagtcctgcacggcagctgtgctggggaggggtcaccctgggccctgagaggcacaggacattgcgatggggtgctggcctgccaggagcacagatacagagctagagcccagtgaggcctgtgctgtgaggggctgtgctgtgccaggggaggccccgcacccgggaagcccagaggagagtgtgcactcacggagccctcctggcagggccgcgtctctggagcagcagacccgtgtccctctgggaggtcaactgcggcc

SEQ ID NO: 25918 - DNA, 2300 bp, Homo sapien
ttccctcccccctcagcccaggaacctccgcaggccaccttccctcccccctcagcccagggacctccgcaggccaccctcccccctcagcccaggaacctccgcaggccaccctcccccctcagcccaggaacctccgcaggccaccttccctcccccctcagcccaggaacctccgcaggccaccttccctcccccctcagcccaggaacctccgcaggccaccttccctcccccctcagcccagggacctccgcaggccaccttccctcccccctcagcccagggacctctgcaggccaccctcccccctcagcccagggacctccgcaggccaccctcccccctcagcccaggaacctccgcaggccaccctccctcccccctcagcccaggaacctccgcaggccaccctccctcccccctcagcccagggacctccgcaggccaccctcccccctcagcccaggaacctccgcaggccaccctccctcccccctcagcccaggaacctccgcaggccaccttccctcccccctcagcccagggacctccgcaggccaccctcccccctcagcccagggacctccgcaggccaccttccctcccccctcagcccagggacctccgcaggccaccctccctcccccctcagcccagggacctccgcaggccaccttccctccccctcaacccagggacctccgcaggccaccctccctcccccctcagcccagggacctccgcaggccaccttccctcccccctcagcccagggacctctgcaggccaccttccctccctcccccctcagcccagggacctctgcaggccaccctccctccctcccccctcagcccagggacctccgcaggccaccctccctcccccctcagcccagggacctctgcaggccaccttccctcccccctcagcccagggacctctgcaggccactctcccctcttagcccagggacctcggcaggccaccctccctccctccctccctcccccctcagcccaggaaaggcacaggagaggatcctgccaggtaaagggaaagtggcccgggaggagcccacgtgccaacaacaggagtcccagaagacagaaaagaccacagatgagaaagcagttcacgcagagaacaaaacgttcccggaccaaacccagggtcgggttgctcattcccgaggcccgatagcgagatgcagatgaactggggaagaagagggattttatttctgtaactggttacagggagaaggcctggaaatgatcgccagaccaactccagattacagtttttccagagcttacacaccttctaagctctgtgtctccgtgtcagtgtgcattcgtctaaagacgtacgtgattcaattcttctcatctctaactgaggtctggtcctgaagatcttcctctgaagactcagtaaatttacttgatctaaatgggcccaggtgtttacccttatcttgtcttctgctaaatcatggaggtttggggagttccttctccacttgtttgtggaggcctggggagttttttcagacccccagtaaaacttgtttaatcctaaacgggtcctggtctcgtcatgcttcaaggcccaagaaagccctgggcaaaactcttgatgggcttttgttacgtcccagccctcgtgtgagggcgctggctctcagctttcaggatttcacttcaccctcagtcagtgctgaacagttgtcgcggaggcctgcgtgagtgaggcctggcgtgccctggaaacattcccctgagttgaagaaagactcacagttttcagcatccagttaccctctgagcatcaggcagaacccgccggccccaaaaccaggcccccttggcacatgtgggcccgagtgagtccagcatgaggaggtgccgcttctgagcagagctcaggttgtctctgggaggaggagcgagcgttgggtgcggtggccgctgcgttggcagccctgtccctgagcggaacgcaggtcgtctctgggaggaggagcgagggttggacgcagtggccgctgcggtggcagccctgtccccaggcgtggactctgccctcagcttcacagtcaccgaagaaatgaagttacaggaggggcacaccgtccttttgtctctgcctttgaggttggcgggaactgaaactggtacggtctttttgaatagaaatttggggtctttctggcgacgtaaaactgtgtgtagtttgcagtagagagtgttgagaacagcctgtccgggctgtgcattgagaaggggcggtta

SEQ ID NO: 25919 - DNA, 2300 bp, Homo sapien; identical to SEQ ID NO: 25889

SEQ ID NO: 25920 - DNA, 2300 bp, Homo sapien; identical to SEQ ID NO: 25890

SEQ ID NO: 25921 - DNA, 2300 bp, Homo sapien; identical to SEQ ID NO: 25892

SEQ ID NO: 25922 - DNA, 2300 bp, Homo sapien; identical to SEQ ID NO: 25896

SEQ ID NO: 25923 - DNA, 2300 bp, Homo sapien
gatttcgccacgttggccaggctggtctcaaattcctgccctcaagtgatccgcccgcctcggcctcccaaagtgttgggattacaggcgtgagccaccgtgccgagtctgaaacatattttaattatgtttctccagtattttttttttcttaaaattttcttttttttttttgaagacagagtcttgctctgtcgcccaggctggagtgcagacgcgatctcagctcactacaacctccgcctcccgggctcagcctccggagtagctgggactacaggcgtgcgccaccacgcttggctaatttttttttttttttgtatttttagtagagtcggggtttcaacacgttggccaggctggtctcaaattcctgccctcaagtgatccgcccgcctcggcctcccaaagtgatgggattacaggcgtgcgccagcgcgccggccttctccagtatttttgcatgcatcttacggcacacctttgcacgccatcttattaactatatcatactgccgcacgtgccttttcggccaaggcatccagatggtgcgggtcctgcctgcctcgagaggtggcagcaaaggagccagtgccctcactggtgctgggcggggcggccgctttcctcggagggaaggggcggcgttggcgggggaagggcgccagggcccaggccctgagggaggggcagctcgcccgggccacgcggtgccggccctcggctcaggccgggctgaggccccgggggctcggggtccgggggaaaggcgctgagccagacaggtcccaaggagccttcgggaagggagggcctcgtggcggcctgtccgggacccggccgggagcaggggtcgcgtgggcgccgtcaggacgggcgtgaggtccccgggaccacgtgtttgcgtttggtggcccaggggtcgctgacaggtgcggaggggagacgcccacctgggtgccctgggccgcacgccgggcggtggggccgggaacccctgctcctcctcggcctccgatccgctgcggccctgggtcctgctcgctgcccgacgccgctgccacaacctccgcccgggccccgcagcccgccgcccgccggaagctgaaaggcgtgtccgaccccgcccccgggcgcgaccaatcagcgcgcgcgactcatgaatagtgagcgcgctggcaccgccccgcccccgcctcccgcggcaccgcccgcccgcgcagaccccgagcgcggccgcggacgaagatggcgaccgccatgtacttggagcactatctggacagtaagcgcgccccacgggccccgcgcccgccgcccacgcggagtcctccgtgccgcagccccccgcgcgccgggcaccgcatgcagaccccgtgggctcgggagggcggcgggcgcggccgggcgcgacggggggcgcgcggacggggcggggcagggccgcaagggaggggagggcgcggggggcgggcgcggggggtcccgccggctgggtcgcgccaattccaggtgcgtcacggcggggcggggcctggcgatgctgggcggggcttgcggcctcgaccccgcccacatattaggtcccgcccctacccaggccccgcctcatctccgcccccagctccggccccggccccgccaggtcccgcccgtccctgtcccgtctgcaggaggagctggcgcccgctgcggggctccgggccttgggggctccggggtctgggcctccgcctggctgtgcgcccgtgtgcgccggcctcttgtgtgaccgcggctggggagggcttgcgggccgcggggcgtctctccccggcactggggactgcggcgcggaggcggggagggcggtgccgagtcggccctggtgggcgggctgtgctgtttccaggtggcagcaggtcggcgcccccagcggctgagcggacggtgctttccctcactttacacaccagggaaggtccagcgctgccgagcagcctgctcagggtctcccgctcgtagaggggcagaccccacgcgggacccctgacgtcggcccgggatgggcacagctttggggtcgcggtgtttggggttgtgccgggtggctctggagggcccttgtgggggcgctgcactggggatcctcatggtcttcggcctggcacccgcccaggggctgagacagtggcgagtgagccgtggcctggagctggagaccgctgccctagagggacgcccgattctgcccatgtgctccgctgtctcttgggggtctgagtagtggggggttccctgggtagaagagtcaagctgg

SEQ ID NO: 25924 - DNA, 2300 bp, Homo sapien
gaagcacagcatcacggggagacggttaggcctccggataactgcgggcgagcctgactgatgtcaggtcctccacaagaggtggaggagtacagtcgtctctaaactcccccggggaaagggagactcccttttccggtctgctaagtagcgggtggtgtttcttgacacttttcgctaccgctagaccacggtccgctaggtaacgggtgtcttcccagacgctggcgtcaccgctagaccaaggagccctctggtggccctgtctgggcataacagaaggctcgcactcttctggtcactcctcactatgtcccctcagctcctatctctgtatggcctggtttttcctaggttatgattgtagagcgaggattattataatattggaataaagagtaattgctaccaactaatgattaatgatattcatatataatcatatctaagatctatatctggtataactattcttttttattatactggaacagctcgtgtcttcggtctcttgcctcggcacctgggtggcttgccgcccacagttggtatcgaactcctgacctcaggtgatccacctgcctcagcctcccaaagtgctggtattatgggcgtgagccaccgtgcctggtcagaaaaatcagttattttaggggatggtatgggtggtaatctttatgggttttgaatcattcctaatcccaggggtccaagatgccactggcctgctagtcaaagggagggcgtgtggaggtcaggtggtaagggggtccacagacctcatctgtggtcgtctttccagttcctgaatgtgtaattgcaacagttacccttgacaatgggcaaactcccacactcatctgcagagcaagggccagccaggtaggaagggccaggtggatgtctcctttccagggttgtatgaatgattcacctgggaagaaggtgagtggcctctggggatgtggttaaggaggacaggaatgactccttgcaactgctgctccagagcctcatcaccaggacaaatccagctcgccggttttctgtgtgactaccaggacccatctgctgtcacgggcgtagcctccacctcttgcacagctccgcagtcctgcctcgggccaagtgtggtctcctgctctctgccctcatctgctcagagattggcatcctctgcacccgctagggttctatggaattgggtgagctgaagtaacaagtgctttgggaggccgacgcgggcggatcgcttgagtccaggagttcgagaccagcctgggcagcacatgagacctcatctctacaaaaatacaacaacaacaaaaaattagccgggtgtggtggtgcacgcccgtagtcccagctacttgggtggccgaggtgggaggatggtttgagctcgggaggcagaggttgcagtgagctgagatcaaccccagaactccagcctgggcaacagagctagaccctgtctcaaaaaaacacaaaacaagtgctggcgatgcctcaggcaggggatcccaggccgggaggctcctcgggacagcagttactgcgtcaggagggcaggagctccccaggtgtgcaaagggtttgagggcacggagggctgaacaggcagaagggacagggaggcaagaaaacacctgcaggaggcagctgccccctaagctaaggctggggacccaggaggggtggtccgtgcaggagctggggaggccgctggggaaaggggcgccccctgggctcggcctcggaggagcgggccggcccccaggtccctcggccgagcccacgtcccgggcctcgttctggagaaccctccacctgctgcttgggcgtcttgggctgcgctcagcctagtcccttctctacctggagggatgcgcccgacagccggcgcgccggaggccctcaggaaacgcaggacgaggcggtggccgtcgagcctccggtgccagtcggggcggggcttggacggcggggcggggactgtaggcgcgcagggctgggcctggagggcaggcggggcggggcccgttaggcgcgcggggcggggcttcggcggtggggcttcggccgctgggcggagccgtcaatgcgcaggcgcggcgtcgccccgcccactccggctcggcggctctgggcctgcggcgggcgctgcgggttggagctcgggacgtggtcgtgggtgcgtgcgcgcggccgcgcggagcgctgggctgagggtcccggtctgcggttcagccgcgggtcggggtggcggggcgcgatctcgggcgccgtcagccagtcgg

SEQ ID NO: 25925 - DNA, 2300 bp, Homo sapien; identical to SEQ ID NO: 25899

SEQ ID NO: 25926 - DNA, 2300 bp, Homo sapien; identical to SEQ ID NO: 25900

SEQ ID NO: 25927 - DNA, 2300 bp, Homo sapien; identical to SEQ ID NO: 25901

SEQ ID NO: 25928 - DNA, 2300 bp, Homo sapien
tggagcacgcgctgggctccggcctggtgaccgatgggaccatggccaccgaccagaggaaagtcaaggtgccctgtgtcctgcttgcaggtccccgctctctgtccgtccagtccagccttgtcttgggatgcctggaacggtcattggtgcagcctagacagtgtgggatgtggctgaaatgtgactgggtttcatggctttgagagagtagcctctttggatggaaaatgtattcctggtgtctaggccattttcattaatatttaaaaagtacttcctccccaccatgaccctccccaaccccatgctgtgggatgagcaaggggactgccccattgctggtcccctgcagcctgtggttaagcggccagtcagcggcagctccgcatagagtcgtgtggaaggagtggaggcaggaggagcccctggggctgtggaggcttagcctggacctcgggagtcctaggatgggcagttttccttccctaggaggaaggggcgttgactgtgtgaccagatgatttggccttttgaggccaaaggaaggaggggcaaggcctgggcagggggagccctcggtcaccgtcaccggggcctgggcagggggagccctcggtcaccgtcaccggggcctgggcagggggagccctcggtcaccgtcaccggggcctggatagtgggagccattggtcactgttaccgggacctgggtgggaggagccctcagttaccttcaccggggcctgggcagtgggaggcgcccttggtcaccgtcaccagggcctgagcagtgggcgcaggactttactcccgcttagttgatttcaggctcgtgttagcctgggtgttgcccttgccatcttcccccctcacctttgccgcctgactgtcatgattccagtgcttctgggcaaaacagtgtctgctcccaagggctggggtgcggtcggctgggctcacttgtgtgtcctgatgcccagcccaggggcgtcctctgggcgaatggcagctgtgtggtgccatctctgttgactgaggcatgatcaagtgtgcgtccttcctaggtctctgcctgccattcctgcatttttctaagtggactgtgacagtcagctcccttacattctgccgcagtaacaagcaatccccaggccccagggaccacacgaacagaggctcaccctccctcgcgttccgtgtgggtgatcgctgtggctgcatgtgctcctgtggcttccagtccaggggcccgggctgaggcagctgcccagccagtcagtctgttttcccagcagaaagagcaggacagccgccggggattctctcagcttctgcttgagatggggcgggaacgtgagcccaactgcccttggtggtgcgggtggggaccctcatcccgcactggctgctttgctggagtggcagtcagtcatgcagcccccacaccacccccaggagggcgaccctggcaccccagcctccacacatcagcccccatgcccccacaaaggaaggctgcccccaacacccccaacctctctaccagcccccatgccacccccagggcgggccgtcctccatgcccccagcctctgcacatcatcccccacgccacccccagggcggactgtccccaacgcccccagcctctgcacatcagtccccagcccctccacagcctggtccagtcctagacctgtgccttgaacattaatgcccagagccgggttcatgaccaggacagggccgaatggggctggttctgtgttcacaaagtcacctccagacgcttcctgggacgggttcaggagacgccttgtgtgtctgtcacctcgttctggctcatgctcgacgggtaggtaatctggcctttgttttctgcagatagcaaaacgaccctttcttaggtgtgcggctcgatgagttgacccggatatgcggttgtgtgcagttgctctgaggcttttctgtgctgttgtccggtgttggcgaggctctgggcaggtcctgaggcttttctctgctgttgtccggtgttggcgaggctctgggcaggtctgggcaggtcctgaggcttttctctgctgttgtccagcattggcgaggctctgggcaggtcctgaggcttttctctgctgttgtccggtgttggcgaggctctgggcaggtcctgagccattctgctttccactctgtggtctttcccttctgggagccctgggtttttggacatgttgagacaatggggcttgcgcaggtccagccgctgccgcgggggccctgtgttcaacggggga

SEQ ID NO: 25929 - DNA, 2300 bp, Homo sapien; identical to SEQ ID NO: 25903

SEQ ID NO: 25930 - DNA, 2300 bp, Homo sapien
cttttcatctgcctgtttgccatttgtatgtcttcttttgagaatatctattcagatactttgcccatttttaagttggatcattagatttttttcctatagaattgtttgagctctttgtatttcctgttattaatcccttgtcagaagggtcgtttgcaaatattttctcccattctgtgggttgtcttttcactttgttgattgtgtgctttgctgtgcagaagctttttaacttgatgtgatcccatttgtccatttttgcttcgattgcctttgtttgtgggttgctactcaagaaatttttgtccaaacatcctggagagattccccagtttcttatagtagtttcatagtttgagatcttagctttaagtctttaatccatttgacttaatgttttgtatatggtgaaagacaggggtctagtttcattattctgcatatggatatccagttttcccagcaccattttttaaagagactgtttttcccccaaagtatgttcttggcaactttgtcaaaaatgagtttactgtagatgtgtggacttgtttctgtgttctctattcttttccattgctctatgtgtctgtttttatactagtaccatgctgttttggttactatagctttgtagtataatttgaagtgaggtaatgtgattcctctagttttgttctttttgcttaggatggctttggccatcctgcatttttaacccttttcccattttcacccagaatactcgctggtggcacttgcagctgcagggtttaccctgagataactttgccacaaaatatctcgcctttattattattttcacatcgttctaatatatcgactttgaaaacacaaatcatcattctatttatagcatcttgttgttagcagtggtatttccatttacaaaatatagaaattcttgatcgctgaaaatgtcaaattctagaaagcatagcattcccatgttaacattgttctcaaacagttttgggccaaagagtcatttaatgaatccggttttttccaaaatagatgattctgattattcagatgattctgatgttagttctgtttaaaaataattccaagaacagtttgtatattttattttcacactgaacatcagtcagcctccagagcatgttaatgtaaaattaaatgaacatgggcagtgagctgcagttttttttctaaacagtgcagctgtttagaaaatttttttaaaattttcctgatttccttggtattaaacatatgtgggagaaatacagctcagcaaactcttccaggagataaaatgctgatcactcctactgggcaatttcacaaatgtctcctatatttttctcctttggtagtggggatggggggcataatgttacattgggcctctctcctctctctctttctctctccctctccttttaaaatgtttcctctctctcaatatttcatttcttatttgtatttctgaatgagggaaaagagttgatgggacagcggaacgggaaaaagaagagcaccaataaaacctgttttcctgttttcactattttcattccaaattccttctgtctcataattgatggaatcttatgaacttattagttaaaaagtgtctttcttgtttcacaggaattcatatcggggtgatcactcagaagaaaaggtgaataccggatgttgtaagctattgaactgccacaagtgatatctttacacaccattctgctgtcattgggtatgtacaaagtgctgcatacagacagaggagaaggacaattgagcccatctaaagttaacaaaaacttcctcttggggctgtttctttccatcagaccttacagttctacgggataatagcttatctcataaggcctcagctttctttaataatttctagaagcagacgttattgtgtcatgcacactcagtgttgcaaattaatggtctggtgatctgggtggcatggcattttccccttctctggttcatcacccatgatagaccagtaaaggtgaccacttaaattccttgctgtgcagtgttctgtattcctcaggacacagagcttcctctctcccaggagccatgaatatcctgatgctgaccttcattatctgtgggttgctaactcgggtgaccaaaggtaatggaaccctataaagcagagatgatgactaggatgagttgttgcccttgggctcccctggtatcatgatgggaagagagggaatctgcaggaaaaatctgggccaacaaagagcagcagaatgctcttattttggcag

SEQ ID NO: 25931 - DNA, 2300 bp, Homo sapien
attcataaaacaaatactactagacctaagagggatgagaaattacctaattggtacaatgtacaatattctgatgatggttacactaaaagcccatactttactgctactcaatatatccatgtaacaaatctgcgcttgtacttctaaatctataaaaaaattaaaatttaacaaaagtaaataaaacacatagctaaaactaaaaaagcaaaaacaaaaactatgctaagtattggtaaagatgtggggaaaaaagtaaactctcaaatattgctagtgggagtataaattgttttccactttggaaaacaatttggtaatttcgtttttttttttttcttttctcttttttttttttttttttttgcatgccagaaaaaaatatttacagtaactatggaacacaaaggtttattacatccataattaacatggaacatttacttatcagtttgacaaggacaacactgagacctcttaggacagagagaaagggcaattttcaaaggaaaaaagcatagtatatgcatatttaataagtaaaacatacacataccctgtgactcagccattgtacatctagctgtttatccaagagaaatgacagcatatggctacacaaagagttgcacacaaattttcaatggcagttttatttgtaatagctaacatctgaaaacaatcataatgttcattagggggtaaatggataaatgatcatatatgcataaaaagtaatacaagcaataaaaaggaatgaactattggtacacgaaacatatatgattcaaaataattgccttggatggaaaaagacaagcggaaaagtatacatgctatattacttcatttatgtaatattcaagagaatgccaagaaagctacaagaacaaatagcaggtcagtcgttgcctgggtatcatggaggtagagggagggaagggaagaggaaagagtggatgccaaagaggaatgagaaacattttgagagtgaaggatatatacattatgttgattaaggtaatggtttcaccagtgcatcttttgccaagttcatcaaattatacactctaaataatgcagtttaatgtacatcaattatatctcaataatttggaatgaaaaaaaaaaactcctcacaaagaacaaaacctctaggacctgatagctttcagtcacaatatagtcaggcactcaaaaaaaaactttaacacaataaaattctctttgaatgccaccttaaactcaatcccatccagagaaaacaacttttattagaatgacatgtgatttgcatttttagttcatgcatttacttatatacacataaatatagctttttcacataaattagaatcattgctatgcatgttgttctaaaatgttgctttttcactcaaaaaatgtttagtaagataaaatctgctgcactctttttaacagaagcacagaattaaatcatatggatgcacttcgttttatgctactctacagagtgacaagacttctttgtgcatttatctttgagcacttatttatttctttgtaaaaggctttctaaatttccagatcatcaacaaagcattaatttggtcagttaaaaaacaattgcttatatccttctctgaaaagaatgatgtacagaaaagaattatatatatatatgaataatacatcataagtgttcagaaagacattgtattttaggtggagagacaggcaggtgaccagactgctacatgcagtaagatgaaccctgatagaactaacactggaggctgtgaaaaaactgctaggagcacccagccttggtagagcagcataatttcttcctgtaattctttctctccaaattgccatacacttcagcagagtttgcaacttctcttctaagtctttatccttcccccaaggcatgcctagcacaggactcttgaacagtgatgcctcaattagagttgctagccaatagattgaagctatgttggcacaatatcctacatcctcccgatctactggctgagcccaaccccacctaagaaggacaataaagatctgtgttcagagtcatactgaatagagacttctggactctatagaacccactgcctcctgatgaagtccctactgttcacccttgcagtttttatgctcctggcccaattggtctcaggtaaacagaatcttggggaagaagaaacactggcctggaacagggtcctgcacatggagtccctgtttctaagtggtctgtggaaatggggtctggcttctcactgggagcagggctgagattt

SEQ ID NO: 25932 - DNA, 2300 bp, Homo sapien
atgcagtaatttcctttttacatttacccaacttttttggttattttcaccagatacattgttcaatatatctattctactatattctattaataacagtctactatatatgtgtcttattgtctaatattgctgaaatctttttttaatccaataatgaatctctgtcatctaatcagtgagtttaagccatgtgaatgtattataactactgatctattaggacttttttctgccctccagttgtgacttatctattcctcattttttttagtttctgttggatggatcatatgttcttctgctaatatgaatattataattttatttttatttgttttattaaaaatttgtccttgctcttaggacccattcctatccttatatttattattactaatttaacatccagcttcagaaatacaactttaataggaaggctttttgtatttctcctgactgctcagacttagggtctttatttgatgctccaccaccaagtcacctataaggaaagtttgcattcacaggaagactataaataataaaaccaatcccttgactaggacttaaaccatgtaaaagctggtggcaaaagtaaagggaggtgacccttgagacctctgaggtaactgctcttaaatttacatttgcctctaaaaaggatttcttatatgtcaacatctctctgtttaaacatattcttgtgtaaaaccactacgtgacctgaataatggccatagggctcatctctaagccaactggcttatttatttaatgcatctcagtggttaacagggttgaaattttttgaaaactgcaatcaatgatcaaagaatgatctaggtaaacatcgattccttgtggcaacattttaatattttcaaagacaaggtacaactggtagaaaaaaaataccctcatgcatctttttcttctaattgtggtaaaatatatgacataacattggccattttagccatttttccttttatttttagttgacacataattgtacttatttataggatacaaagtgatatttcaatacatgcatataatgtgtaatgatcaaaccagggtaattagcatatccgtcacctcaaacatttatcatttgtattgggaacattcaaaatcctctcttctagccttttaaaagtatacaataaattgtagttaaccatattcaccttacagtgctacaacaccagaagtcattcctcctatctataattttgcatccattagccaatctctctccatcctcccctctccctaatcattaccagcctctaatattaatatctgcaacactactctctacttccatgtgctcaacttttttagctcccatatataaataggaacatgtggtaatctttctgtgcctgacatttcacataacataatgtcctccaggctatccatgttgttgcaaaggacagaatttcattatttttatgggtgaatagtattccattgtgtgtgtgtgtgtatatatatatatatatattccattgtgtgttatgtatgtatagtattccattgtgtgcatatatatgtatatatgtgtgtacatatatatatacataatatatattcttctgcacatggaaatccagtttctccagcatgatttattgaagagggtatcctttccccagtgtatgttcttggtgcttttataaaaaatcaggtgacctcagatcagacccaactacatcataccttctttcgaaatgtgcaagaaacctactagaaattcttattgttagagtttcagatttatgtcctggtttatactgccacattcattcttggaggtgagtacatttcgatcttggtccggctgcgcagagagtcaaagcaggaaaatcacagattcttcccagcagtctacagcctacacagcggcatttggtgcgatgggatggaacatgctgtatctctattccatgtgggggtaaagtgggtggcctgaaatttcctgtgtctgcctgcatgatgcaaagctcacagttcagaagcttaaggacacacttcatatcatcccatctgttctggttcagtgcataagaatctaagtctctgaggaaggtagcatagtgtgcagttcactggaccaaaagctttggctgcacctcttctggaaagcctggccatggggctcttcatgatcattgcaattctgctgttccagaaacccacaggtaaaccaaaccagaagctcactcaaatcaacagtgggatggagcattttcaggagccaaagggaacttcataatccacactaaagg

SEQ ID NO: 25933 - DNA, 2300 bp, Homo sapien
aagggaagtagaagggaactgccaagcagatgttgaagccaaaagagccacaagacaggaccctccattagaaatgcttatagaaggacccctagtgtggggtaaccccctccaggaaaccaagccccagtactcagcagaagaaatagaatggagaacctcaagaggacatactttcctcccctcaggatggctagccaccaaagaagaaaaaatacttttgcctgcagctaaccaattgaaattacttaaaaccctttaccaaacctttcacttaggcattgatagcaactatcagatggctaaattattatttactggaccaggccttttcaaaactatcaaatagatagtcagggcctgtaaagtgtgccaaagaaataatcccctgcactgcaggccatacatttcaatccctgtatctttaacctccttgttaagtttgtcttttccagaatcaaagctgtaaaactacaaatcattcttcaaatggagccacagatgccgtccatgactaagagctaccgtggaccattggaccggcctgctagcccatgctccaatgttaatgacatcgaaggcacccctcctgaggaaatctcaactgcacaacccctactatgccccaattcaggaggaagcagttagagcggtcgtcggccaacctccccaacagcacttgggttttcctgttgagagggggtactgagagacagggctagctggatttcctaggccgactaagaatccctaagcctagctgggaaggtgaccgcatccacctttaaacacggggcttgcaacttagctcacatgtgaccaatcaggtaggaaagagagctcactaaaatggtaattaggcaaaaacaggaggtaaagaaatagccaatcatctattgcctgagagcacagcaggagggacaatgattgggatataaacccaggcattcgagccggcaacggctaacctctttgggtcccctccctttgtatgggagctccattttcactctattaaatcttgcaactgcaaaaaaaaaaaaaaaaagaaaaagaactccaagtctaataagaccagagacctgccctttatgggtctgcagactattgcagataaacaaataattggaacatgacatagtgtgaccatcaacaaaaatatgtacaaatacagtgatggtgcgaagaagagagtttgcagctctgtttagttgggtcagggaaactttcacttatatagagatgattgaacttggttttgaaggaaaaccaggagttcactagcaccaattatatggaggggatggggagtgtaatataatctgtaaggagggatttaaatgtgaaaagaaacagattaaggaagtaaaagttcaggaaggtgtacccactagtttgggagaaacatagatggttccataaaatgtcccaagagaggagagcagagaccagtttataataagttgagtgctgtgctaaggagatttgatcttttgaaaactttcagttgttgaattttgctctactagatggacaagtctttatgggaaactctcaaataatatcaatttatctagccaaacctaaaagcaatcttactcctagaatgactatctggaagctttatacattaaaaaaattattgttgaatatgcttctgtgtcgactaatgacttaatttatcttccaaactgggttagttttgttagaggcagcagtagccggatggaacattggaacaataggaataagacaggattatcccacacaacccaaggcccacgaccaaccaaccttgacccaaatgggttggaagctcagacggaaagtcatagttcctgctctctaggggcgcatatcctgaggaagggggaggagggatgatatggtggaacattctgggactgtgagctccatatttggggatgtaggtgtgtgtgttacgggggtggacttggaattcctctctgtctgtgtgggttaaaatgagagctccgagcgctgatagctctcaaaactctggatcatctttaaagacctgtggcacacagaccactggacaaagttctgctgcctctttctcttgggaagtctgtaaatatgaagctgtttctggttctcattattctgctgtttgaggtactcacaggtaacttgtccaaatgtactataacatcctaagagatattactatttgtaagagtgggaacaggactttcaagattatttatatttggccaaaatcataaaaaagtacccattctcctggttgcctgacttgagtctatgccttagaagag

SEQ ID NO: 25934 - DNA, 2300 bp, Homo sapien
ttccatatatacatgcaacatacttaatttttcataactttccaattcttattaactcaactttttgttccataataactgtgcttctctttgtaccagtactttccatattcttattgctttgggactagcaagacacaatgaggtgaataatgttatttcaatgcatcttaaaacaccagaaaccaattaatatgcgatattcaggattaactgattccaaagggctgttaattccatctcttgatattgacaagtagtaagtaaatatgcctaagcttgattatttttgttcatagaagtaaaatatacatttcataaagtgaaagttcataagatttgcttttattgttttaaaaaataacagttaatttaaacaaaactgaggagtcattggatactatagtagctaatgaaatcctaagaagacatgaatttcaggaaggcgaggaaccagggaaactcttgaaacttgaacaattaataatattcagagccaatgagcttcaatatctgagtttcttaggaaatgtcccaaattagcaggggaaagcatctgattggtaggcttggttctattgttacacctggatcaatcagctacgaccaaggaatctgagcagtacactataaaaattgctgcttttaattatttcaaccattgtggaagatagtgtggcaatccctcaaaaacctaaagtcagaaataccatttgacctagcaatcctattactgggtatatgcccaaaggaatataaatggttctattataaagacacatgcatgcatatgttcactgcagcgctattcacaataacaaagacatagaatcaacccaaatgcccatcatttggccatttggataaagaatggataaagaaaatgtggtacatatataccacggaatactatgcagccataaaaaagaatgagatcgtgtcctttgcagggacatggatggagctggaggccattatccttagcaaatgaaggcagaaacagaaaaccaaatactgcatgttctcacttataggtgggagcaaaatgatgagaacacatggacacacagaggggaacaacacacactggagcttactggagagtggaaggtgggaggagggagaggatgaggaaaaataactaatggacactaggcttaatagctgggtgatgaaataatctatacaaccaacccccatgacacacattacctatgtaacaaaccagcacatcctgcacatatacccgcgaagttaaaaaagtttttttttagttgctactttaaaaggatgtgggaatcattgtaaactcaaaagttaaagatgtgccaagagctgtctcccacgaacttgtttaacaaacgtactgactttgtatgttgatccaatacccatgctggccactggacataccagtacaaacaaggcagaatcttcactctcctctagctcttctaattctcatgcactaagtgccaaccttagcataactgggctgacaatcagtgaatcaaatatctaactcttatcctactccaacgttaagaaagagacatgcgactgggtgcggtggctcatgcctggaaccccagcactttgggaggccaaggtgggcggatcacttgaggtcaggagtttgagaccagcctggccaacatggtgaaaccccgtctctactgaaaatacaaaagttagctgggcatggtggtgcatgcctgtagtcccagatactctacttgggaggctgaggcaggaggattgcctgaacctgggaggcggaggttgcagtgagtcgagatcacgccactgcactccagcctgggcaacagagtgagactccatctcaaaaaagcaaaagagagacacatgcaaagggcttgctctttctttctcatcttacctatcttatgttttcctccaggatcaagagcaaggaatttgttgcatagaggtgttcaagaaagggtgttttcaaacagagtcagaaaaaacacaactatactgcgagcagcatacaaacctgctttggctgcacttcactgctcatggcataaggccacgaagaggccaataaaggctggagctcaggagcatcaacccagattcaaggcttcctctctggcacccaaccatgaagctcctttttcctatctttgccagcctcatgctacagtaccaggtgaacacaggtaatgtggattcccaagtttaagatgggtagatgagaggaaccaaggatttggctgcccatgacaatggaaacccaaagagaggagactgaaagattagctgttcaaaaa

SEQ ID NO: 25935 - DNA, 2300 bp, Homo sapien
tgaaatatcactctgtatcccataaatatgtataattattatgtcaattaaaaataaaattttaatttaaaaatacattttaaaaatcaatacaatatctgacctgacactgcaatctcaactcaaggaggaaatgaatgctgtaaaaggcattattaggtcaattggcaaattggaatacagatatatatatatatatatatatatatatggatagatgatagactagataaaagtggtgtccatttaaatttatggagttagtaactatactgtcatacaggagaatatccctattcttaggaaatacacactgaattatttgggagtaaaaggccacgataatataaggccatgaacatataacttatgctcaatagattcaaagaagaaaatatacaaatatagagagactaatatagatatatatatatccatagatagagagaggtggggcaaatgctaaagcaagaaagataaaatgtcaacaataggcaaatctcaggggagctggggaaaaggtatcgtacaatttgtattttgcagccggtatgttttaaattatttttaaatgaaaagattttttaatgggttgaggaaattggagtgacttatatttatgacatccaatggactgtgcatgctgtatggaaacaaggagaaaataaatgtcatcattgcttaacaagtgaagggtaaaaagacaattaactcactgaagactacgcacagaaacacaaaagcctttgcttctgtggttataggtttaccaaaggcacaaagggatttgtatttattttaggattataatttacatcacttagttggaaaaattacagattttaagatatttttacaaatctgagtgactgtaaagactgctaaagtcttgggacatattcttaccaagtcccagatcttttgttttgttttgttttgtgcctgaaatcaaaccaggttttttagaccaggaaaacgtgagaagctagagctgctctactcagttggcccaaaccaggactccggagattattcccttatacagcaggcaccacattagagaaaggattctggaaaagtgagctggaacagaaaagaactgtctcaatgggaaacagactccaaaggacgctattggggggaggaaaacacaaaatatttcttgagaagaatgtggaaatggcaaagtctctagcctccagaaaccttaaactctagggaaagaaagcaaaaatttagaggtaagagtgttcatattaaaattcaaacaataagtagtttttctataaactctctttttttctaatcatgaaagtacacataatcattctctccaaactcagacattttagacagatagatagatagatgacagatagatagatagatagatagatagatagatagatagatagatacacatgcatacatactacatacatatatacctacatatgttggcacatagatgttcctttaccacagattaagttattctagatgcatatcttgtagcctacatttttatacattttcatcattttaataactgcatactgctctattatattctgtattttctatattagattagatccatgttttatcaccatttaggtagcttttggttttctgttactgtaatgttgagataaacgtctttatgtacttgttcaattattcccattaaacaaaagcccaaggtacaaagtttctgagtaaaaaaataggcacattttaaggcttctgatatatattgccaaattgtgctacaaaagaaaaactgtaccaattaacactcccagcaacaacgccaagagaatgctagtttccccacatctcaccaacactgtctagaacgcatagttttagagatgaacgctgggaaccgacgcactgtttgctctacctctccccctcctaacagtctagaacacaggcgctcaataaatcaatccaggctccagtccagtagacattctgatctaatctgactgctctgggtaacagaaaagtctcccttggttcactgcccagtatcctggcatcatgtggatcctataaaggcagtagctccaagcacattacagagggacccaactccattaaaccaccaccagctccccaagccaccccttcagccatgaagttcctgctcctggtcttggcagccctcggattcctgacccaggtgatcccaggtaaactggataaataggaggaaaggaaaactgggaacgaggaacactagcatatctggttgctctggtgatagatgagccaggttgggtggaggcagg

SEQ ID NO: 25936 - DNA, 2300 bp, Homo sapien
gctatagacttggagaaaatatttgcaaaccatgtatctgacaaaggactactatgtagaatatatcagtaacagtaaaaactcaacagtgaaacagacaattcagttaggcaatgggaaaaagacatgaagagacatttcaccaaagcagatatacagatgtcagataagcacattaaaaagatgttcaacatcattagccattggggcaatgcaaattaagccacagtgagatatcactgcacacctatcgaaatggctaaaataaaaaaatagtgataacaccaaatgctagcaaagaggagacgtcagattgtgcgcaattgctggtgggaaggtaaaatgatgcagcctctctggaaacaagtgtggccatttctaacaacatgaaacatgcacttcctagtaatccgacccagcagttttactcttgggcatttattccagagaaatgaaaacttatattcacacaaaagccagtatgtgaatgttcatagcagcctcgttcataattcctcaaaactggaaacaaccttgaagtccctcagtgggtgaatgtttaaacaacctatggtgtatccccaccgtggaaaactatacagcgataaacaggaaagaactattgatatattcaacaacttggatgaatctccagagaattatgccaagtaaaaaaaagccaatccccacagttacatactggatgattccatttatataaccttctggggatcacaaaattatagaaatggagagcagattagtgattgcaggggttagggacagagttgtgaggagggtggtaaggggagggaagtgggtgtggttgtagaaggcgacaggcaggatccttgtggttatgggaaagtcctatatcttgctcatcttaatgtcaatatcctggttgtgatattgtaccgtacttttgcaggatgttgccactgggagaaactgggtaaagggtacatagactacctctgtttccttttctttcctttctttttctttttctttttcttttccttttcctctcccctcccttcccctcccctctcctctcctctcctttcctttcctttttttcagacagagtctctctctctctctgtctctcttacccaggctggagtacagtggtgtgatctcagctcactgtaacctccaactcccgggttcaagcgattcccctgcctcagcctcccaagtagctgggattacaggcgtgcaccaccacacctggctaaattttgtatttttagtagagatggggtttcaccatgttcgccaggctgatcttgaactcctaacctcaggtgatccacatgcctcagcctcccaaagtgctgggattacaggcgtgagccaccacggccagcccctccgtattatttcttaaaactgcttgtgaatctgaactatcttgtaataaaagatttaatttaaaaaaagataaattagggctactaccaataatgaaaataaatcctcattattaaaactgcaaatcttccttaagcatttaaattcaacttaagaatcttacaatttttataaacacttgtaagggggttttggaacttggttaattaaattctcctaaaccttttaagccacatcttaaattttaacgtattcattttcattttcaaatggttcacttgtctgattaacaaaaaccattgggtatttacataattcttgtatatctaatacttaaacttctaaatatgggtaatctggccgggcgcggtggctcacacctgtaatcccagcactttgggaggctgaggcaggtggatcccctgaggtcaggaccagcctggccaacatggcaaaaccgcatctctactaaaaattaaaaaattagctgggtgtggtggcgggcacctgttatcccagctattcaggaggctgaggcaggagaattgcttgaatctgggaggcagaagtagcagtgagccgagatctcgccattgaacaccagcctgggcaacggagctaataagagtgtattaaacctttcaacttaaatctaaatcaaaatcccacttacacttttaaaattagaatcacaagattaacctattaatcattctatctcttatacaatacaactaaaaaccggatatatacaggtaatttataaattaaacacaaaattaatttacttaatcatctccatagttaatgccagcatttctcaggatgaaggacattgatctattaaagagattagtatctctcccagatgagctgggttgtacctgaagcagggattttggtgaggactgagagtacag

SEQ ID NO: 25937 - DNA, 2300 bp, Homo sapien
tggatctgtcatgtattcctatcttttacttttttttttttttgagatggagtttcattattgttgtccaggttggagtgcagtggcgtgatcttggctcactgcaacatcagcctccctgcttcaagtaattctcctgcctcagcctcccaagtagctgggattacaggcacccgccaccacgcctggctaatcctattttgtatttttagtagagatggggtttcatcatgttggccaggctggtctcgaacttctgacctcaggtgatccatctgcctcggcctcccaaagtgctgagattacaggcgtgagccaccgtgcccggcctttatcttttactttttaatggtttcctggtacagagttgcccagcaagagtgctgtcatatggtgtgctctgcaaatgagggtacccaacacagtgattccctcagctctagggtcagccaggaggggcctgaatagccagagtacctgggctaattgctttttatcctagcagctgcttctatttaccacagtgcatttaaacacattctcctgtgatttttaagaggcagaaaaggttgggagctctgacatggtattctatagcaatgttcccctattgaagtttaagtgatttaaaattattgctcccgcccaattatcttttaaactggaattctcttttaaatccgtgctctatctagcaaatctggtgtgtagagagagaattggtgtagggcaagggtgggaactagtactttagttggggtacaaaaggaaagaggggtgtgtgtgtgtgtatgtgtggtcctattccagatatacgttgaagttattgcaacaggatctgctgatggatgtgggataagagatgagttaaggatgattccaagaagagagatgccctattttaagttcgggaaaaatgtttctggaaaaatattgcacattagagttgcttataaggggcccaagcaggcagttggatgtacatggctggaattcagggggaggatggagacgtgagtctgagaggcatctgggtacggatggtattcaaaaccatgagactggaagggagggggctgggactgagtcctgggatactacaatgataaagggagaagaggaggaaccagcaaaggagactgaaaaggaggcaggaagcaactcaagagtggtttcctggatactaagttaagaaagtgtttcaggggagggagtgatctgttgtgtcaaatgctgcagacaggccaaataaagggaggacctagaagtgaccatggggtttagcaaagtggaggtcaccaatgatgttgacgagggcagtttcagtggggagtgaaagcctgattgagaggagggaaaaaaatgggaaacagagtaggcaaacctctctaggagttttgctttaaaatgaagcagaaatgggagctggctggaggggaagtggtttgtttatttatttagagatagggtcttgctctgtcaaccaggctggaatgcagtggctggatcgtggctcactgcagactggacctttctggctcaagcgatcttcccacctctggcctcccaaagtgctctcatgcttatatgcatgagccaccgtgtccggctgtggacaatctttttaaatagaagaaatttaaaaatacgttggtatactgatgatacaaaggagagagaaaagaggaggaaaaaacggggagaactgctcggccaatatctttgagaaaacgtgagaggataggattcggtgcataaatgtaggaattggtcttagtaggcagtttatacgtagttacgggagggaggcaagtaggcgagtaaatgatgccatgaacttgtgggtttactgattcccacaattttcttagtaaaattggaagcaaactcattagccaagagtgaagatggcgaaggaaatggtggaagtttgatgagagtggagaaatatgatatcatattttaggattatgggcagagcaaactgaagggaatttgaaaattgaaaagcgggccgaactagattttgccttgagaggttagtccctttaggcgctcggtaggcggcgtcgcgtttccttggagaccgagacgctggcgaaagcatcgggtctcgggacttctgagtggcctgggttaccgcgcgatctacactgagacaaggaagttggaaaagccgagtagttataccagaagatcagggtctcacagactcgcaacttctcttccattttccccaatggcgcatgtcttacaaaagtaggtaaaaaaaaaaaaaaaaaaaaattggaagaaaggcg

SEQ ID NO: 25938 - DNA, 2300 bp, Homo sapien
ctatactcgacataacaagatcctagacattccttcttatcatctgcacagccctccagagctgctctctccatacggcctcagtgcccatccggactgctctccttgcagggtacctgcctggcccctgtagctcctgatgtaataatctctgcaaaatttgacctggaaaaaatgaaactgaccaaaaggatggccctacacataccaatgaaattgtacaacagaagaagatatgattagcaaaattggacatggagccagaacctaatccacaagtcaaatattttcaaaatacagacagatgcctttaaagtccaacacaaaacaaaaatgctcaaaatacgttgattatatgagagttcctgactagtgcagtaagacaagaaaaagtataagatttgaaaaaagagacaaaaccttcattattcacagacgatatgattggcaatacagaaaagtaaagagattccaaaaaccactggaaattttttaaggtttcaactttgttgccagatatggggtcagtacacaaaattcaatcgtgtttcctctaacggacaccaacaaaccatatgtaacttctgatttacaataatttcacttacaatagcagtcaaaccacgtggtactttggaataaatccccaaaagtatgtaagacctttatgaagaaaactataatattttattgaaattcataaaataaggcctaaataagtgagaaatcaagtggggtcattgatggaaagactccgtgttataaagtggtaattctgtacaaatgcagtgcaacgccaattaagatctcatagtttcctggaacttagtaggcaggttgtgaaatttatatggaggttccaaatatagctgagaccatcttaaagaagacgaaagagagagaagaatgtttcccataaaagaagaaactggagttcagatttctctttggaaactgaaagatccccccacagtggaccctcacttctggagaggaatattcagctacagttgactagcagttgccccttcagatagaatattcgatctccagttcacccagtatatcttctacttaaggcacctgcctgacccttgcagatatttgattatgtgatagttacctggagtgagggcttaagataagaggaatggaagagattgtttaaaatacatctattgtttggttgtgtaagtattctcctcatggtgaaacttgaccaggcaagtagaaagaataacagagaagtatgtgaatctaagacattgatgtttctggtaatggtgaagttccgagtatgatcacgggaatgcgtggctgagaagggataaaggaaatggtgcctgaggatataaagtgagaggactggaaagtgcaaacggcccaagtcagtggctcccctgagaccaataccagcagttgggatgaagggaatctgcctgttaacaaggtttcctaggatctgatgcacagttcttgatccacggcgtcagaaataaagtggttaaataaatataagctaccggccgggcgcggtggctcacgcctgtaaccccagcactttgggaggccgaggcgggcgatcacgaggtcaggagatcgagaccatcctggctaacacggtgaaatcccgtctctactaaaaatacaaaaaattagccaggcgtggtggcgggcgcctgtagtcccagctactcaggaggccgaggcaggagaatggcgtgaacccgggaggcggagcctgcagtgagccgagattgagccactgcactccagcctgggcgacagaccaagagtccgtctcaaaaaagaaagaaagaaagaaatataagctacctatacgtggggctgcctattaactccgccaagtgacttaactcctgcctctttatctgtaaaatgggcataattacagcattgtttttggaagattccatgtaataaagtctgaagtgtgcttaacacagtactgggaacttaagcagcactcacacttcatcctaaatacgacgaaagtcttttcaaaaaaataaaaattaatgcaatatgacttacttggaaatgtatcaaaaaataaagaccgatgaatggatcgaggcgtagtgtgacagagtaaaattttaatgataaaaagttaatggtaaaatgttcactgtaaaactttcaacttttcttcttgaaaacgtgcataatccgacgtgggaaaaaaaataacgcattgcagtcagttctggggaaacggaaagctaagttttaattttgctattgcttttgcttttttaacagaaaaggtacaaaaa

SEQ ID NO: 25939 - DNA, 2300 bp, Homo sapien
ttttctcattatggtgatgtctctgggttgctggtgacctgcgtaactattgggaaatctagtttctcaaaacttttagtttttttttagacagggtctcactctgtcactcaggctggagtgcagcggctcactgcaacatccgcctcctaggttcaagcgattctcatacctcagtctcctgagtagctgggattacaggtacgcgtcaccaagcctgactcattattttgtacttttagtagagacaaggtttcaccatatcggccaggcggatctcgaacttctgacctcaaatgatccgcccgccttggcttcccaaagtgctgggattacaggtgtgagccaccgcgtcccgtctatcataagttttattgaacattgcctaggtatcaggatgtgtttacatgcattatctcatttaatctgtaaaaccaccatgtgagggagaaactgaattatccccattttcaggataaggaaaaggagggactgggaatgtgaactcaggaagtgtgactccatcgggtagactgctcaggctgcagatgtaaaggttttacacgtaggcttttccagatctcagcttctgaaaggcggagggaccgtttggacgggagcagggcctcctcttccaagcaccctgtgcctttaagagtcgccccctccctccagggatgctccaatttctttctccccaccacccccaccccgccccccgcgccgcggagccgcacctcggtccttcctccccgccccacaccctcaagctcggctcttggccttcgctcgtccagaagtgggtgagctgtaccgccagaggcgcattctcctagccccaaaccatgcccgctacgccccagcggaatgccaccttaaagaccctaatccgggcacctcccagctcctgcttcccaagggcgaggcctcagcgccccctcccatcgcccatgctcacgacgccgtgaaggtgacctcccccaggggcggcacacgcccagtggtgcccgaactggctcacacgtggtgagccgggagcgcgcggcccctccccgccacgcgcctcgtgccggccacccggccacgcccccaggactggctccgccccgtgcccctgcacgcttctccaggcttgggtggggcgacgcgcccaagtcgggcaccgggcaggctacggggtggggtaggacctgggaatggcgcacccacgcatcctcgaatgtcgcctgcggtttgtgaaaagcgggaagtccgcccagctcaggacctttggctggcaggcgaggtgccccgcggcccttggtgctgagcaggggagagacagctgggaccgcgagcctgggaatcgaatcctagtctgcgtgtcctcggtgcttcctatttggaaactgggcatcatattatcatattcccttctccctccggattcttatggagcttcgaacgagattaaatatacatatatatgagaaagggatttgttcactaggtccaaaagcatttgctggtcccatatgtggtcggaccctgtgtgtagtaggcggggggcaacatctacgacaacctgagttcgtccccttaagaagctttcctgagtcttgggccccccaaattctcttctgggatggtccgaaaagacgtccctgaaagaggaaagggcggaaatcctacctgacggcaggtgtctcggaatgagctaaaatttaaaaggcaacgcggggcagggacaagcgtccagcgtcagatggaagcaggctcgcgtcccctacccttcctccaacccctaacctaagaaaagaaaccgatctcgccggtctcccccaatcctagccgcgagaccgcccagccccgcagcccgagccccgccccgctccggcggccagcgattgggagatgcaaataccggcttctctgcccagcaacgggtgacgcggcgcccgagcgcgaggcggggcccggccgcagcccaagcgggcacctcggtgtttacacggggcggccccgcgcgcgccgcagcggcccgcagacggcgagggggaggggtggtgcgcgcgccggcggggccgcgcggggagaaagacactgaaaggcgtcggcggccgggcggggagcggcgcgcgcgggccgcggcggagccagaggctgcaggaagagcccgcgggggcccggagggtgcgattcctcggcccccgcaaaacaatgtgtgttgtgagccaggacgcaacttgccggaggcggcgggggcgcgccgagcccgcctgagaccgcgctgaccttctccccccgccgtccgttgggcc

SEQ ID NO: 25940 - DNA, 2300 bp, Homo sapien
ggcatcctgacagcatggcagcctctaagcagacatggagccctaggtaggcatggtgcctcaggctccaagagctagagttctagcagaagttgcctgtacttttatgtctggaccttagaagtcagagtgttacttccaccgtactccattggttgaagcagtcatcagctcacccaagattcagagagggtacaaggatcccacctctctacagaggagtgctaaagaatttgtagctatattttaaaaccaccacaggttgtttccaatctgtagctattcctgtagttcattttacaggctaacatctcttgaatgtcttcatttctctgcaccaggccaagacactgtcatctctgatctctttgctgatctcttgctgtcactcttgtgctcaacatgctgttctcttgacagcagccagaggtcttttcagaatgaaaatcagatcacatcccacccctcttcataacccttccatggctccccactacccttgggctgaagctcaaactccttaccttggcttatgaggccccacaaggtctcacttctgcctgcctctccaatgccatctcctgtcaccatttggggcctttagttttgagctgcaagagttcctcccatcacacacacacacatacacacacacacacacacttaaatgagtaagtaaatagaacatacaaaacgcttaaacactttgcacatagtgagcataataagtttgctactattattagactgtcttcagtaaatatttactgggctgcctactcagtgccaagcactatgggaggctcacagatacaacacgaacaagaaatatgtggccttggccagacgcggtggctcacgcttacaatcccagcactttgggaggccgaggcaggtggatcacttgagctcaggagttcaagaccagcctgggcatcatggcaaaaccctgtctctattaaaaatacaaaaaattagctaggcatggtagtgcgtgcctgtagtcccagctcctcaggcgactgaggtgggaggatcacctgagccttgggagatcgaggctgcagtgagccgtgatcatgccaccgcactccagcctggacaacagagtgagacgctgtctcaaaaaaataaaaattaaaaaaaaagaaaaagaaaaactaaaaaggaagatgtggccctatcttgccgagctcattcttctgtgtgtccccagcccctagcacaaggagaaacagaatagatgctcaagacacaaaggcatgtctgtgcaagggtgcttgatgacggttggaggggcacaatgactttcccaagatcacacagcaaatgtgggacaaaatcaaggctgacagctcatgacagggtgggaggcagatgcagctgcctggcacaggctggctctccagggagatgggcagtgggcacgcattgcccagggcagaactggggctaggggaggaaacaacaagggaggctgtcattagctccttccaaagtggaggtcacttctctcccaaccccgagtcctccacccaaactcccttctcaaggtacaagggctgatcccgtaccagggatgggtagggactcaaagaggaaaagaggatgaaaagaggatggggactgagtgagatgtgaggactccagagggattagcggctctcaaggcaagtgggaggggacttcccggtaggagcccggagacagatgggagcctgtgaagagggcgggggcccggcgaggagaagcggtttctacgctggggtggggctccatgagggggatggagacctggaaaagggactgacggtgcagcgaggagaggaaggctcggttaagggatgggtcttccacgggaggggtggggaactgcgggagtgacggcagcttcggtgaggagtctgaggggctgcgtgaggggctggggcccagggagtccgaggggtctctgtgagggcgctggggtgtccgagcgagcagggaactctggaaggggacaggagccgggggagctgcaggcggccgccgtctgcagagccaggccctgaggcgggccggcgccccctcccccgccccgaactgcggcgcaggcgcgaaccggacccgcctttgctcggcggagacagcaggcagagaggtgagcttagccctgccccacgcgcggccaggccccagccccagcccctggagaacccccgcgctctgcccgcatcctcagcccgggccgtgtcccgccagggccgggacctttgcgcctgagcctcggctttgggaggtgggggtcccagggaagcagc

SEQ ID NO: 25941 - DNA, 2300 bp, Homo sapien
gaatgggtttttgaagtgttggcgggggtgggggtgtcctttgaagcctctacccagcctatcaaccctgaggcgtcgaggggcgatggggctgtttctgtctcccgcccctgctgcttccctgggacccccacctcccaaagccgaggctcaggcgcaaaggtcccggccctggcgggacacggcccgggctgaggatgcgggcagagcgcgggggttctccaggggctggggctggggcctggccgcgcgtggggcagggctaagctcacctctctgcctgctgtctccgccgagcaaaggcgggtccggttcgcgcctgcgccgcagttcggggcgggggagggggcgccggcccgcctcagggcctggctctgcagacggcggccgcctgcagctcccccggctcctgtccccttccagagttccctgctcgctcggacaccccagcgccctcacagagacccctcggactccctgggccccagcccctcacgcagcccctcagactcctcaccgaagctgccgtcactcccgcagttccccacccctcccgtggaagacccatcccttaaccgagccttcctctcctcgctgcaccgtcagtcccttttccaggtctccatccccctcatggagccccaccccagcgtagaaaccgcttctcctcgccgggcccccgccctcttcacaggctcccatctgtctccgggctcctaccgggaagtcccctcccacttgccttgagagccgctaatccctctggagtcctcacatctcactcagtccccatcctcttttcatcctcttttcctctttgagtccctacccatccctggtacgggatcagcccttgtaccttgagaagggagtttgggtggaggactcggggttgggagagaagtgacctccactttggaaggagctaatgacagcctcccttgttgtttcctcccctagccccagttctgccctgggcaatgcgtgcccactgcccatctccctggagagccagcctgtgccaggcagctgcatctgcctcccaccctgtcatgagctgtcagccttgattttgtcccacatttgctgtgtgatcttgggaaagtcattgtgcccctccaaccgtcatcaagcacccttgcacagacatgcctttgtgtcttgagcatctattctgtttctccttgtgctaggggctggggacacacagaagaatgagctcggcaagatagggccacatcttcctttttagtttttctttttctttttttttaatttttatttttttgagacagcgtctcactctgttgtccaggctggagtgcggtggcatgatcacggctcactgcagcctcgatctcccaaggctcaggtgatcctcccacctcagtcgcctgaggagctgggactacaggcacgcactaccatgcctagctaattttttgtatttttaatagagacagggttttgccatgatgcccaggctggtcttgaactcctgagctcaagtgatccacctgcctcggcctcccaaagtgctgggattgtaagcgtgagccaccgcgtctggccaaggccacatatttcttgttcgtgttgtatctgtgagcctcccatagtgcttggcactgagtaggcagcccagtaaatatttactgaagacagtctaataatagtagcaaacttattatgctcactatgtgcaaagtgtttaagcgttttgtatgttctatttacttactcatttaagtgtgtgtgtgtgtgtgtatgtgtgtgtgtgtgatgggaggaactcttgcagctcaaaactaaaggccccaaatggtgacaggagatggcattggagaggcaggcagaagtgagaccttgtggggcctcataagccaaggtaaggagtttgagcttcagcccaagggtagtggggagccatggaagggttatgaagaggggtgggatgtgatctgattttcattctgaaaagacctctggctgctgtcaagagaacagcatgttgagcacaagagtgacagcaagagatcagcaaagagatcagagatgacagtgtcttggcctggtgcagagaaatgaagacattcaagagatgttagcctgtaaaatgaactacaggaatagctacagattggaaacaacctgtggtggttttaaaatatagctacaaattctttagcactcctctgtagagaggtgggatccttgtaccctctctgaatcttgggtgagctgatgactgcttcaaccaatggagtacggtggaagtaacactctgacttctaaggtcc

SEQ ID NO: 25942 - DNA, 2300 bp, Homo sapien
ttagccctgccccacgcgcggccaggccccagccccagcccctggagaacccccgcgctctgcccgcatcctcagcccgggccgtgtcccgccagggccgggacctttgcgcctgagcctcggctttgggaggtgggggtcccagggaagcagcaggggcgggagacagaaacagccccatcgcccctcgacgcctcagggttgataggctgggtagaggcttcaaaggacacccccacccccgccaacacttcaaaaacccattcctacccctctctgcctcagtttctctctagggaaaaggacgcagttggtgtggagcagggcatcggtggtcctgtcaggaagagtggcgcgggtgccggtggggaagggaggcgggaaatggcctgatttccccggccgacaccccctacccatcccccccgggagggcgccccttctcccccgcccgggcagcgctggacgctgtagtgggcgagtctgagggtctgggaaggacacaactgaatgaggctgtgcagaggcgacagattccgtccatcttcgggccctggcttccgtcacttccgcccgtgcctgccgcccctcgcctcctccctccgccgcagtctccccacgtcggacagcgcagccccctccgcctcccgctcccctcccaccgagctcctcccggctcccgggctggggacgcctccctagcggttcccatggcaaccctcgtcccgggtgcctgcgccccgccccccgcccgccagacctactccgtgcagccctgaaacgccaggcggaggggccaggccgagcgggaggcagcgtcaaggtcaccttccctctccagtagcagcaggactgagtgattccatctatttggagtcgcggaagcggtgaattggaggggaggagctgacccaggtcaacagccccgaagccccctccacacctcctcacctgtggccttgaacagtggtctccgcacggaggctcctaccgtcccccaggccccatttcttctccccacccgggcctccccagcgcctcgccggggcgggtaccgcgctggccgcaccctccgcacagcccgccccgcccgcctcctccggcgagccctcctctccagacctctcgccctcctcctccgacggtccttcgctttcagtctctgccttttcccgttctctgtcgtggcttttgttgttgttgtttttcctcctttccttccccgctcttcttttccctgaattgtaagtgaggagggtgtacagccactatttatggacaggctttcttgacagcaatcttgtgtgccgtgtgactccaagcagaacctccaaccgtgtgtgtgtgtgtgtgtgtgtgtgtgtgtgtgtgtgtgtgtgtcgtacctatctgggtatgtctctgtatgctttgtgagtatgtctgtgtgtttctctgtgctgtttcggtgagtttctctatgcagggatttgaggaccacatctgattggaagtgaggggcagctgtcaggacctttatcttaccctttggaacaagcacattgtttcattttgcaggaggctgctaattaaggctgagggccatcatggagactggggtagaagcccagtcctcccccaacacctcctggctttggttcgggccaaacctgtatatggatatacaagtaccttccattcccaagatccgtgtccacttttgtggaaaaaaaaaaaaaggttatttgataggtttctctggaaatctaacagcccttaagcctaagagtctttaatcctgagggaccctgactttcacttccaatggagtcaaaattcattggaatctggaggctttcaggggcagtcctggggaggacctttttatagccttgcagcttgggaactccagcccaagtgtcagccatgacaattacccccaggagggggtctgaaggggagcggagggtgaggctctctcattccagatatggagactaaaaagttcaagatggaagtaatagcaaaaaaattacagtactaatcacaacagctaccatttctcagcattagacacagtaactgtatgaaagaagtatgattattaggtctgttttacagatgaggaaactgagacccagaaaggtggaagcacttgtctaaggtcacgcctccaggaagcagtgtgtccacgactccagtccaagtggtcaggctccagagcccacagtcccaggtactgggtggcctccagagtaaacatgcacatttattgacacctccaattgccaggcactgggctaaggccttcagtgcattgg

SEQ ID NO: 25943 - DNA, 2300 bp, Homo sapien
ccctccccagcaggggagttgccaggattaaatgagatcccagaatgccctggtataccctgaaggctctgggacacaggtgagctggtccccagggatttggaaacaggaaaacaaatatgactccaccctgcctcccatccagcctctgcctagaggagttattttattttattttactttttttttttttttgagacggagtcttgctctgtcgcccaggctggagtgcaatggcgcaatctcagctcattgcaactcctgcctcctgggttcaagcgattctcctgcctcagcctcccgagtagctgggactacaggtgtgttttttgtatttttagtaattttttgtacttttagtagaaacgggtttcaccgtgttagccaggatggtcttgatctcccgacctcgtgatccacctgcctcagcctcccaaagtgctgggattacaggcataagccaccacgcccagcctctagaggagttattttacttacttacttatttatttattacacaggatctcactctgtcacccaacctggagtgcagtggcacaatcacgtttcactgtaacctgaactcctgggctcaagtgatcctcctacctcagcttcctaagtagctgggaccacaagctcgtaccaccatgcccgctatctttttctctttgtaaagacagggtcttactatgtcatccaggctgttctcaaactcctggcctcaagcaatcctcccgtcttggcctcccaaagtgctaggattacagacatgagccagctcacccagctgaggagttattttttgacactggtgaattcagatcaaaagggatttctaagaaaggtgctggacccaggccgggcgcggtggctcatgcctgtaatctcagcactttgggaggccgaggcaggtggattatctgaggtcaggagttcgagaccagcctgaccaacatggagaaaccctgtctctactaaaaatacaaaattagccaggcatagtagcgcatgcctgtaatcccagctacttgggaggctgaggcaggagaatcgcttgaacccgggaggtggaggttgcagtgagccgagatcgtgccatcgcactcaatcctgggcaacgagtgaaactctgcctcaaaaaaagaaaaaaaaagaaaggtgctggacgcctaggacgcagaggggtgtttcaccccaaatcaagtagcaccaagccctcccaggccttgggtgcaagcatattaaaggcctctttccctctctgtctccattgtttacactccactgagcatccgcaatgtgccacacactgttctaagcgtcttacacatattaaattatttaatcctcacaacaactttatgaagtgagcgcaattatgagcccattttatggagcaggaagttgaggcagggttttaggtagcttttctggggtagcactgtgggttggagcggaggtggagtgcactcttaggccagctggctctaggggctcttcaccactaggccgcactgcctctagcaaagggacgcggggaagctcagcagaccttaggcctcccaagggcgccacggtggttcctttgagcccagagtcagctcttaagtccataggccttcctgaagcttctgaaccacttgcccatagctgggcctcaggctggctctcagtagaatgtggagaatggagattcccgcatgtccacttctcctaaaggttttataaggcagtgctgggaatgtgctttataaaaaaggggaagcaccccgacaacagtcactgtttgctcttttaagcaccatcctgagaaggaggaatgttcttcccatttcataggtggggaaaccgaggctcagaagagcaaatttttggccgggcgcggtggctcacgcctgtaatcccagcactttgggaggccgaggcgggtggatcacgaggtcaggagatcgagaccatcctggctaacaaggtgaaaccccgtctctactaaaaatacaaaaaattagccgggcgtggtgcgggcgcctgtagtcccagctactcgggaggctgaggcaggagaatggcgtgaacccgggaggcggagcttgcagtgagccgagatcgcgccaccgccctccagcctgggcgacagagcaagactctgtctcaaaaaaaaaaaaaaaaagagcaaattttttttccaaggtgatagggagagtccgtggctgatgtctgcactgaccagacgcccctagggggccagcgagggcgggtcccaggtgcagcggatgcagaggagagaggcccgggcg

SEQ ID NO: 25944 - DNA, 2300 bp, Homo sapien
tctctttgtaaagacagggtcttactatgtcatccaggctgttctcaaactcctggcctcaagcaatcctcccgtcttggcctcccaaagtgctaggattacagacatgagccagctcacccagctgaggagttattttttgacactggtgaattcagatcaaaagggatttctaagaaaggtgctggacccaggccgggcgcggtggctcatgcctgtaatctcagcactttgggaggccgaggcaggtggattatctgaggtcaggagttcgagaccagcctgaccaacatggagaaaccctgtctctactaaaaatacaaaattagccaggcatagtagcgcatgcctgtaatcccagctacttgggaggctgaggcaggagaatcgcttgaacccgggaggtggaggttgcagtgagccgagatcgtgccatcgcactcaatcctgggcaacgagtgaaactctgcctcaaaaaaagaaaaaaaaagaaaggtgctggacgcctaggacgcagaggggtgtttcaccccaaatcaagtagcaccaagccctcccaggccttgggtgcaagcatattaaaggcctctttccctctctgtctccattgtttacactccactgagcatccgcaatgtgccacacactgttctaagcgtcttacacatattaaattatttaatcctcacaacaactttatgaagtgagcgcaattatgagcccattttatggagcaggaagttgaggcagggttttaggtagcttttctggggtagcactgtgggttggagcggaggtggagtgcactcttaggccagctggctctaggggctcttcaccactaggccgcactgcctctagcaaagggacgcggggaagctcagcagaccttaggcctcccaagggcgccacggtggttcctttgagcccagagtcagctcttaagtccataggccttcctgaagcttctgaaccacttgcccatagctgggcctcaggctggctctcagtagaatgtggagaatggagattcccgcatgtccacttctcctaaaggttttataaggcagtgctgggaatgtgctttataaaaaaggggaagcaccccgacaacagtcactgtttgctcttttaagcaccatcctgagaaggaggaatgttcttcccatttcataggtggggaaaccgaggctcagaagagcaaatttttggccgggcgcggtggctcacgcctgtaatcccagcactttgggaggccgaggcgggtggatcacgaggtcaggagatcgagaccatcctggctaacaaggtgaaaccccgtctctactaaaaatacaaaaaattagccgggcgtggtgcgggcgcctgtagtcccagctactcgggaggctgaggcaggagaatggcgtgaacccgggaggcggagcttgcagtgagccgagatcgcgccaccgccctccagcctgggcgacagagcaagactctgtctcaaaaaaaaaaaaaaaaagagcaaattttttttccaaggtgatagggagagtccgtggctgatgtctgcactgaccagacgcccctagggggccagcgagggcgggtcccaggtgcagcggatgcagaggagagaggcccgggcgcggcgcgggggatggtgcgatcccgggcccgagggcatcagacggcggctgattagctccggtttgcatcacccggaccgggggattagctccggtttgcatcacccggaccgggggattagctccggtttgcatcacccggaccgggggccgggcgcgcacgagactcgcagcggaagtggaggcggctccgcgcgcgtccgctgctaggacccgggcagggctggagctgggctgggatcccgagctcggcagcagcgcagcgggccggcccacctgctggtgccctggaggctctgagccccggcggcgcccgggcccacgcggaacgacggggcgaggtactcggcggggtgcggcctgcggactcgcccggaggccggggggcgggagggggcggccggggaagggggcgccggaagcctctgggcgtctgcgtgttgccgcgtgttacacgcacgcacgccccttacacaccttttcacagaccccgccgtcggggcgcggccaggtcagatcccttttgatccgggcctgggctgagtgctccccccgggcttcaggtgacgcggccccgcggagcgtggggtcgcccgagttgggctggggaagccagggacggaggtgtccggccgtcacccctagaggagggcgtgcgggggtctg

SEQ ID NO: 25945 - DNA, 2300 bp, Homo sapien
ttttttggtctgagacagagtctcgctctatcacgcaggctggagtacaacggtgcgatctcagctcactgcaacctctgcctcccaggttcaagccattctcatgcctcaggctctgcagtagctaggattacagatgtccgccaccacacctggctaatttttgtatttttagtagagacagggtttcaccatgttggccaggctggtctcgaactcctgacctcaagtgatccgcccacctcggcctctcaaagtgctgggattgtaggtgtgagccaccatgctcagccaaaaatgtcctaaaatttgattgtgatgatgggtgtacaattctgtaaatgttactaaaaactattgaattgtatattttaggtgggtggattttatggcatataaattatatctcaataaagctgtttataaaaagaacagcagttagattgacaggtgatgatatctcaataaagctgtttataaaaagaacagcagttagattgacaggtgatgatatctcaacagcaaccatttcccagcattttgggaggccgaggtgggcagatcatttgagcccaggagttcaagaccagcctgggcaacatgaccaaaccctgtctctacaaaaattagccagctgtggtggcacgtgcccgtggtttgcagctactcgggaagctgagcccaggagttggaggctgtagtgagccatgatcacgccactgcactccagcctgggcaacaagagtgaaactccatctcaaaaaaaaaaaaaaaaaaaaaaaaggcttccccaggccattcaaatgtacagccaaagttaagaaacattgtctaaagggatgtgtttccggcaaaagaaaaattatcccagatgaaggtctgaggttcattccttcattcaacatatggagcctccattatgtgtttggaactgttctagacaccaggaacacagcagtgagcaaaacaaaccaaagtccctgccctctaggagaggaaaacagacccagaataacataaataagtaaaacatgctccgttagacagtaatagatgctgagaagaaaaaatgaagccaggaaagcggatgtgaaatgctggatacgtgtgtctgtgaaatttcagatggagtaactagggaagatttttgggtaaagaccaaaataaagggaaggagggagccatgcagacgtttgggttatggcaggtgcaaaggccttagggcgggagtgtgtctgacttactccaggacccagcaggtcaatgggacttgagtggaatgaggcaggggcagggcagtcagctacgaagacagagatcgggaggcaatttgcgagccctgggacagatctcggattttgctttaagtgagatgggagtacttgggtcggggagtggcatgggtttgatttacattttaacaggactctccggcagctaggtggaaatggacggtagggggcaaaaagagaagcaaggaggcccaggaggaggctggttcaagacccctgagatgatggagcactgatggagctggagcgggatggggccggaggaggtgagggatgagattctgcaagtggagcccgcaggatctgctgatcgatgggacgaggaacgggagaaaaattaaagcggcgcatgaggcagacgaatgcaaacttcaccaatagctcaacgaaaagacagacggtgaccgctgagaggcagcgtcggatctgggtaagggcgggttcctgagcctgccaggcctggattcaaacctcggctgagtggccttggacaggtcatcaacaaacagagccttcgtttattcatgtgcaaacggggccaaggaccgggcctgccccgaggtatgcctgaggcttgggtgagcaggcgccgggctcgcagggcgcgctcctaacccgtccccagcggctcgacgctgtggatcccgccgccctccagccccggctccggcgccgactcctgctcaggctcctgctcctgcccccggccccgcccccggccccggccccggcccccggcccaccccggccccgcccccagcccccggcccccccggccccgcccccggccccgccccggccccgcccaccccgcctgcggcccagctccttcccgcggctctgcgatgcggcccgcagggtgacccgggcgggagtccggggacccgcgatcagccccggaggacggggtggggtcgccccaaacaggagcgccgggaccgctgggaccccgcactcggcgtccgccgccgccgggtagccgggcagtggaggtcccggatgaggcga

SEQ ID NO: 25946 - DNA, 2300 bp, Homo sapien
tttcctaccccattactctcagctcctgaaaataaaccctgtgctaactggctcctgctgtactggctttcagcagaggaaatggccctgagcctcacccgagcagtggcgggcggggatgaacaggtggcaatgaagtgtgccatctggctggcagagcaacgggtgcccctgagtgtgcaactgaagcctgaggtctccccaacgcaggacatcaggtgaggagtgcatggctggcctgaacccaagggacagcaggacaggatattcttgcctgtagaacagttcttcctaatggcacgttctggcttcaggaggcctggcttctaaccctagttatgtcattaatcaactgtgaaatacagagcaggtcacttcacctctcagtgtgtcctcattttaaaaatcagaccgtaacagtagctatctcatagggttgttaggaggtgtactgtattaggatgttaggccttatacaacagaagaaaacggaacagtgacgtaaacaaatttgatggcagggagtccagatagggaggttctgctcccgacagtcctcagaggctcatattgtttctctcaccattctgccattcattcccagattcctcatggtgcaaaatggccattccagctccatccagccatcacatcacaggaggaagggaagaaagacacccctccacactcttctaaagagcatagctcaaaaattgtacacacttcttccgttaattcctgtggaccagaactgattcccacagctacagttcagcttgaggggagactgtatagccaagatattcagctagaattcaggggttcgcttggtaagggaagggaagagaatggatactgtcggtctgtgctccaggagacttaaactcaatgctgaaacactttgcacaatgcctggcgtgttatgcactcaataataaacattagtgtctatcgttattttttgactgctttttcattactggatagtaaggcaatagttttatggtttctgatttttggttctcttggtgggtcccatttggtttttcttaaaacagttttatttatttatttatccttacagttcgaccatttaaagtatacagttcaatggcttttagtatattcaaggttgtgcaaccattgccacaatcaattttagaacattttcatcatcctgtaaagaaacctggtactcattagcagccagtcctcatctctctaccttttccctaactccccaaccttaggcaaccactaatctactttttatctctagggatctaccttctggaaattccatataagttgaatcatgcaatatgtggccttttgtatctggcttctttcacttaggatcgttttcgagattcatccatgttgtagcatgtctaacaacttcattcccctttttttttttgacatggggtctcttgtctaggttgaagtgcagtggtgccatcatcgctcactacagcctcaacttcctggattcaagcagtcctcctgccttggcctcccaggtagctgggactactggcatgtaccaccacacccggctaattttttttttctttgagatgggagtctcactctgtcccccaggctggagtgcagtggcgcgatctcagctcactgcaagctccacctcccaggttcacgccattctcctgcctcagcttcccgagtagctgggactacaggcgcccgccaccacgcccagctaattttttgtatttttagtagagacggggtttcgccgtgttaaccaggatggtctccatctcctgacctcgtgatccgcccgcctatgcctcccaatgtgctgggactacaggcgtgagccaccacacccagccacacctggctaatttttagaaagtctgtagagataaggtcttgctttgttgtctgggctggtcttgaacttctggcttaagcagtcttcccacctcagcctctcaaagtgctgggattacaggtgtgagccaccatgcccaaccagaactttattcctttttattgccaaataataatctattgtatagacatatctcattatctttactcattaaatcagttgatggacatttgggtgtttctattttttggctattataaacaatgctgccgtgaacatttgtgtccaactttttgtgtggacacgttttcatttctcttggatacacactagcagtggaattgctgggtcatacagtaactctatgttactttttgaagaaatgccagacagttttccaaagtggctgcaccattttacattcccaccagcatatatg

SEQ ID NO: 25947 - DNA, 2300 bp, Homo sapien
tattctttttccattcatggtcttctgggcttggctcactgcttttctgctgaaaattcacacagggtttaatttttactctcactcctttcactgcttcacctatcagcagccctgggtttgcttcgtttccttatttatcttttagggtatgctttttatttgagaaggggtggggtaaatatgggcaagaggtgagttttgctcttacctgcaatcctttgtccggtttagtttgggcccttacattagctgctttctctctctgagtatgtgtttgtaactgaaagctaatggtgtggagaagctgtgcatgtgccattcttctaacctggctcataaggccaaggcatttttactgctggcagcactagctccagcagtaaaagaactccctgaaagaactcctgagacaggcttccctatttccagctataatacatctttggatcaagaggatcagtttttcctgtaacgtttgctttggtttaaaggggaccgtgtaactttaaaatttttttatttttatataatttcatacttactgaaaggttgtaaaaataggacaaagaattccccagataccttttacccagatttccttttgttttcacattttactacatttgctttttttttcttggagacggagtcttgctctctcgcccgggctgcagtgcagtggcacgatctcagctcactgcaagctctggttcctgggttcatgccattctcctgcctcagcctcccaagtagctgggactacaggcgcctgccaccacgcccagctaattttttgtattttttattagagacggggtttttcaccatattagccaggatggtctcgatctcctgacctcgtgatccacctgcctctgcctcccaaagtgctgggattacaggcgtgagccaccgcgcctggcctacatttgcttttttagctgctttctgtctttccttcgctttacacatagacatacactttttctctgaactatttaagagtaagttgcaaacatgacatctttttaccccaagtgtttcaggacatatttcctaaatataaggctctcatgtaatcacagtacactgagcaacatcagtaacaacactgaaaaatagttaactaattaatccacagattttattcacatttcaccatttcttcgagtaatgtgcttcactggaaaaggaaatatagatttatgcgtttctcatgctgttgtcctatatctttagccatttttaatctggaacagttcctttgtattgtatgagagttaaatttctcttcctttggggatattgggtatttcttcattgtgagattgaggtctgtgcgctgttgatagaaatcctgcagacatgatgctgagctctgtcagtgcatcacctcgggaggcagaggccgtctgtggctcccatagttgaaattctgcagttaaatactgtgtcccagcagtattaactgcagcaacttggttagggtggcatctgcagcttcccctactggaaagctagcagctgccttttcctgtatgccaggtggtatcaacagtggatcttgatatgcgttgccaaattatttgtaattcattttccttttttctctgaaaattcattgctggccttcttcgacctccttgttaactaggctgcttggtatgttcaaaggcatctctgttcctgtccccaggcatgccagaggaacagagagaagggctccaggaagaactgattgacatcatcctcctcatcttggagcgcaaccctcagctgcactactaccagggctaccatgacattgtggtcacatttctgctggtggtaggcgagaggctggcaacatccctggtagaaaaattatctacccaccacctcaggtaccagtagagaggaacacaagacgacgggcatcactcctcagccgtcctggggataactcactggcctgttttctggtcagcttttttaggagtttgagccctcgccaccctgagccctgatctaagtgtttggtaaccaggcttattgaattgtctccctccagggattttatggatccaacaatggacaacaccaagcatatattaaactatctgatgcccatcattgaccaggtgaatccagagctccatgacttcatgcagaggtacatatgtgtctgcatttctgtgtgcatgcatacacacgcccacacccccccacacctgaaacactcctcacaagccgagcgcagtttcctcattgtcttgggtggatttgttaagttctccccagttgttccagtcaccagc

SEQ ID NO: 25948 - DNA, 2300 bp, Homo sapien
agactgcctcctttcatgctgtattggacttagcagctgaacacaaggactgtctcctctttgcagctctttagttttagaattgctgggtcaagagttgttaggtggttctttatgtgagtctcaatatacctttctaaacagcttagtgctcccacaactttataggcgttagggtttttttcagtggtctgttgttcccacattcatgattttatttgatccttggaatatcctcattttgtagctgtggactttgaaattcagagcagttcccagtgatgcacagtggccttctgcacgaggcgcctggcctccttacgtctttgctctccttcccaccctgctgtattgtctcctgggcagtctgtgctcccttctcttagggtcattgtgacttgcaggaaacataatgtttggaaccaaactagggattccctgccaaatgttgtatcttgagtcatatcatcctcttcaggagaagctgacatgtgccctctaggccttttgtgtcatcccagaatgttttgcttctggtctggcttctcaggcattcctgcaataacgtgccttttccttcaatagggaagaacctacggcagatgagcaaggactaccaacaagtgttgctggacgtccggcggtcattgcggcggttccctcctggtgagaagctctcccggtcctgccacatttggaaagactgtatctgttccaggtcataccatgtgacctaatatgctggaccctgccgcctcagggaccttcagagctctccttttgctgagtcatccttttcttgactggtcactttcagacccccactgtgaaagcctgaaccaaaaataatttctcctggcctagaggtggtgaatgagagaagaggtttttgtttttccttgaagccacaaaaaggagttaataaggattgttagagccatcagtctggcattaaagagcagattggtgtggaattgggcaccaacaagaatgagtaatatcttaattaggtttaaaaacgatggtaccttgcgcatacatatgtaagattccttagagggaagagaggccattccctgtttgtgtaagagtatattccttaattaacaaattaagcagcaatagataaaaaaataaataaataaaaacaaaacaaacaaacaaaaaagaatgtattcctaaaattacctctttatttcaggaagaaagaaaagaaggaccgttgtctcaattttcacagtgaagggaactgggcaacaaacctcacatggatgacctatttttcttcctctggcaactccacctttaggtcatgaagagaggagaattgctaaagggaacaggagcctctaagctggctgcctccctcttctgcactgtgctctggcctggcttttgttgttgaaggggctgctttcctgctggcattcttgctccctggacagattcttgcaatacccaggtagcagtagcctgccagcgtggttttgataaaagcacatgcccacggtccattcccttttcctagcctgctggtttggatgagatcatataggacagatgcctcccttttttttttttttttaaagacagagtttcactcttgttgcaggctggagtgcaatggcactgtctcagctcactacaacctccgcctcccaggttcaggcagttctcctgcctcagcctcccaagtagctgggattacaggtgcccgccaccacgcccagctaattttgtgtgtgtgtgtttttaatagagatggggtttcaccatgttggccaggctgctctcgaactcctgacctcaggtgatgcacgtacctcagcctcccaaagtgctgggattacaggcaagagccacccccattttttcctaggtaacctgttttccctctgaaccctttattcctcttccattgatgtaatatctgtgatacgctttctgtaggctgaacttacagtgtggcttcatattctttttccattcatggtcttctgggcttggctcactgcttttctgctgaaaattcacacagggtttaatttttactctcactcctttcactgcttcacctatcagcagccctgggtttgcttcgtttccttatttatcttttagggtatgctttttatttgagaaggggtggggtaaatatgggcaagaggtgagttttgctcttacctgcaatcctttgtccggtttagtttgggcccttacattagctgctttctctctctgagtatgtgtttgtaactgaaagctaatggtgtggagaagctgtgcatgtgccattcttc

SEQ ID NO: 25949 - DNA, 2300 bp, Homo sapien
ttttgaaagtaaattctggcccaagcttcacaacgaccacacaactgtttagtcctagagttgtggtggtgggaatggggtgggggtcactgttccatcactaccaaaagcaagaatccagctggctggatgaccagcgcagtaaactgagaagggaataaatatctcaaattgcttgagcacgttactcttaaactgggatgacttaaatcttccttcagtgggcactaagcatcttttaacctcaatgatgatttatttcattttatttatttattttttgagatggagtctcactccgtctcttaggctggagtgcagtggcgcaatcttggctcactgcaacctctgcctcccaggttcaagcaattctcctgcctcagcctcccaagtagctgggattacaggcaggcaccaccatgcccagctaatttttgtatttttagtagagatggggtttcaccatgttggtgaggctggtcttgaactcctgacctcaagtgatctgcagcccttcacctcccaaagtgctgggattacaggcatgagcctcacagatgatttagaacaaagactagaaatgttttcaaacttctagtattaataattttgcattaaggcatctgtgtaaatgtgatactttaaattcctataatgttcaagataatttcaagagcttggcactgtgattcacgcctgtaatcccagagctttgggaggcgaaggcagtttgagaccggcctgggcaacatagggagattccccaccccctctataaaaactaaaaaaactagccaggcatggtagtgtgtacctacagtctcagctactcgggaggctgcaacaggaggctagcttgagcccaggagcttgaggctgcagtgagctatgatcgctattgcactccagtctgggtgatagagtgagactctgtctcaaaaaaaaaaaaaagataattttgagaattctaacagattattcttgtactaattacaaatatgtatttgaatagatttagacttttgattttaagatgaaatctcgtttgtattgacacatttgaaagcactcatgactcagtattcttataaatgtattacatttacaagaattacacaaggacttgaaaggctttgttagaaacctgtgatacttagaaaaacgaattgaatttataaatgcagtttcaaatgttcaaaggattttaattagcttagtttattaatgggaccaaataactgatataatttactagatttatgaatagaactgtaaaacttggctgtgcgcggtggctcacgcctgtaatcccagcactttgagaggctgaggcgggcggatcacgaggtcaggagtttcatgggctggaggtctcaggataataaagaactgttgtggttgggggtgggaggtggaagagagtcatcaagcaactggaattatgggaacttcagcatgaagacctagcactagaaattcgggaggccacaatcacaatatcagggatataaccaagggaatggatgtctaattggaaagaaaggaatatcactgaagacgagaaggaaatcagacctgataagccagagcgctgctttagatgagtggccactatttcgcacaacttaagggggcacggttcacgtgaacgtctacgtaaatggcgctcccaggccttgtgcagtgcataacctgcggacccgtatgacatgaacctgctagatccccaagtacccaagaactgatgacaggagttcgtgtggggagacgagacaggaggtaaaaaaataatccttggtaagcaaaaattggtcataattgtggagtatttactatatgcttggtgatgttctaaacactctcaataaccttgtgagttcaatatttttattatcatcaatactattttacagatgaaagaagcaaaggaaacgacagctggtctcgagcacactcgctcaagagcgccacactctacaccgtagagtctacagcgcagacgaagccaactcctcagagcgctcaccgcgctctttccgcagcctcccccgccgccggccgggcgtagcgcagggtcacgtgccggcgcggggcggggccagcggggcgcctgcgcgcctgcgcgccgctggccgacggaggggagcctgccgatgccgagcgggtgctacgtcccgcggtcggagccgcgtcttctcccggctccgccaccagccggggctcgggtgggggcccggggccccggggcatggccctccggagtgcgcagggcgacggccccacctccggccactgggacg

SEQ ID NO: 25950 - DNA, 2300 bp, Homo sapien
agaccttgtttcaaataagaagatttcaacaaaaagtaaataaaaatagtacaaagggcatctctattccctttacgcacgtttacctattgtaatattttacccagcttgttttatcatttgtgagtgtgcagtcatgtgtgctatatatatacacatgtaaacgtgtgggcacatttttttcctgaatcattttagggtagattatatgcatcatggctgtttacttctaattacttcaggaaaatttcttaacaatagacatattcttgggctgggcgaggtggctcacgcctgtaatcctagcactttgggaggccgaggagggcggatcacctgaggtcgggagtttgagaccagcctgaccaacatagagaaaccctatctctactaaaaatacaaaattagccaggcatggtggcgcatgcctgtaatcccagctactcgggaggctgaggcaggagaatcacatgaacctgggaggcggcagaggttgtggtgagccaagatcacgccattgcactccagcctgagcaacaagagcgaaactccatctcaaaaaaaaaaaaaaaagaataggtatattctcttaactattgtgattatgtaccaacttcacaaatttacattgatacaataatttaataccctctgaattccagttctgtcgatattgttttttatagcatccccctccacctcctgcagtatgggatacagtctagagtattgcatttatgcaatgtctctttagcctccatttgtcttttatgctgtggacatgttttagaagtatagtaccccttccccctttttaaatagacacttcctctttttctgaatgtttcctggtaattgaattgaagttatggctgggtgcggtggctcacatctgtgatctcagcactttgggaggctgaggtgggaggattgcttgagcctgggagttcaagaccagcctgggcaacatggtgaaacaccgtctctactgaaaatacagaaaattagctgagggtggtggtgcgtgcctgtagtctcagctacctgggaggctgaggtgaaagaatcaccggagtccaggaagttgaggcttcagtgagccatgatcacaccactgcattccagtctgggcagtggaataagaccctgtcttaaaacacatacacacatacaaattgaagttatgctgtctcagccaggagacttgcatacgtgttatatccttctcacgttatcacaatctggagactcaatacaatttcatctaaatgcataatgaggggaatcagcacatgctgtaggagatagggaagacatcattggaaaggaacctgatttgatagcatatttctaacatcttacttattttcccccggtgtcaaattttgcattagctcagctaatctgtattactgttttataccagtttttaagctcctgtattaaatataaagagaatattactgatttctgtttttaaatttaatgaaaccaagtgtgtctttcaaatggtgatcaaggttctactgattattaccttaaggttcccccaaaagatttggattggtataagatgacatggagctttgatgtatgagaacaagcctttattctcttcctggtttcatcaaatatgagtcagaatggcaagttgtactcttagctttgccgccattctagaaccttttagcacccctacttaagttacagaaagctgctgaaaagaaagtatttttcttgccaataccttttgtagaatatataactagtggtaatgctgatgtatctatcctcaatgccatttttctcttccaggctgtcttacaaaaatcattcaaattttgcctgcagaggtaacaggatatttggcaaaatatgattaaagcaaatatcagtttactgtatttcttgggatttttcttctcatgttataggaagcactggttaacacagttgagctatatttattggctgtaggtaggagagccagaggtatatttcaggccattattatttgtaagattatttccttcccatataccttctgtaaatgattccttggactttgtgcattttgtttctgcagtttgaagaaaacaggtctgaaacaaggtcttacccccagctgcttctgaacacagtgactgccagatctccaaacatcaagtccagctttgtccgccaacctgtctgacatgtcgggacccgtgccaagcagggccagagtttacacagatgttaatacacacagacctcgagaatactgggattacgagtcacatgtggtggaatgggggtaa

SEQ ID NO: 25951 - DNA, 2300 bp, Homo sapien
ctcactacactcagatgaaaacccagcttccttatcatgacctgaatgccctgcccacctctcccaccatatttcttcctcttcttccctttatttgcagtgcttcagccaccatggcctccttcttcaaacttgtgatgctctttcctgccttgggacgtttgcacttactgtttccttctcaaagggaccttctgaaccactcaagctaaagctctatacttcacagctacttatcttttcctttcgtagcacttattgctacctgaaattactttgtttatgcatttgtttacctgtgcattacttgcttctcactttagaaggtaagctccaccagtgagcaactggtgtatgtcttcctcataacacatccccagtacctagcacagtgtctggctcatagcaaatgatgaattgttgtgagttaaacaaatgtgaatacagttgggaaaaacaaagccacaagagccaaaaagatacgttcgagaggtaggtagaagggtatcatttcctggaagatggcttcccagaaactttgggattatcttgtataacctcctcagtccacaagtggggaaattgaggcccagttacaggacactgagagaaaaactgttgtgggttcccaggcaattgggatcagatgtcacaagctgtctagcagatgaggtccagagaaggccacagccacctccctgaggccatcactataagtctgcagccaccaccagccctaaccccacatggggaagaggtgcctctttgggagcagaggtgctagtcagctgacaaactgtgaaggcagggctgtggagggtggagaggcccattcctgagacaaccagctattctgagacagttagggataatggttggtactgaaagaacctggcctcctcaccctcgttccagtgctcacacctctgtcccaccagaggtgagactaatacttgaactcctttcagcaactcttagacgcttcagcttttatcagggcctgcaaaggagaggttgatcatcagatggagccctgtccactgggggctcccagtctgatggaggagacagactgaggtcctcaggttactgactgatagtgtctgggttggagggagttaaacagagaggagacccctagaggaaaggatccctgaattagttcaatcggcatacagaaattatccagtccatgaggtgacagtaagagaagtaactgccagtgtaaagggagggaggcaacacagctaagttccaggaattgtttgcagtcttgtgggtggaatcttccggaatttgagaagagagtggcagaataggaggctggaaaggagggtttggccaaattatggaggactctgaatgtcaagtgaagagtttgggctatctttggtgcataaagaggtccatgggagatttttgaccatagggagaccatgatgagctctgcatggtagaaagtgctttgtggctgttttggggaggtagctcgggcaaggagagcaggggtgggaggcagatagaaggaaaaaaaaacactgtattttggacgcacagctcttggcaggactcctgtaggaggaaggaattgggccttggtctcttgagagctagtatcctcacttctcagactcctgcgccatgcccttcctagggtccaactttcattcacttcttccgaactccaagtttgaatagaaagtgttgctgaaaccctaatttaaaacgaggggtcagagcaaaagagacttcagctcccagaatgcttggctctacagctctgcaggtcgcgcatggttcttttcaagaaaggggggccagctgggtgaagtgtgggaaacctgggtaccgccatcttaacttgggtcaaaccaactgttcacctaatgggaggttcgtgttctctctgttgtcacttgttaacactattgaaataaaatgcgcttaactattgcaagtctccttattctgctttgcgttggggattccttccattttgcaccctaggccagaactgaatccctaaggttacaataggacatcccagcatggccgcattcagagagattcctctgggggcggagtcggaagctgtctcgccccgcctcctggtaggagggggtttccgcttccggcagcagcggctgcagcctcgctctggtccctgcggctggcggccgagccgtgtgtctcctcctccatcgccgccatattgtctgtgtgagcagaggggagagcggccgccgccgctgccgcttccaccacaggtacctagggagcagccaggcgaggtcgttggc

SEQ ID NO: 25952 - DNA, 2300 bp, Homo sapien
tcatggaaccatcaccagccctgggaatgggtactattattatctcattttcagagcaggcaactgagactctgggaagcagctaaccttggaaccggaactgggtctctctgataccagaccctggcttgctcctaccacattgtcttgaaatcctttgtttacagctcgccttcccctctcggctgcagaaggcctgtctcagtctcattcatggttttcttctactcccagggtcccaagtgtcaaaatatgcctaaggagcaaataaatgaatgagcctacaaggcaagcccctcttcgccttccgggcccagttcacgccttggttggcatctccagttggaggtggaattgggagggggctggacagaggaatttcaagctgcctgagggtcagaagcagagaggagggggagaagggggagaaagcgaaagtgaagtgagctgggagcccctgtgaggaggcgcagacagggaaggaaatctcccggtaataattcatcggctcaggaagcagcagcctggtctggggctgtgtgtgggaccagccctgcggggagggggcccatgctggctgtttccctcctccccaaagcccagcctggctggggtcacggtcaaatgctggcggtggggggatccaggtgtgggaacagactctcccgcagaccctgggtcctaaggggctcctcccccggcagtcatgggaaatccctcgctccctcttcttcccctaattctggcctggatcagggaagccaggaaagcacagcatggcagagctgcaggcatcgtcaggaaaacagacgcccagaggagccaaaatgcacctagaagcctttcaactccactccctgcgctctgtctgctacaccggctgccactcgggcttattttcaaggccaagtggatgctggtttagctagtgcctggagagagctgagcagcaggcacgagtgagatcgagaccccggcaaccacctttggctcagcaattctctgaagaggacacgtcaggctgaacaatctaaggtttctagaaggcaagcaggcattgaggaaagatagcccgtgtgtgtgtgatgggatggtggtggtaggattccaagaggtagtgaaaccggacaggctggagctagcgccgccactcccacctgtacgactgaaggccggagctctctgacctgtaactcagggctgccatcctgcagcctcagctgggcgcaatagagtatatagcaccgagtctggtacacagtagttccttaaccaaaacgtcagttccgtgagggtgaagaatttattttgttaatggctgtatcctcagacctaaaaccatgtctgacacatagtagggacccaacgaatatttgttgaaaaaacgaacgaactactggtgtttgtgtattgtggttttgttttgcttttttttttcttcttctttttaagtttgtcttcagggacaagacactgtcgaatcctcatttggaaagattatagcttttctccaagtgttctccacggacaccaccactatcaccaatggcttgttacaaaatgtaggttcctgggcccgttccagaactgctcaatcagaatgggagcaatttgggactctgtaatagcaaaagccccttccccagttcttacgcacgtgaaagctgcagaactacaggattagaattggagggcaggcagacactagctgtttctctgcaatctgaacgttccgaacgaggaaactgaggcccagagaggagaaagggatctgcccgcgtctcccaggtggtccaggctggagacaaaaagttcggatctgggcccaccccggccgaccctcccagacctccagcatctgccgggctagccagccgggaacgggggccttcggggtgggccgccggctcccgggccgctttcaacctgggggacggaggcggtgggagcgtcgccattggccagggcgcggcggacgcctccccattggccgggcggacgcctccccattggccgggcggagccctccgcccccggccggggcggccttgccattggcccctccctcgcctataaggcgggggccggcggggccgtgggagcgcgcgggagcgcacggcggggcgcggccgacgctgggacgcggcgcacggagggacgcggccggcgcccatggcgttcgcgctgctgcggcccgtcggcgcgcacgtgctgtacccggacgtgcggctgctgagcgaggacgaggagaaccgcagcgagagcgacgcgtcggaccagtcgttcggctgctgcgaggg

SEQ ID NO: 25953 - DNA, 2300 bp, Homo sapien
cttactgctgaataatcatttgtggaatcatgagagagaacccgtggaccagcagcaggaggccttccacgccgctcacacttaatggggtctccccagagtgctctaccctgcacccgtcctgccccagactttccctgtttagaggatgacctactctccacctggctgtgtgggcccctaacaggaagtcaacttagattctcccttttctcttgcccttggattcaccccttctgccagaccccttgggcctgccccgtaaatgtgtcccaaacctgtctacctctccctgtccccaccacaccatcatccagaccagcatcttctgctgaatacctgcagaggcctcccctctgccttccagccctgtgccctgtccaccctgccaagtctgttctcctgtgacaactttctagaacatgcatcagatcatgtcaccctcccctgttgccaacactccagggcccacccactgctctcagaagcagacctgcaccatctggctcctgctggcctttctgaccattcctggagccctggagtccactctagtgaactccttgctgtgcctcctacacagtgaacgtgctctggtttcaagtcctttgcgtttgctgttccctttgcatggaacgttcttccctcaggtcatacacagcatacattactgagcactttccgtgtgccaagcatggtttgaagtgctttatatatattaacccatttaacccaaaaattctatgagatggatctgttatctccatccaatttgatagatggggcaactgaggcacaaaaagatgaattgcccaagatcacatagctgttaagcagcagagctagatttgaacccaggcagttgagctcttaatcgaaactattccacttctctcttttttttttttttttgagatggattctcgttccatcgccgaggctggagtgcaatggtgcgatctcagctcactgcaacctccgcctcctgggttcaagtgattctcctgcctcagcctcctgagtaactgtgattacaggcatacaccaccatgcccagctaatttttgtatttttagtagagacagggttgtgccattttggccaggctggtctcaaactcctgacctcaggtgatccacccgcctcggcctcccaaagttctgggattacaggcatgagccaccgtgcccggccccacttctctatctttccaagtactctgcttcattcttacctcagagaggcctcgtggaccccatctctgtcctgtcacctgtgttattgtcattatagcatttgtcactctaatatttacttcttgttccatctgccccactagactggagccccttgaagccagggcctgattcagtcacattccagctgtaccgtattcccagggtctacaacagggccagctggatagtgtgcatgtggtgtgctgatacatgtgtgggagaaatccctgatttgtagcatctgtccatttctctggtgtaaatactctcccatggctgattttcaagctacaaggtgatgtcgaacagctcacaaaattcctgataattaacagttgtctctcacagtagtccagtgtgatcaccttataaggagctcagcacaagtggacaaagtctgctttacaaactctcaagccttgtaccatgtccattgactctgtgcctcttctccccaggaggacccagacagcgtgccccccatcgatgtcctctggatcaaaggggcccagggaggtgactacttctactcctttgggggctgccaccgctacgcggcctaccagcaactgcagcgagagaccatccccgccaagcttgtccagtccactctctcagacctaagggtgtacctgggagcatccacaccagacttgcagtagcagcctccttggcacctgctgccaccttcaagagcccagaagacacacctggcctccagcaggctgggccatgcagaagggatagcaggggtgcattctctttgcacctggcgagagggtctgactctgggcacccctctcaccagctacaaggccttggactcactgtacagtgtgggagccccagttcccacctctgtgacaataggatcatggccttacccttgaagcattaccgagaaggagaacagagatgggcttgaagagccacgtgctgccggctccaaattcccaaggacaaggatccctctgcatttttgtctatgtaacctcttatatggactacattcagctgcaaggaaaggaaaaccttgattgcagtggtttaaacaaacagaag

SEQ ID NO: 25954 - DNA, 2300 bp, Homo sapien
aaaaagaggctcgaagggatgtcctaacttccacttgtggacattcgcatgtaatgatgtgatgttttgagctacagtagccatcttgggaccatgaggggcacaccgcaggataacagaacaccaaggatgatggcacaaaaggatagacagaaccagggtcttttttttctgagagagtctcactctctcacccaggctgtagtgcaacggcatgatctcagctcactgcaacctctgcctctcggtttcaagcaattctcctgtctcagcctctggagtaactgggactacaggcgcgcgccaccatgcctgcctaatttttgtacttttggtagagacagggtttcactatgttggctaggctggtctcgaactcctggcctcaagtgattcgcctgcctcagccttccaaagtgctgggattacaggtgtgagccaccgggcccagccagaactggagtctttggtcacattgttcaactgcctctttaccaaccttggacatacctacctccaaacattttattatgtgagaaaacaaaccttcttattgcttaagccattttgaattgggccatagatatcttaacacagagaatttgataccaggaaatgaggcctccctgggtacaccatgatgatagaatcaggccagagctccacttttccactctagaaactgttatcctgccattcttacttcctgtaatgaggaagatgttttagaagggataacttccctcttgatgaaattctctaattctgaataattctggggctgaggtgtgggtgtcagttctacttcttgaaataaagtatcatttaggtgcgcacgggaattatgtttcgaaagggaaaggctggagtcttggtgtcagtgttctaaggttttgtgagagactaagaacccaaaataaatgatcttcaacagcaaaatggatgttatgcaattcacagagcactatgagcactctctcaattcacacaactttgagtgatgggcagcatgacttcattttacagacggggttcagaaagtgtcagcaactggtggaaggcaaagtagaaactcctggctccctccttcgtctccagttttctccagctggcagggtaagtatgcatttctccatgttcgtgccattcaggttgagaaggaagacaagcaaaccagacatgcttgtcttcgaccgagtctgggatcgtccaccttcctgcttggagttggtggttaagtggccccacagtttggactcgtgtgacctgactttcatttcagctgaccttgaacagcgggtctataactgcacctacttccagtagtgttgtaatgacacaaacagacagtgtggaacttgaaggcagggcccacccattgtcagcgcgactcctgagggctccgtgtgacagtcactgttgctgaaccaaggcagccaacggtggggtagaaggcggactctggagccagaccgtctggatttgaacgcggattcggccacttactagttccgtgatcttgggtacatcacttaaacctgtgtctcagtctcctcttctgtaaaatgggaataacagtcataccttccttgcagggttgttttgaggttcagatacgttaatacacgtgcaaaatgttcggaacgactccagacacagccggcgccagactggaagtggaaccgctggtggggatcataacctcgctggctaggaaccccagcagcggggcagcagcgcaccgcgggctttgccgactcaccctggctgggcaggtccgccgcgctctcccccgcccccgcccccgcggcctaagtcggcccggccggtgcgtcacccgcgcccctcccgccccgcgacctgcaaactcaccctgagtcagcccgcccgggcgtttccactccccggacgccgcgcggcgcaggggaggcgagaggcgccccccggtggagagcctgagccccgcgcgagtctggcggcacctggcgagcggagccggagtcgggctggggaccgcggggtcgaggccggaccgcggcggggtcgggggagaaacgcgcgctgccctggcacgggcccccccccccggccgcgcggaatggtatggcccggccggagttaaggccggggggaggcggcgagtcccgcggcggcggcgacgatggggctgcgtgcaggaggaacgctgggcagggccggcgcgggtcggggggcgcccgaggggcccgggccgagcggcggcgcgcagggcggcagcatccactcgggccgcatcgccgcggtgcacaacgtgccgctga

SEQ ID NO: 25955 - DNA, 2300 bp, Homo sapien
tttcctagggtgaagtgcagggaaggactctgggcagtggaaatggtatacaggtcaagagagctgcaagcccaaagcaccagtaggcacctatggctggagcagagaatgcatgggcgtgccatgagtcaagggtgtggtcacttcaactctcagtgacagaggtttaaaaaagtcccatgggcaacatggtgaaaccccgtctctgataaaaagacaaaaaattagccaggcatggtggcgcaccctgtaatcccagctattcaggaggctgagacaggagaatcacttgaacctgggaggcggaggttgcagtgggctgtgatcgcgccattgcactccagcctggacaacgagagcgaaactccatctcaaaaaaaaaaaaaattcccatgggcaagatatgaggcaatgcaacaggaaagatggtgggggacctctagaccatgcagggccttggcaagatcaggggcccccattgttttggacctgcaatgtttttcaatgtttatatatagggagtaaactgccttaattccttatttcggtcagggaaaacaatctaaaaccatacagggcaaattcaatggcaaaccttctgcttccacatccttgcatctttatgtcttttgaaaatattcaaggccaacagatcctgcattggaaactctaacttattattattattattattattttggagatagggtctcgctctttcatccaggctggagcgcagtggtgccattacagctcactgcagcctcgaactcccaggcccaagcgatcctcccaccacatcctcccaagtagctaaggccacatgtgtgcaccaccacacctggctaattttttttttttttttaactatttgtagagacaaggtctcactatgttgcccaggctggtctcaaactcctgacctcaagtgatcctcctgcctcagcctcccaaaatgctgggattacaggcttgaaccaccacgaggggccccagttttattctgagacttctgggctacacctcaaggaccatgataggccctgattcagtggtgcccagaggccactgaggtctctggcaattgctgctgactcactgcatgacctcaagcacctccaagccctctctaggtcttagcctgcaaactggtattggatgacccagtcccaaaaggacatccccactccaccagccttgcatctcataaccagaattccattgacagcgagagcctggaattcctagagtctgattctgggactcttgtgcactggccatcccacacttgctaaagcaggtccgccaccatggggctttgcccagcaccctctgggcagggggctgagctctcctgctccttggtcctgccaagatatgggggctcccccaggtttgggtcggactgggggtggcgggtctgctcagatccttttagagacaaaggagctgacctgcaaagagttccagcaggagccccgctccccctcccttcccccctctcccttcccagtccacgtgtctctattgtctgctccccgcttcagggaaagacactgcctcggatgtgtcaaaaccaccaccccccggcagcaggaaaattaattactggacgattttcacttcctcttgcagcgcccgcctgagctaggcaccggaacaggaccaaccgagcaaggccaggcatcggcgtgggggacttgctccccccaccagttctggaagaagaaagttgaaccccaaacccaacagggggctccagtgggagcccgagcaggggggaggggagacttactctagtgaaagctgagcgtccaccctggccacttcagaactgggggagagggagaggactggaggcgggagggtggccgctggccagtgcgcactctttcctctgcatccccttccctgcggccccatgtgcctgaaccccgcctgctcgggaccgctttccctccgttcccctcggcttccccctctcttttgcacttttctttccctttctttgcatccctgggggggtttcctttttgtgtgcctggatttctcttttcctcccgtgggtgtgtgtgtgttgctacttctctccatctctgtctttcttctctctctgtttctctcttgtgtctttttgtccttatcttggtctctctgcttctatttctacctctctcagcgtgtgcgtctctctttccctgtatgtctctgtctttctccgagtctctcttcttctccccgcccccctcactcccctttctccgtccctctctgtctctgcgcctttctcgccctcactt

SEQ ID NO: 25956 - DNA, 2300 bp, Homo sapien
gttgaccaaagattcgtttgatgaatccagtttttctgaaatagatgagtctgatgttagttctggttagaaataacttcaaaaacagtttttacatgttattttcacattgaaaatcagtcagatttagggctgggcttggtggctcacgcctgcaatcccagcactctgggaggctgaggcgtggggatcacttgaacccaggagttcgagaccagcctggcaacatggagaaaccccgtctctactaagaaatataaaaaattagccggacattgtggtgcacgcctgtaatcccagctactaaggagactgaggcacgagaactgcttgaactcgggaggcggaggttgctgtgagccgagatcaagccactgtagtccagcctgggctacacagtaagactctgtctcaaaagaaaaaaaaaaaaaacagcagtcagaatcagatttgcttcagcctcaaatagcacgtttacataaaattaaatgagtgctggcaacgagctgcacttttttttctaaacaggaaacgggctaaggagactactcaaagtcgcatttgaattcattggcctgtgcttgatgacatggccatgtgcagctacaaagaaggctgggaaatgtagtcctttagttgagtggccatttgtctaacaaaaactgcgccttttttttattttttcttttttaagatggagtctcgctctgttgcccaggctggagtgcagtggcatgatctcggctcactgcaacctccacctcccaggttggagccgttctccggcctcagcctcctgagtagctgggattacaggtgtgcgccaccatgctgggctaatttttgtatttttagtagagacggggttttgccatgttggccaggccagtctcggactcatgacctcaagggatccgcccgcctcatcctcccaaagtgctaggattacagacgtgagccaccgcgcctggccaataactacatgtttttgaatgcaactgatacgtttgctgaaatagtaatcttataatgatggttcattgagccctcactatgtggcaggcacagttttagcactttagtgcatgttcctagcaacagttctgatgttggtactgacagcctatagctgttttgcaagagaagactctgaagcacaggaggttaggtcacttgctcagcttgtaagggttgaagctgggatttgaacccaggcaactggttccagatgttaccgcaggggagagctccaagatggcccgagtctagaacagagaaagaggccaaagtggggggccacttcttccaaaatattcctgagaagccagaaatgctgaaggttgcttgccatcccctccactgctgattacagtaacaaattgttaaacacactgggcaaaccaaagtaatatatctgctgtctggcagtggccagtgagttaacaatttacaaatcctaagctaagtcattgagaaaggcccttccaccttcaaaatgtcagattcccaagcagcccctgccctcaaaaagcttcagtctcaaggtatgtgcctgcatgcacccacacaagaacaacctgaaatgaaggggtcatgggccctggtgaggacgcctgagaaggtgaggcagccagaggtctcctggaggacggagtcttgtagaaagcttggatgtggacagcagagggggctggtgctccaggctgggaggacagcacaggcaaaggtgtgccactgctgtctgggagcttcccctccctccttgggtcctcttggcacgcctggagtgggcctcacctgtgctattagtcaagtcagcttcctaagggagggaatggagtctgaggcccccagaagggagggggcagagcgggactgctaggggatctgactgcgttacaccccaggagtggctcctcccagagaggaaaaggaggtgaccagaaaggccactgagcattgggttcgctcagtgaaggtatgaggaaggaagtcccagccctgtgagggaattccgtgtgtgggaaccgtggggaggagctgccaggattcaggagtttcctgggtgaggcgtggccacaacggacactcctgctttgtactagaaggaagaagtatggagttaaagactgcagcgtgaactgaggagtcccggacaggccgcttgctgcagaggatccagtccagatcccaggagagcccctctgccccttcggacctcgtctcccatctacaaaacgtgaagattggcccagttagcgtgtctctacaaaaaggtgcatataccactggtgagttca

SEQ ID NO: 25957 - DNA, 2300 bp, Homo sapien
gctctgatttggttggtgtccatgccagagtgtacaatcattattagctattgatatattattagctccctcccctgcccacccaggggtttacgcagtaagttctcaattattggcaatccaaacaaagaataaaagacaccagctggaatgaaacagagaagctggttccaaattgagcaattcagactgactgctataaaatttcctcaccttaaaggcccttagagttaattcattctaatccccctaaaaatatacttttttgacatgttcaagtattggaaatttggaaaattcacaaaaacacaaagaagaaattaactgctgtgattatagatgattatacacatatacatatgtatttaatacatatttatgctgtacatagtgttttgaagcatactgtacttcaaaaaaatttgggaggggtgcattggcttatgcctgtaatcctagaaattcaggaggccaaagcaggaggatcacttgaggccaggagttctagactggcctggggcaacatagcgagacccgtagcttgacatggtgatgcgggcctgtagtcttagttactctggaggctgaggtgtgaggattgcttcaacctaggttacagtgagctatgattgcaccactgcactccaccctgggcaacagagctagaccctgtctctaaaaaacataaataaaccaatgtttaatacttagcatttccccctatctttaaatatcttctagctacttcacttttatttttatctttttgagatgatctcttgcccaggttggggtgcagtggcatgatctcagcttactgcatcccccacatcccaggttcaatctattctcctgcctcagcctcctgagtagctgggattacaggcatgtggcaccacgcctggctaatttttgtatttttagtagagacgaggtttcaccacgttggccaggctggtcttgaactcctgacttcaggtgatctggtcgcctcagcctcccaaagtgctgggattacaggtgtgagccactgctcctggtagctacttcacttttaatggctgcataatattcctcatcagaaagtgggaaaaattaggctaggtggcgtggctcatgcctgtaatcctagtactttgggaggctgagttggtagaattgctagagctcaggagtttaagatcagtctgggcaacatggcaaaaccccatccctacaaaaaatacagaaaataccgggtgtggtggtgcacacctgtagtcccagctacttgggaggctgaggtgggaagattgcttgaccccaggagattgaggctgctgtgagctgagatcctgccactgcactccagcctgggcgacagagtgagactccatctcaaaaaaaaaaaaaaaaaaagaaaagaaaaagataaagaaataaataaagtgttaataattaaaagtacttttagagggttatgtcataagccttgacaagacttgttctgtaaagctacccggcatgcaaaaagctcaattaagttagctcctccacaggatggaattatataaccaatccctttcaagaggcattgaagttgtttccattattttgctatgatgaataaggctgagcaatattaatctttgctcatatctttggtcatttcctttgtaaatttcgggactgctgggtatgcacattttaaaattaactcactcatcatcatgcagttaggagaacagagaaaggaaggggcttgcaccgggtcacatagggagttagcgtcaaagtcaggactaggaaccagccagggccctctaactggagctcttccagctggggtcctagaggaagtcccagctggccgcgggagggaggaggaggaagggaaagaaccaggcgccggggctgaagcggcggcaggaagaaggtggggccggctgggaggagcgggcggagctgctgagcagcgcctctccttcgggcgggggaagctaagcggtcgcctggcaaccctggcggcgcgccgttcgaacggaagcgaggaaccaatcaggaagtccggggcgaaccattctggtgtgaaggggggcggcgtgctcacttccccttccacggcgccccagggactttccctgcggtgggggccttcgacagtgagggccacccgctcagctcgaccgcggagggcagctccaaaggggaccccaaaggtgcccacgcggggctggggcctcctgggcgtcgttgggagcggccactaccggcccgggtccgagctgtcagcctctccaaagcctgcgcgagaggagccg

SEQ ID NO: 25958 - DNA, 2300 bp, Homo sapien
gtccgggtgcgaccccgggtctgggggccccgttccccgagcgtctgctgtctgctttctccccgcgtcgtacctgcgtgtcatttcacagatgaggactctgaggctcagagaggcaagtgtcccggcccggcgagctctggcggagaatccagttcaagtctttctgccccacctcgcagccccctagtctagtcacatctggacttgccttgagaggcccagacgggcaactggtagtcattttcccagcgttttatcggcagggacctgtagacccctggctggatcacatatccccgcgccccacactgtcctcgggataccccctttgggcgtctgtctttccttctccgcagtccggggttggactcggctcatttggcgcctttctgtctacggggacagaggaccactctttggggatcggacgggactgacatttctgggctggatgcaggggcagcagattctccagcccccagagccgctgctggcctcttgggaatcatccccagtttggggaagggaatagagccagtccctaaaccaaagccactagtcaccagagactttggaattgggagtggggccggaatccccccaggtggagcagctgacctaggccagaccctgctgtgtctcctggggacaccccctgccccctaggttgctattgtcagtctccttttgtaggtggggaaacggaggttctaagaagttaagccccttttcgaagtcacagtcagacaatgcagtggttagctcctagtccctctggcttcaatcttagaatccttgacacacagaatcatgcattttgagagtcttcaatctcttcataagggagttacatatcctctctcctctggagcctgcccctggctttgggggacaggatctccgaggactcagaaagaaaacaaggctttcttttattctttcaacaaatattatttattgacttcataagccctgctctggttcttgcatgttttggtttttttacttattagcaaatgtatcatcttctcccactgtgatgcaaggcaggggctgaggcaattgagccagtgcaaaatttagggatgcccaaaacctcagtaatcaagactgaaactaacgttcatggaccatttgtgtgttctgcaggcaggaggttaactcacacagccttcatgaagtgcagtcctcccatctctctctctctctctctctctctctctctctctctatatatatatatacacacacacatatatacacacacacatatatgtatatatatgtatgtgtgtatatatgtatatatgtgtatatatatgcatatttataaatcatgaaaccactgccctgtccctgagttgctctgtgacattgagtaagtttcttcagtctctgggctgagctaagaagtcatgatggtgcactcaggcctgggcagagggcagtctaggataggaagtgggcttggctgtggatctgcctccccctcccctttctaatcctgcgtgccaggcccttccccaagaccttgcatgtgttatcttccattctgtcctcactgcaaaatccttcatccccattttgcaacctcaagtgcagacctaggcctagaagatcaacttggtatcagtgggcctagatgtccacatccacacccattccacagcctactcccttctcccttcctaatgttagtgcaaggccaccctgagcaaggctgactcctgggcaggccagggcaccagcgtctgggaggcctccagaaatagctcagggcctggtgtggctctggaggtggcccagctgggtgtccctgacctggacagctgggctgaaattgagctggggctgccctgctggctggccccttgccactgcctggagccttcccaatctcctctggggcaggcaagggcctccccaaatctaggccaggcttctgctgaagggaaagaaagaagcaggtgggaggaagggggcgggttgggtgtagaatgtcatgaaaattataacctttggaaaccacacctcccaccccctcaccaaagaataaaaatcactaacacctcttgagcatttactatgttctaagtactttacaagtatgaactcatttaattccctcaactctgtgatataaggtaattactgctgttcttatttccatcttgcagaggggaaactgagcacaagagaggtttaataatttgcataagataacctagaggtggagtttgaacccagagagtctggctctaaattttacattttttgggggggggggtggggtgggg

SEQ ID NO: 25959 - DNA, 2300 bp, Homo sapien
agtagtgaagaggtgacagagggggaaatatctaaaggatcatgttggaagaacaggtctgattggatggtaaggtcaggagcagagtgagggatgagggaagcctcatgtttcccaggcagggcctgctacctaatttgtggaactcaatgaagaatgcaagtgctgagtactttgttccaaatgtattaagaatttcaagacagtgctggcagagtgtaaaccaagcatggggcccatctaagcttggggcctggtgtaactgcctcgttgggattatcaagcagctcagtcaagacaatcataatgacgaccaccattcacactgcccttctctgcacccagagctgtgataagctatcagtccacattactctcacatggtcagggtgctatgaccccatttacagctgaggcaactggggccaagcggggcacgcagagctcagagcatgtgggaaggctcaggggaggctggaggctgataaccagctgcttttcctttgcctgcaaaagccccacacctggtataatgttctcagtccccagatgagaccacagttcacagctgcccagaagcagcctgccccaattcaaaactctatcgggatttgagagaacaaaaaggaaaatactaaacagccagactggcccctactctgaggaaacaagcagggagagaggaaaagcccaaacagctggcagaacataaaggcagcccatgcaggaaaggccccaccaactcctgggcaccttctgcctggagaccatgtcccccagggacaaatccctgccctagaggagtttatgctccagtgggtcgtgggaggggaggtgcaatgacaactataacattgacaacggaaaatatttatttagtgctcgctctgtgccaaccttgctctaactcacctaattttcatgccatgtgaagtaggtggtattattttcctcattcaggaggaaatgaaggcacagagaggttaagtgacttactcaaagtcatacagctggtagatggtagagccaggatttgaacccagaagctgaaaacttctccatccccatgctgaggactcacacgcattcctcctgcaagagataaggtttacccagtttacagatcagggtgtggaggcccagagaggcacagctgcccaccctaggtctcgtggccagctgtcggggagcgagatctagggttagcctcctggcactccaacctcctctccccactgcctcctctccacatccccactccagcagccccaggacaatctgccccaggacatgacaacttctcattactgttacaagcaaccaagccagggccatcctggggcataccactttcccctggccctgagggagaagagaggacaggaagcaactcccagctgggttgctcacttgccccaccttggaaggattttctgtgtctccagaggcaaagtggattcgctgggccctccccagcctcacccctctgcctcctcccctccctctgctctctccgggggtcacttgtactccaagcgctaacatggaaccagagggaggaaggtgcagcggggagagaaggggatggcagcgggactgaaacttgagatcttagacttggggggcaggggatgggggtggagggaaagagggagaccaagacagagacaggaagggagagttaagttgcatttggttttccaaagcgggcagcattggagcttggcgtttgtgtgtacatgaatgtgtgtgcgtgtcagcgtgcgtgtgagtgtgtgctcgtgagtgtgtgcatgagtgtgtgcgcgtgtctgtgtgctgttttcttccctcccctccagcagggaagccaggcctcactggataatcagagggctcagaggtgaggcagacagagcaaggttggtgcacgcttagggtaagggcgacgtgccaccaagactgaggaaggaggaagggaaggagtgaagaatagaggtgagagggtgtcgggtggggccggagggaggcggtgagaggaagcaagcagagcagccgtggtattcagagcaagtataaatagctgcctggacagagctcggccagacagaggtttgtagctgcagctgcaggcaagcctggccactgttggctgcagcaggacatcccaggcacagcccctagggctctgagcagacatccctcgccattgacacatcttcagatgctctcccagctagccatgctgcagggcagcctcctccttgtggttgccaccatgtctgtggctcaacagacaaggcaggaggcggataggggct

SEQ ID NO: 25960 - DNA, 2300 bp, Homo sapien
caacatgaaaagctcagaggtgtgagaggcctgtggtgtttgtgaaatattcaagggctgaaatctctaaggctaaagagagaggggtggggcagtgggaaagactgagatcagagatatcagaacaagaggtccttgcaggccatggtgatgaccacaatgggacacctggatgcccatgtcagctcagtccttgactcactgggtggcctaatctaggcaccccccagtcctgaaggctcagtggcctcatctgtgaaatggagcactttgggtgggctgtctctgacattccaccaagttctccgtgttgtctgccagcgttcttggggccccacagaaagaatggccaggccagggctgtaccttcagctgccacactctctgtgtgtttcccctgcccctgccatgccttcaagtgtccctcattgcactgggagaaggagctggaggagataccagcatttaccttccatttcttttggagcaagctccacatgtaggaaaaaagaggacaggctgggtggggtggctcacgtctgtagtcccagcactttgggaggctgaggcaggtggatcacttgaggtcaggagttcaagaccagcctggccaacatggtgaaaccccgtctctactaaaaactacaaaaattagctgggtgtggtggcaggtgcctgtaatcccagctacttgggaggctgaggcaggagaatcacttgaacccaggaggcagaggttgcagtgagccgagatggcgccattgcactccagcctgggtgacagagtgaaaacccatctcaaaaaaaagaaaaaaaaaagaaaagaaaaaggaaggacaattgttcagcaagagagtgtcaactgtaagtttctctaggcctccctccaaggcctcttccattctgatgagtctgtgcctgagaagtggctaagaggggcaggcactggaccagaatggccactgacctgctgtgtggccttgggcaagtcacttggcctctctgagcttccctttgctccccagaaaagtggaattactcagaatacaaacccaaaccattgggttgttttgaagactctagtatatgtcaagttcttagcaatgcccaccatatatgcctcacaaatgatagctagcatgattgttgttgtttttggtggttatagtgacaggagaggtgagcatgctgtcgggttgaaggaggaattttgctctgaaagggttaaacttgaaccagctgctcccagtcctggtgataaggttggaggaaacacagtccaggtccccagccctgtcacaagtggatttatgaggtgctggtcactttgagtcggagtagatgatccccgcagactgcacaggaaacattcagggttagtggccagaaggggctcaggcctctgttaaaagaatgagacagagtagagagaaaaagagaaagccaggcagcaggagccccgcaaacaccccaccctgcaggaggggagaaggggagagatggggttgaagggagagacagagaaaagggagaaccagaggcccagccaggaggacacagacagtgagcctgagagagagacggccggcaagagtaaaggatgcaggaacagccaggcagggtcgggggcagagcaggggagcgcgggccgcggaaagaccgagaaagcaggagacaaggagttgtccttaagggccagaaggaggaacagacagagaaaggggactggggggagggaaagaaaatcacaggcgctgagagggcgcgggggaccgtacgggtctccgggtgtccgcgcatctgtacctgcgcgcgcgtgcgtacctgtggctggcggtgggcacgtgcacgtgctcgggggcagtgctgggggcgggaaagacgcaagaccgccggctgcgggacagatcgaactcgagggccccgacccgggtgacccccgccccctccccgcgcgcgctcccgggccccgagctggttaacgcgccgcccccgccgcgccggctcctccccgccagggcagtgccccggctccgccaacgccctcactagacctggcggccggaccgacccgcgcctggcggatgcgcccggcgcgcccacagcagcccccgcgcccgccgtgccgccgccgggacgtggggcccttgggccgtcgggccgcctggggagcgccagcccggatccggctgcccagatgcgggcgccactctgcctgctcctgctcgtcgcccacgccgtggacatgctcgccctgaaccgaaggaagaagcaaggtacaaggggtggctgggcagggc

SEQ ID NO: 25961 - DNA, 2300 bp, Homo sapien
aaatacaaaaattagctgggcctggtggtgcgtgcctgtaatcccagttacttgggaggctgaggcaggagaatctcttgaacccaggaggcggaggttgcagtgagccgagatcgtgctactgtactccagcctgggtgatagagcaacactctgtctcaaaaaaaaatcatatatattttttcattgaagaatgaatcagggaaataataatttttactgattatcatgtggttattgctgaaaataatttcatagatgaggagggaggtgttaaaaagtgatctgcttcattgacatcctcatacttcctgatttcaaaacttactacaaagctacataatcaaaacattatggtactggcataaagacagacatatagaccaatggaacagaatagagagcccagaaatgaaccttcacatgtatggccaaatgattttcaacaaagacaccaagaccattcaatagggaaagaacagccttttcaaccaatgatgctggggaaactggatattcatataaaaagaatgaagctggacctctccttcacaccacacataaaaatgaactcaagatggatcaaagacctgaatgtaagacgtaaaaatataaaactcttggaagaaaatgtagggcaaattcttcacaacactggatttggcagtgatttcttggatgtgacatcaaaggcacaggcaacaaaaggaaaatcaggcaaattgaactttatgaaaattaaaagcttttgtgcatcaatagacactatcaacagagtaaaaggcaattcacaaaaaggcagaaaatatttacaaatcgtatatctgataagggaataatatccaaaatatacagagaacacctaaaattgaacaacaaaaacccaacaactcagttaaaaaatgggtaaaggacttgaacaaacattctcctaagtcatacaaaaggccaataagtacatcaaaagttgctcagcatccctaatcattagggaaatgcaaaccaaaattataataagataccactggctgggcatggtagctcacggctgtaatcccagcacttgggaggctgagacgggtggattgcttgagctcaggagtttaagaccagccttggcaacatggcgaaaccccatctctatttaaaaaataaaagataccacctcatactcattagaatggctaaatggctactatgaaaacaaaacaaaacaaacataaaataacaagtgttgctgagaaggtggacaaattggaacgcttgtgcactgttggtgggaatgtaaaatggtgcagcctccgtggaaaacagtgtggttaatatcactaaactgtagacctaaagtgattacgatgatcaattttatgctatgtgtattttaccacaataaaaaacttcaaaaaactaacagagttacaaaaaatatatattttattttatttttttttgagacggagtctcgctctgtcgcccaggctagagtgcagctgcatgatctcggctcactgcaagctctgtctcctgggttcacaccattctcctgcctcagctgcccgagtagctgggactacaggtgcctgccaccacggctggctaatttttttgtatttttagtagagacagggtttcaccgtgttagctaggatggtctcgatctcctgaccttgtgatccgcccgcctcccaaggtgctgggattacaggcatgagccactatgcccagcctaaaaattatcatttttttaaaaaaaagagatatctgctatgggtgtcaaatatgctaggtaccccacggacaaggggaatgggaagttgggaagtcttggatatcagctacttggtagaaacaaagaacaatattaatcatagagggcttcctggaggaggtgatacggttgggctgatgctaggccaaagaagaattacagtagtgaacgatttcgcctcagtgcccatctaggcgctgccccttggttcagttcttcatggtttccagggaggcagggagcttggaatacccacattgctgtcacttggcaaccaggaactggtggctgcagccaccagccaagttctttccatcatcctgggccctcacctctggcataggctcttggtagtgggggcccagacagggaggcacctgccacctgcttcccttctcagccacccacagccctcatagggcagaatgggactcttgctgatgtaggtaagtccacagaaagtgctggatggatcaggggcaacacacacacacacacacacacacacacacacacacacacacacacacca

SEQ ID NO: 25962 - DNA, 2300 bp, Homo sapien
aggcacagggccagctgacaaagggagtgatggactataaagaggtaagagtgccctgactgggttggggctaggccaagaattcattccttcattcagtattcattctgtctttcaataagtatagattgatcccagaaggcactcaggtacatatgtgcacaaggtagacatgctccctgttcctttgtcacagtctagtggaaagacagtcattaaataagcaaagaaataaacacctaacatagtttcaggttatgattaatgctttgcaggaaaaaaaaaaagccagagagggattaaagacgggagaaggttattttggatggaatggtctgggaagccctctgttgaggatggtaggagtgagggatgaagccacttgaaatgaagaagcaagacatgcagatatctgggaaaagagcattccaggaagaggaacgcaaaggcccaaacagaacacatgaaacagggaaactggctgggaagctactgcaatagtctaagtgtgagatgctggaggatcagaccagagtggaagcagtgaaggtgatgggaagtggtcagattcataatatattttgagagtggagtcaactagctttgctgttggaccagatgtagatgtgagagaagagggggagccaaggttattgcacgtataaaggggatgagaggacagttgaaggagactgaatcagagaggtacagggctggcagggctggggcaggagatggcagaccacatgcagattcctgcagaccatggggaggactttacttttccattgagtgtgacgattttgagccaacggatgtgatctgacttttctttttttttttttttcttttttgagacagaagatcgctctgttgcccaggctgaagtgcaatggtgcgatcttggctcactgcaacctccacctccacctcccgggttcgattgattctcatgcctcagcctcccgagtacctgggactaaaggcgtgcgccaccacacccagctaatttttgtatttttagtagagacagggtttcaccatgttggccaggctggtctcaaactcctgacctcaagtgatccgcctgcctcggcctcacaaagtgctgggattacaggcatgagccgccacacctggccgatctgacttgttttctaacagaatctctctggttgcggagtgcagtacagactagagagagacaggaatggaatggggcagttctgaggctgatgccaggcatccaagtgaaagatgacaggagcttgaaccaggttagtgactgggatggggaaactaaatttatttgggtaaaaacaataagtggatttcatgaaacttgttgaagtaacgggtggtaaaaatcataaagggggtaggcaaataaatgattgaaatttgatagtgggtcaggagcttcagctctgcgggcagcagttgtgtctccttggagaagtggtttcaactctgagccgttttgtcatctgcaaaatggggataataacggtccatacttcatagagttgttgagagggtgatgtaaaggttttagcgcacgatgtagcacacaataaacacttaataaatgttatcttagaagccagactgccaggttcccataaccatttcagccgttcaccggctggctgttgtcatcttggtcaaattatccctctgcgcctcagtttcctcatctgtgcaatgaggcacattaatcgttaatatcaactgcatagagttgggttgtgaagattaaataaatgaatacaagtaaagcgtttagaataatgtggacggtagcaagcacggcgaacgtgttaacgattattaagaatgtattttagccacatttcccagccccttccccggcctagcataccccattttgtggatgggaagtctgcctctcagcaaggtggcctcttggaggacgctgtgcccgcgtcaggcgatcctgtcgactgccgccaagacccggcttccggctttgaggggccacgccccgctcgcactccctggcggaacctttcagtgctgcgctcgcgttgccaacccggcgcgcctcacgcagttgcgcccgctgttgggactacttccggcttccccgccccgccccgtccccgggcgtctccattttggtctcaggtgtggactcggcaagaaccagcgcaagagggaagcagagttatagctaccccggccgcggagccggctcactgcactacccccgcccccttctttcctccagacgccgaagtcgcgggcgctcatggcgggcctggaggtactgttcgcat

SEQ ID NO: 25963 - DNA, 2300 bp, Homo sapien
gttttatttgatttccatcagtatcatttgtaattttcaacatatagatcctgtacatagcttgttatttgtttaaagcagaaagggagatgattatgaatggcatattctgtcctttgttttggttttcaaatgttcattgttagtgtgtagaaatgtagttgattttcctgtgttgaactcttctatcctgtcaccttgctgaattcaaggtgtttagggtttttttgtttttttttttttttggtagattccttgggaatttcagggtagactatcatgtcatttgcaaatagggacagttttattccttacttgctaatatgaatgccttttgtttttcttgccttattgcagtggtcaggatgtccaatattatgttaaataagagtgatgagaaagaatatgctttcctcgttcccaatcttaggagcaaagcattcagtctttcacagtaaagtatattgttaggggtaggttttttgtaaatgttctttatcaggttaaagaagttcccctttattcttagtttgttgagagtttttaatcttgaatggatttatcatgttggattttgtcaaaagcttttttctgtatcaattgatatgatcatatgatttttcttccatagcttattgatatggtagattacgttgattgatttgtgactattaaccagtcttgcatgcctagaacaaatcatacttggtcatggcatatagttctttttatacatttttaaattcaatttgctcatattttgttgaggattttttttgtgtgtaagttcataggatatactagtctatatatgtgtatatatatatatattttttttttttttttggtgtagtctttgcctggttttgataccagagtaatactggtctcatgaaatggattggaacgtattccctcctcatatattttctagaagtgactgtaaaattggtgttaattcttctttgaatgtttggtagaattcttcctgaaatcatctgagcctggagatttttggtttttgtttttttattttatttttttagaatgttaagtgtaattcagtttctttaatggaactattcagattatctatttcattttggctgagttgtagtttatggtttttaagaattggtctattctgagttgttggattaagttgttcttagtattctcttattatcctttcagtggctacagatctattgtaatatctcctgtttcgttcttgttattggtgactgtgtcctctctttgtatttgtcagtctcgccaggagttggtcagttttattctttttttttgaagaattgactttgtttcattttctctcttgtttttcttttttattgacttctgttcttacctttattacttctgcttgctttgagttaatttgctcttctttttctaggttctttaggtcagaattttggttattgatttgaattccttcctctattttgatgtaagcatttagtgctatgaggtttcttctcagcaatcctttagttatatcccacatattttcgtatgtttttattttcattttaattcagtgctatatatttcttttttgtgactttgatccaaggattttctagaagtatgttgcttaattttcatgtatttagagagttaactttttgttttgatttctgttatgattccatatggttggagaacatactttatatgatttcagttattttacatttgtgagctttgctttatgggccaggatgtggttcattttaaaataccagtgttttaggaagcctggagtcctgcccactctgttacctcagcctgcctccacacctcagctgtggctcacgtcacttgtctctcacaggcatagaaaaagaggcccaggcaggatgggacaggtggtaggggcagccttccgaggacccctgagttagtgacagaactggaccttgaacccccagagctctgcctgcctggaacaggaacctggttcatcctccccatggagcctttgccttccatgacccttcccatgacacgtgatgaacacacaatgaagctgagggaggggtgaggcgggtgaggacagaggagtagccaatccaggccctgtgcccctacaccctcacctctttctaatggggtggtaaacaaggaggggcaactcagatgcctaagaagcttgggcccaaatctcagagacagcgtggggctgttgcccccctcacccaggtccagcaggcggcctgttcccccacttataaacaggccaagcgcaatgccaggagctatcagggccgccgccg

SEQ ID NO: 25964 - DNA, 2300 bp, Homo sapien
ccagagccctcaaagcctgcacattcacaatcctcatggacagaagtggatacaggctcagaggccagaggtactaaccgagaccacacgattcagctggtcaccgtgtcttcccggaacctgcacgattcagaccaaagctgtctctggggttggcgtgtgttccccaaagaggaaacgtctccatgaatttggtactctaggcacttcgctggactcatcttaactccggccctgtaaaggaaagaagtgaaagtcaccccttttcacagcctgttcacccacacccacctaggtcttctaggtgatcagacatgggtcctgctctccaggagctgccaatccgatggaggaggctgacccttaaacaaaatcacgaccgtcagagacaagagcaaacagtgcgggcaaaaggagagcccagatggaggggcccgtggggtaagtgggtgtgtgcccagggaggggttccaggagaagaggccccacagctgggccttggagggtgagggtgtgtttggccattggcaatgcccccaggagaacacccctcttgggcggagcactccactgtcccacggagaaaaaaattgcagagaaaagggggagggggatcgtcggattctttcttgcagccttcaggtggcgcccttgagccacggagccgcaagcgcccgaggagaccgtcccgacctaaggacctcggagaggacccggggtcctacctgggggctgcgtgcggggtgggggtggggggaaggggaagtggcagagtgggggtgaggagtggggaggcacctgcgcttggcgcaataggggctctccggtggtggggagggatcttcttcagcagcccccgcccgccccgcccctgcgcccgtggaccgcgggctccaagccccagttccctaagcccaggcgccggcgatccagatctgcctggaggggaggggaggacggtggatcggagcccccgcaccctcgccccagcccatcacccgccttcctgtccctctccttgctaactctccgggcgccctcgccggccgcgggcggagctccctccgcggcgctcggcgagccccggcccccgccccttctcccgtccctccgtccccggatcccccccccgcctccccagcggccgccaccgccgccgtacagctccgcgcggcgcgagtaggtacgtgcgcctcggcagtggctccgggccgggccgggaagggggcgggagaccgggagggcgaggcggtggcggccgggcccgcgccctccgggctgcgccgcaggagagagacccccgcaggcgagacccccgcaggcgtacgccggctgcaggaaggcggacgggcaccggagaggacgcaccctcgcccgccggcggccgggcgcccttcgccccagcgtggtgaggcggggagggaggcccggcacaggtacgcacgcggagaggggaccgctgggggcggcaggaggccgagggccgggggcggggagtggcggcgaaggacggcgagcctgacctcgcggcccgccgaaggacatgcgaccaggggacccggcctccccgggcctccgcctggtccggttcggccttccgggtcccgcgtctgtgggcaagggcaggagcagggggtgtggactgggccggcgggagcgggcgcggtgggcagccggcgtgctggggctttctgcgcgcaactttgggtacaacagcgtggacctgcgtgtgcgtatctgcgcgccccaaggctttgtgtacaactcgtgcgtgtgtctatcgactgggttttgtgaagcttcacccacagccgctgtgcgtccctctctccgggtgtcagtgcgcgcggcgggtggggtattgggcccctgcgggtcttggtggatctggcttgggtctcactcccaggggcactttgtgtgtgtgtgtgtgtgtgtgtgtgtgtgtgtgtacgcgcgtgtgcgtgtgacggggtactcgcgtggcccgaagatccgagggtcacactacgtgacttctgggtgtctgtgggtactgctgtgggaacagctgctgggggagtgtgtgtggaactggagtgttcctttcaggacctgtctgactgcagatgaaattagtaactggtggggtcgtggggtgtgaatggtgggcgggagcagctatgtcagttggtgtgtttctgcttatgttagggtaattgggcacggcctttgtgtaactggtgaatatctctgaacctgggcatgaaacagagagatgtcctaactctgggtgagaggaatcctcatttttctctgcc

SEQ ID NO: 25965 - DNA, 2300 bp, Homo sapien
gacctcttgggctcaagcaatccttctgactcagcctcctgagaagctggtactacaggcacgtgccaccacacctggctaattattgtattttattttgtttagataaggggtcttgctatgttgcccaggctggtctcaaactcctggcctcaagtagtcctcctgcattggcctctcaaaatgttcggattacaggtgtgagccaccatacctggcctcaaaatacttttaattatcttcatctgaagttcttgggggaagggggtgaatggtgtctgttgactctcatttatggtgaatggcttccttgtgtgttcttatatgagttcatcttcaggggagctctatctgaggatattttgtgtagccagattgagggcaagtttccctaaactcggctgagtttgctttgccagtcatttcacatctttatctggggtcactatgctaattcttggtttggagtttctagtgcatgtgaatagaataaatttatatatatacatttgcagtctcagttcactgcaacctccgcctcctgggttcaagaaattctcctgctccagcctcctgagtagctgggattacaggcgcccacaaccacacccggctaatttttgtatttttagtagagacggggtttcaccatgtttagccaggctggtctcgaactcctggcctcaggtgatccgcccacctcggcctcccaaagtgctggtattacaggcgtgagccatcacgcctgcccaataaatttatattttaaaagacctatgtgagaatagagtctacatattttcatcgtagcattaatttgattgtttgtttccaatgactactaggatgtcagctccaggaaagcagggcctttgtttctctgattttggttgataaccccagtgtctagagcagaactcggcacacagtagacattcaataagtgtttagcgaaagagagaattgaatacctgcttcacggtgtgatgatgtcagtggcatttgaaccagagtaactccatcttgaataggggctgggtaaaatgaggatgagacccactgggctgcattcccagatggttaaggcattctaagtcacaggatgagatcaacacaagatacaggtcgtaaagaccttgctgataaaacaattgcagtaaagaaagtggctaaatctcaccaaaaccaagatggccacaagagtgacctctggtcatcctcactgctacactcccaccagcgccatgacaggttacagatgcgatgacaacatcaggaagttaccctatatggtctaaaaaggggagacatgaataatctaccccttgtttagcagatcatcaaaaaataaccataaaaatgggcaaccagcagccctcaaggctgctttatctatggagtagccattcttttattcctttactttcctaataaacttgctttcattttactgtatggactccccctgaattctttattgcatgagatccaagaaccctcccttggggtctgggttgggacccctttcctataacaatgggaagaataaatggtgtgtcaggactgtgtttgcctgcaagtagcagagtgttccattagacatcgggtctgttttctcatatagatgctgttgccgagtcaggggtgcaatgatttctaatggctctgtgattttcttgggctttgtcttatggtcgcaagacagttaccatagctccagacattacatccacattcaaggcagaaggaaaagggagaaagtaggagtaaaagggaagcagcagtgacattttcccttttgttaggaaggtaaaagtttttctggaagcctaacagcaaattgctgctttgatctcatttgctggaaatgggtcacatggggattccagaaacaaggaaacttggaaagtgagcatttcctttatctggactctatagataagtaaatgaggacagggacttgggacacccgtggaggtatatgccaaatgagacatatacatagtttatatgtaaagcacaaagcaaacccttagaaaagagtgcctattttcataataaccatattgttgccatttaaagctttgcattctctgtgatcctgttggcatcacatattcttggcttctggaacagcaggctccaaggtactcggacccataatggtctccctcccttcctccttgttctgttcagagcactaaagccctttaaaaaaaaaaaaaaagccagattacatttttcaatgtgagctacttcctgctctcattaactccatcttcagtgatttggccagaacc

SEQ ID NO: 25966 - DNA, 2300 bp, Homo sapien
gcctgggcgacatagtaaagccccatctctattaataaacaaaacagcatgggaacagacaaaaaaatattttaatgacaatctcagaaatgttctccttctaaacatgtaataattacatggcttcctttggtttcacttttaagtgtaaaaatgtcacttatataatttcagtgagcattagagcagataaaacattttatcaattaacttgctaatatagcattaggtgttttggacagaagacctcaacatttcacatggctttttcaactagtttcctattcctgctaaattgctctgccatgtttttctagaaaacataatataataatggctatctgataggatatggtttaacggaatacaggagaaaatagaatcaatgtcctctccaaaatttattagcatttgttgcaaaaaaagtaatggatttattgcagctcagagatacaggaaaagatttgactgtgaaaagcaacagtaaacttaaaataattattttttcatgtacattatcaatattaactgtttctcaccaggccagtactgcagagtcatgatgtaaatcagtgaagtcactttacaaattcttctcttggaaaagtcagcttggggcagagagtagagggtaccaagttcagcaccggcgagagtaaacagacttaaggacttaagagccttaagagacttaagacaaaaggacttccaggatggcatctggcctagtgttcccatagaagactggggcctggcacaatgtgtgcttgctttctcattcacttagtcaatatttattgagctcctactatgtgttaggcactgctctgggcactggaaatacagcaagggaaaaaaacaaagttccttccctcatgaagtgtacattctagtgggagtgataaatgacacatagtaaatatacactatgtcagctggtaattaagtgtagcaaaactaggggcaaaggaggtggagaggagggagttagtattttatgtagaatggttaaggaagccctctctgagacagtaacatttgagcagagacctggaggaaaggaaggattgaaccatgtggctctctggtgtgttctaggcaaaggggacagcaaatgcaaaggcccagcagtgaggcctcagcaagaaggacagcttgatgggagaaaagtgagtgatggggagagccacgcaagatgaagtcagagagctggagtaagatgagggcatgtggcggagagcgatacagaaaaccactggatggtttagagcagagtaatgacagatcagacaggcctggttcagaaagaaggagcccattcccactccacctacttcccacacatgaagcagataagaaaccaagcccagaaagtgagttaacttatctaaagttgtatggctagaaatggaagggctaggcagaaaatccagttttttggactttttggtcttcttgttttccctgtgacagatggaagacagagggaaaagagccacaattaacattttaagttgtgattgtttatctctccgagatctttccaatgattcacctttttactacttaagaggaaaacatttccattttcagacacttaagattcctgctatcattgttagtagcccaagtgcttgtcattcacattaaatacccctggtactcagacttggtttgggcaatgaaaaatgttcctaaaggcttttagataaaaattactatttcactagagccaactatgtgccagggagtgagactggtatcatcaccccatgttagagaagaaaaagctgaggcccagagaggtgaagggacttgcacagggtcacacagccgaccaagacgctttccaccacgcccaatcgatcgcccagctcaaaataccggctggtgtgtaggtgggagaggccgccgctccccgtgtgctcgttgtctctgttcccaggccctctagagcaagatactaactatctctttaagaaggaaagtaaagacgggccgcttacgcagctgccggcgagccgccgactggctggtcccctccatccacctcaccctccccgcccctccctcccggcagccccagccccggcgagcacccagctagccgcctcctgcaggggctcgggagagcaattcggcggcccctgcagggcagctgaagccatggaagcctccgcaggtgatgacaaggaccccggggatctccgggcccaccgcccagctgcacccgccgcagtccagagtgccgagtgccagggggtggggtgggggccgcgggccgcgaggaggaggggacg

SEQ ID NO: 25967 - DNA, 2300 bp, Homo sapien
ctttgtaaagaaatatttacctagccctaagtccgaaagattttctccttcgtattcttctaaaatggttatagttttatgttttgcgtttacgtttatgattgaatttgggttaatttttttgtaaggagttaggtttcagtcaaagttcatatttttgccatggttgcaccatttgctttttttgttgttttgtttgtttgtttgttttgagatggggtctcactctgtcacccaggctggagtgcagtgacatgatcttggctcactgcaacctccgcctcctgggctcaagcgatcctcccatctcagcctcctgcgtatctgggaccacaggcacgttccagcacacctggctaatttttgtatttttgtagagatgaggtttcaccctgttgcccaggctggtcttgaactcctgacctcagctgatctccctgtgttgtcctcccaaagtgctgagattacaggcatgagccactgcgcccagccaacaccatttgttgaaagcactcttgcaaaaagcagttgactttactcatttgaggctatttctggattttctactttgttccactgatacttgtctatcccttcaccagtaccacactgtcttgattattgtagctatatataataagtcttgaaatttggtggtgattcctctcgctattctttttgtcagaattgttttagctattctaaattcctttgtcttttcatataaagtttagactaaccttccctggatctgcaaaacatcttgtagagattttgatagaaatggtgttatatctgtatatcaatttggtggcaattgacagctttactaattctttcaacacgtgaatacagagaatcttccatttatttaggtcttctttgatatcttttatcagtattttgttgttttcagcatacggttcctgtatgtgttttgttagatttacacgtatttctttttgttgttcttgtttttaggttttattttgcttcgtttttgtttttaacagagatgggggtcttgctttgttgcccaggctggtcttgaactcctggcctcaagtggtcctccggccttggtctcccaaaatgctgggattacaggagtgagccactgagctcggcctctttttttttttttttttttgagtgattgtaagtggtattgtattgtattccttttcttttcttttcctttcttttcttttcctttcctttcctttcctttttttttttttttttttttttgaggtggagtcttgctctgtcacctaggctggactgagcagtggctcagtcttggctcactgcaacctccacctcctgggttcatgtaattctcctgcctcagccacctgagtagcagggactacaggtgcttgccaccagcccagccaatttttgtatttttagtagagaggaggtttcaacagttgcccaggctagtcttgaactcctgggctcaagtgatccatcttcctcggcctcccaaagtgctgggactacaggcatgagccaccacgcccagcctggtgttgtattttaaatttcagtttacatgtgttcgttgttagtatacagaagtacaattgaatcttgtgtgttaattttgtatcccaggaccttgctaaactcttttatttggtctaggagtttatttgtagattctttgggattttctagtagaccatcgtgccatctataaataggaaccgttttatttcttctcttctgatctgtgtgactccccctcttttcttgcctactgtgctggctaggtcttccagtaccatctttaatagtgttgggagagtgaagttccttgcctttttctgcatcatgaatttgtatatttttacatttttctcaagacaaaaatccagtccttttatcccctgttgctcactatttactgtgactttttctattttaagtgggttttaaaggaggcttttcctgatgccagtttcccttgggaaatgaagggcctcttcctgtatcctcgccccttccctccccgttttcctggctttttaagggcatggactttgacgccccctagtggccgcgtggagccacgtctcctctcgcccctaggggagaagcgtggactggggacgtggggggacccggggacggctccatcctcctttccccatccctacccccaccccagtgtctcctgaggcacagggtccccacgggccgggctgaccccctgccccctggtgtctgcagacagcggtctcgggccccgggcccggccagatggtggcaccggtaaccgggtacagcct

SEQ ID NO: 25968 - DNA, 2300 bp, Homo sapien
agcagctatcatctgccaaaacatgacctgccaccaggaccacgcatgaacagcagatgcgaaaataagcagccactcctgccctgattttcctaacatttaaccagtagagcacttatatttttgtcagctgtcccctgggagagcagggagtcagagatccatttcctggaaatcactcccgggccagatcacataaccctttttctgtgtctgagatcctttcaccactgccaccttctctggatcccatcttagtgctgggatgcggggaagtgagaaaacaggtacagtcgttccttggggtaggttccaggacaatgcccctcactccccatccctcggataccaacatccacagctgcttatgtcccttacataaagtggcataatatttgcatataacttatgcacattcttctgtatactttaaatcatctctagattacttacaatacctaatgcaatgtaaatgctaaacaaagttatattttatttttatttgaatttttgttgttttttttaatttttatttttaaatattttctgtctacagttggttggatccatggatgtgaaacctggggataggaaaggcatactgtatcccctgccttgtagcagctcacaatataatggggaatggttccctgccagcgaacatgctgtgtttcgttcaatcattcaaaacatttgagtgtccactgtgtgccagacgtgctggtccctctgctgtgcacatcatcctccttggtgtgatgctccttcgaggctcagttcagatgctacttctctgcttggcttttccagactgcatgatacccaggctgcctggctgggtcttcccatgtattccacccctgacctgtactgcccctgttgccaagctatttatcaaattatgtgattaatatctgggtattttcttacactggacctcactcataagggcaggagctctgtcccgttcacacacgatccttccccgccacggcactgcccagcacacatatgctagcaaaaattatttgactgaataaatcagtggttttccaaggaacagattggaaatttatgtgggcatttttgggtgtcacgagactgaggggacagtcatatccctgtcgggggtggggggggcagggatatgaaactcctgtaatggatgggacagtccattacagtcaccataacaaatggtcctgtcccgcacaactttcagatatcctgccaaactttcaagtaagccaaaaatccgttataattggttgtacatacaatcacaatgaatttttccctagttttagtacacactagactgtctggaaatgcatatatcaggttggttgtggggagttacactttgctcaccattctggaaaatcgctgcccaccctgctccccacgggtgagtcacccgaacagcatgctcacgtctgtgtacatgtgtagctgtcacagtgactccgcgcttttatataaatatatttagcctttgactcaagatgtcagatataaactgttggcaaaattcagctgaatattgtcttctagtaaacctaagctgattcctaagttgggtacaagcgtgatcgggtgtaagccagcctcagcttttacaaagtgaaatgcatattcttttattagaaattactttcatgtccctgccttctccttataaacaaagggcatcatattgattttttacccggggaaccatcacctgggctgcagcctcaggacgaacctgtgccttccctctgtctcaatttcctgctttgggaaataggagccacaagccacaaactccatccaccgcgccacaggagcgaggtccaacgcaacggtccctagggcctgcctccaacccagcctcagtttcctatctgtcacatcgttctatgatctcgaaatgactataacccctttcttagccccaaaccagccggaagcgacatcttccggttgctacaggttacggcggttgctatgggctacggcgcctgcgcagaaacaccgccaagcgactcagcaacttctagagcgcatgcgtttcgcccacccaggcccgggcgcggttaggggtgactcccacgatccctagcggctgcagagtggaacatggcggcctccttgccgcttgcgttaccagagtccacccggcctcgtgctttctccgggcgcccgtagctggcgccggcatccacaaaaatagatcaggtaaagcagcagagtaaggcataggaagacttggtcgggctccgcggcccctctttaccggattggaggctgcgcgggtg

SEQ ID NO: 25969 - DNA, 2300 bp, Homo sapien
acagcacacagagtcacaaagcctatttatccagctcttcccccaaagaaagtacatttggggaccaagtcttctttccttcactgctgatacctagaacagtactcagacttagcaggtgctgagtaagtaagcgctgaaacaatgaataaacagctaacttttactgaatgcctattatgtgctaggtgctgtgctaaatgctttccatatacaccttaactctttttaaaaatctttcagtctccagacaactgtgatgcaactattgttatccagattacaaaggaagaaatgacattcaaaggggatttgcctatgctgtgctctcacaagtcagaagcagtcagtctgaaccctgccctgcctgggcctgggttcaggcgtgtctgcttgaggaagtcacagcttttccccagcaggcagtgcagcactgagaggaggagtgggggtacatgctggtggcctagcaacagcttcttctattccgactcaccacatccctgggctaatttggccttccaggagctattcctctgacactctaacccacgcttccctcccgcgcactgtcttgtaaaggacggatgagctgtccacaggaacgagtgggagttccatcacttcagctctttggaacaaagtgttccaaagagtgttctcactctaagttcaaagatgggggctgaagtccccttgtcagccctgctgatctccgaagcccagctattggtttgttgtgggtgttgttattgcttatatcaaaaagtacagaagctcagggatggaaatctggaaagggctgtgggagaggaaaattcctctgagagagaggggttaggtgggttcttttcctttcggaggaaccaattacttgtgggaagccatcagcacagaactgagcaaacttccactgtcagattataggagccaggcagcctttcaacctaactcgttagggccatggtttctctccttttccaggcccaggttattcttcgaaagactttctacttattgactgcaaacacagacaggcatgggaagaaagactgtatatttaggatatcaggctttctcttctctctgtgcctgcttttccactcctttcagaaatagtaatgggatgcctgttgtgtgccaggcactgtgctcagcactgggggttaacaaatgagtgacatttcctgaccagtgagggagatgagcaaacaaacacagcacagtggaaatccaacctaggaaatgcagaaggccttgctcatagtaggtgattaacaaacacttgtggaatatatgatgaagaggcaaatacaagaaatgctgtcgtctagagaagggaggcttgccaatctccatgcgtacaggtgggggaaagctttaaattggaggaaaaagagttcacaacaaggaaaagagagaaggcatgaatgactcttaagacagagggaatagcacctgcaaaagcatggaggcatgaactagcaggctgacttttaggactcaacctaaagtagtctggaataaatgaacttcatgataagtgtggagaagaatgagatggtgagaatggaaacattaccagaagtcaggtcacagagatttgagggcaagaagtaggtatggcttcagaagggaaagggaggagctgaggataactcccagatttctgacatagcccatgggtggattcagtgagaccgctggggaggcgcggcacagctggggaaaatcacgagtccagtttggataatctgcgaggtaaacgggatccagaaggcaactggactctcaggcctgggcctccctgtccctggaatagcacactctcttcccacttgaacatccatcctacacggcccagtcagggtcttcttccttcctccaggagaccttcctgattgccctagccttcctcctatacgccacatccaactgcctgagtccctcataacaggctttcggtctgattttgctgtgggaattgatttgcccggccaagccaagaacccttccctaggcagcagaagcccagtcactcagtcactggtgggtgggacgcggggtgaatctgcgtagggtggggcggggcatttttagctcaacactgggtcagaagtcacggccagacaagaaacgggtgagaaacgggggaggaagggtgacgtcacaattggtaggaaataccttgggacttgacgctttcgaaaccaaagggagagcaaaagcagccgggagcgcgcgggccgacctggttctcctcccttcccacggctgccttagtacagaatcttataagt

SEQ ID NO: 25970 - DNA, 2300 bp, Homo sapien
gggggcaggagaaggtgttccaggggcagcagcaggacaggcaaaggtatggagtcagggcaggtaggaagtgggtgtgcagtggggcaggaatggtggggctcccagtccagctgaggcagaggtgctgggggagtgctgaggaggtaataaagggagtgggctgtggaggtctccatgtcagccctgggagtttagcccagaccctgaagcaggagggagccactgaagagttcgagcaagggcatgcccaatgaaagatatttccaggtggctggaagtcagtgatgggtggcaactatccaaagagggaatagaaagagagtccctgtaggtattaaataggtgggagttaggggacctgggctccatgctgacatgctgggaccacaggcaagccccttacctggaagggcctgcttcctcctccctcttctataaaggccctttcaggtcatgactgaatgaagtgaggtgggggaggagtggcttggtttagttaggatctctattttccactttgctttggccttggacacctgacctaaggtgggtccatcacccacgttacctcagcttcaggcccacacagcttactctgaggttgccccacacctcagctttctgaaacagtatgtcccatagaagagaagacatgaacttggcccactttccagctaacttgagagagaaactttgcctctgtgcctcagtgtccccacctggaggaatggtgtgagtcacacctactctgcagggatggcatgagaagccattgagataatgcctttaaagtgccaggggtagaatctctgtgctctctgggagtaagtgctgaattagtggcaaatgtctttcttgttattattcctattgtgtgtttcctgtgtgggactctgggctgtaagctcttcattggcaggcacaagatctgacacccaaggctagtgcaactctgccaggtgggtcatgggaactgtgacgtaggcctgcctggcccaggaagcagcccagatactgacacaccctgagtgtgtacagcgtcaatcctcatgggactgcccagcacacgagtccctcgtccctccccaggcacccagtgcgacaggcaccctcacccaaccaaacccaccaggatctaaactaaattcttcctccttttctgttcaaatttatataattatttttggaataagtagtacatttaaacttttcaaaatttaagacaccaaaaatgtgccataaaaaaaaaaatctccacctcagcacacagctccttaggtctgctcccaagagacaaccactctaaattcccattaaaataatcaaacttaattgcttcccccttacaaaagtcatgagcattcagagcaaaagctaacttaaaaaaaaaaaaaccaccttggaacacacaaaagtacaaactgaaaacctcaccctcaatgctgccattcagagatactcagcattttagcgtatgtcctcctagactgctttcaacgcacatccactttacaaaaaatgaaaacaaaatgcaagaagagattcacaatattgatttttcaacatctcactagaatctcagaaatgtttcctcataccttcttccttaagtgactttaatagctctgtgatcttccacagacaatgatttattcaagcagaccacagagatgggcatttgggatttctacattttccttactagaagcagcagtgatggatgggccctgtgactccactgtaacaaattcctagaagaaatgctgggtcacaggatatgaccactttttaatatcctggcctagacccctagatacctatcacaaaccgccctctagccaactgcctcgatcagcaggactaggtgtccaacccaaatttagagctatttaagaaaaggccaagaagtcttggttcataaccgtctgaacagcagctgtgagggccttaatcccacctccaaatccagactaaggccaaaggcctcctctgggctggcaacctgccttgtttacccagccacagccctcacctgtgcccatcccagtccaaggtgagtcagctgaacaggggacaggcaccacccttcccagatcaggaagccagctgagagacagggctacgtttcagggagggaaacagattcagcagcggcagcagctggagaaggtcgtggagcagcaccttgcctgcaggtaagcgctgggggccctgacccaatcctggctgggattgggatgagtgagacctgctctcaccctgtccccttccctccctgccccttcccttctgggact

SEQ ID NO: 25971 - DNA, 2300 bp, Homo sapien
ttaggaaaggggacatagatgagggttggggtgtcaaaaaactgtgaggtcatgtttaaaacactacaggagctggtatggtttagttctgtgtccccacccaaatcttatcttgaattgtaatccctataatcctgaggtcaagggagggacccggtgggaggtgattggatggtgggggtggtttcccccatgctgttctcatggtagtgagtgcattctcatgagaaatgatggttttataggtgtttgacagttcctcttcacatactctctctcatgcctgctgctgtgtaagatatgcctgcttccccttctgccatgattgtaagtttcctgaggattcccagccatgcagaactgtgagtcaattaaacctctttcctccataaattacccagtctcaggaattttttttttttttttttttttttgagactggttctcactctgtcacccaggctggaatgcagaggtgcaatcttggctcactacaacctccgcctcctggtttaagcaattcttatgcctcagcctctcaagtggctgggattacaagcctgtgccaccatgcctggctaatttttttgtatttttagtagaaactgggtttcaccatgttggccaggctggtcttgaacgcctggcctcaagtgatctgcccgcctcagcttcccaaagtgctgggattacaggcatgagccaccgtgcccagcctcaggtattctttatagcagtgtgagaatcgactaatgcagaagcacacacacacacagatcagagaaagattagtcacatgtgcctccttatgtcctagaccatgtcacagtgttctcttgcgttacagtgcctctgcaggtactgctccttctgcctccccttaccccaacacatacacacaattggccttctaaccttggctaaacctggctaaacctggctaactcagggaaatatctgaccacattccagactaagtgaggcatctctgttatattaacacgcccctcacagcatgtattactgtctcataatattacagatttgaaactttacatttattccgtatctttttttacttaaacaggttatttgattatctctcccacatcatacgtagattctgtgaggtcagggactaagtctgactccttcaccgctgtatcctcagcacctagcacagtacatgacatacagaaggtgcttgtcaaagtcaaaataaaatatggagatgaatctctaaatgtaatgttttatttggggaagcgagaatcgcaactcggagcatacacacagatctggtggtctttggtatgtccgaaaaacaaagagaaggctgggcgttttattagaaagggaaatgcattggcactagtaaagtttcagggagctggcaagctctgattggtgactgacagtggtaagtaaaactagtattaggttatggcgggttgtttcagcagttactagctgaatctggtctcagggggacagcaggccatttccgcagcagttagtggaaatattggttcttggagcaggcgctgcgtgcctccagtgcttttcccctggcccctggattctgattccgttgggcataagaagagtgacccaattcgtattatcaactttcacatgctcaataagaatgtatgcatgtaagctatgggtgagtgaatgaatttggacaactcctcctccagtgaagaaaagcagaacttacaaccttgagccacttataaaatactaacatactaccaccacctgtgcgctgtcttctcagaaccatgctcttcccaggatgagtaactgtgtgcttctaagtggaaacctgatgacagtcacccagtcagtgactggcggaccccctattattactcccattctttgggcagggagatgcttaaccggctggaagcacagaggaagggcaggagaacgaagcaagtcacccggcaaacacagctgtatccggaggcctccgggcttccggaggtctcggggcttctgggcttccggtccctcttccggaggcctgggtttccgggacgtcgcgcgccgtgtggggcgcgcacgcagggctgggcgtgagggggcgtgcgcgtgcgcaggcgacgcgccgaggtactaggcagagccgtggaaccgccgccaggtcgctgttggtccacgccgcccgtcgcgccgcccgcccgctcagcgtccgccgccgccatgggagtgcaggtggaaaccatctccccaggagacggtgagtagtggcgcgcggcggctcggagtacctctgccgccgcgcgcat

SEQ ID NO: 25972 - DNA, 2300 bp, Homo sapien
tatttttgtggagaagatggctggtctcaggatttgtaactgtggcaagaaagtacctagtgccagtttattccccctgtaaagataggaggagttgggtgattcgggctcttgaattgagactcattttccccataacttacgatgtttgcagggagacaccaaaaaacactatttatagacgtctgctctaacctttcctgcctgtgaatcaagcaccctcacagctgcagatggccagccgctcactgggagcagtagcccagctgttggcagttctcaggaagagctggcaggccagctcctttgaacagatgcgtgtggctgccctgcgggatgattagagcactatggaactaatattctttgaatgatgtgctcttattatttgaaaaatcaggaggcctggtcttcaggtttcccctcctcttccactccccatcctccttgagagcagtatagactgggaatgcctgtcaggtgaccttccacttacagcccatggcagctgatagcatttctagtcgattttggtccagaattgaggcaaatataagtggggcaggaccttgaagaatgatataattagttagtcgagtgttttatgttgttagctaagcgctatgctaagtatttcatttattttatcttctttaatcctgttttaatccccattctacaaagaaggatcctgagacttggtgagatccatattgctggccagtgcagagctgggtccctccagtctctgcctttacctgccaacctgcatagcatcctggatattcttgcatagccacatagacatttgtttgtacttttagtatgtgttgggtacagtgcatgtttttagctattttctcaagtatctgggaagttttaactctgttttattgatgaggaaactgggtcttgaaatccaggcctatacctgtctgagtgtaaggcccaacaggagagtgggacagtgtgaagagcacaggatggagagccaaatagctcggattgtatactgcctctaccgtgaaccaacactgggattttgggcaagttgcttcaccctgctgtgcctcagtttcttcatctgtaatgaatccctacctcataggctgggggttaagcctgtgggttaagtaagttaatacatgtgaagtactcagcacagggcctggcttaggaatgggtgcctcataaatagtcaccatgtttatcaggccaccctgcctcacctaatttttagggagtgtgtaagagaaacagccagtcagaagctacacagccaagtccaggcatcaggctttcctcatctcttccagtgatgacccaccagcagtctgcaatgggacgtgctgggaagcaaacccaaacagcagctgcttccttgtgtggaggatttcctaaataccaggccttgcgtgcacattatctcgtctcatcctcacaacagaacagctcctcattttacacacaaagacactgaagccctgggaagttgtgacttgcttaaggccacactgtctgtttagaggcagagcagaggccaaatggtggtggctcagctccaaagcttgtgccatttctctggcatcacaccaactctccttgataatagggacagtagggactgcttccccaaaaggcgtggagctgtggtaaggagagtatctccactttatagaaaaggaaattgaggtgccaagatgctcagtaacttgctgagggtcatcagctcataagtgaggagtgaaactcaaggagaagtttgagaaagcatttccaatataaatattatttttctaaaaccatcgtaattgtaaagcttgacaaaatcctggctggtgggaatacacagaatatatactgaaaggaggcttgttcattgcattagtttttaaaaatgatccatagcgtgtgtgtgtgttttctcatctataaaatggagatacacccctctcagaggatggttgtggtgattcagcgaggtcgtggctgtgaaagcccctttagacaatacctgcacagagtcggtgtaaatgtcactcctgttttttctgctccccacccccttaactgatatcagctattttggcttaacagcttctttctcatcttaggcctgcctgaaaacgttatagttccctttctggcaggcggtggtttcaatgagtacgtatactttgaattattataaatagttgagggacaggctgcctaaagtctaattggagagttaacctaatgtctgtgaaactaatgaacaaaacgagatagtgtagatcaggaatgtccagtcttttggc

SEQ ID NO: 25973 - DNA, 2300 bp, Homo sapien
tctgcaaaatggaaatgataacaatagaactcacttcatagggtgcatgagttagtgtatctaaggctctttgcagagtgtctaggggcatagtaagtgctcagtaaacactagctgccaggtagtgttatgggaaaggatgccctcaagtcctctagaagagggatcagggaccctctggccgaacaaagagctttccctgatggcacaaaaatgaagagggggggtgacaatgagtttcaatgactccaataccagccagggaactggaccttgaggagctgatcgcctgcagatctttaagctggggttagtcgttgtcagtttccagggtagaaagaccttactggttgccaatcgtgaggtccagagtgagcctctagcttcttggacttcctggaaagttggggtgcatttcgagttgacacaatgatgaaaggggtaagtcctagggaccggggctggtcctgggtggccttgcaatagaaaggagagtctcacaccacaaagaaaggaccctcctcccatgcctcctgccagggcctattgtggctgcaaccatgctcctaataacctaacccaagccctaactcgtttgtcatataaacttaaaggatttcttgcacagtgttaataagacaccgaattttccaggaaagcaactattgtgtcaattgagggaagactggactttgtgctgttcataacctgattaagaggggttttgactaagcctgggcaccttctcaaggtctccttgagaaagggacacctgaactgagagctgaagaatgagcaggggccgacagaggaagaggaagggaagagtgtcccacggtggtgttggaaattaaagctcgaagtctcaaggaaaaccagcactgaaataaaagatttttcagcaaagccaatttacttctgcagaagggtgccactcacacatctggtcttcaggaaagcacaccgaacaaaagagagaaggggtttttatccctaatgcggttagtcgctgcttctgtgtcctgttcccattggctggggctggactgcgcaatctaagctaatcccgattggctagttcaaatggagcagaaatgtgggctacagtggtagggcaagcggtttcggcaggaagaagagtttccgcgggaatggcaattgtagcgagggtatccaagggaacagatgtgagttatagattaggacccgcgggaaggttgtttaccgtaactaggggtaaggaggtacaaagaacaaggaagttaggctttgaaaatagagaacaaagaacaagtaagctgaacaagtaagttcctctttggagaggcaagagggcaaagaagctgaggacccagaagacaggattgtgcctaagaaagtggccttggagcagaggcccaaagaaagcggggagagcgccttgcccatcggtaagggaaaggtgctccaggcacagaagcagctaatgcaacggccctgaggcaaatgcaagataactggcaagttccaggaacagcaaggagggcaaggcgcctggagcagaggaagctagcggatcccttgatgagagggaggaactggcccatctctcatgggtcctgcaggcaggccatgagactgtcttttatgcggggcgagataacgaggcatggacgtgttgtgagcggaggcctagcctgttcaaggtctgaatttttacccctagaatgtaagaagcatgggagcagggactttgttttgctccctgccatatccacagccctagaaaaacgtcgggccattgatagctctcagtaaatgcttgacaagtaagtgaatgaacgaatgcacaattaatgaaatgagggctgcgtcaatgaataactgggaatctgactcctgcagggagccttcagcccacaggtgtatgtaagacccgccccgcctctcatccttcgggctcccacccccgccgttaggctgcggttcgcgccgcggtcgccagagggcgcggagcggcggggcttcccgcacggagggctttgcgtgaggcaccgcgtggggcggggctgcgggcgggctcccagctgctgggccctcatcggctgggcctcgtcgaccggcaagcggaacgcggcagcggggctgggcctgtgcggcggccgccggagcgctttggaaggcgcacggggcgaagatggcggcggagcgacaggaggcgctgagggagttcgtggcggtgacgggcgccgaggaggaccgggcccgcttctttctcgagtcggccggctgggacttgcaggtagcgccgcgcggcgggc

SEQ ID NO: 25974 - DNA, 2300 bp, Homo sapien
ggtagaagaaggcagtgctgaggctgaggtagtagagaagggtgagtggtaccggcagcttccatgtataggggcctctggaaggtctgaatgtcagctgagaaatcaatcatttgctccacctagcagctcccctggccccctaagctatagagggtttagcgcttaggggactggagtagggggtcagaggagacaccagtcctgggtacacacagctcctgcccaaagtgaagtcaccaccagtgaggacacggcagagggggtgccaaaggaaggctggggtggggcgggaggtggtggaagataggattaaagggaggggctggggtgagactggagtgggaaggaagatggagatgagcccggagggggctgggggtgaaatggagtgaaagtgggctttggagggtggggtgcatttagtactgagggtggagttagaagggaaagtggggcggggtgggtcaggtgctggtggcggatctgtgaggtagaggtgaggctggaggtggtcgtggtggtagaatttggggatggggcttgggtgggatggggctggaggttgggggctggtgtggttggacataggagagtggagctaaagctgagcctgcagcacctccttctctagttttgttaaggacacttagataagtgttatgtaaatgtagtttcaagttcatgccctcacatcccctgccttaaactccagttgggtcatctggagctgcttccagaaaccagccataggaagtgaccagcacagtcctgcagtctaaggagagacagtgtggtgtagcggttagaagcagactcaggagctgtgccatacctggattcaaaactctttagaagtctaggtttccccatctgcaaaatggaaatgataacaatagaactcacttcatagggtgcatgagttagtgtatctaaggctctttgcagagtgtctaggggcatagtaagtgctcagtaaacactagctgccaggtagtgttatgggaaaggatgccctcaagtcctctagaagagggatcagggaccctctggccgaacaaagagctttccctgatggcacaaaaatgaagagggggggtgacaatgagtttcaatgactccaataccagccagggaactggaccttgaggagctgatcgcctgcagatctttaagctggggttagtcgttgtcagtttccagggtagaaagaccttactggttgccaatcgtgaggtccagagtgagcctctagcttcttggacttcctggaaagttggggtgcatttcgagttgacacaatgatgaaaggggtaagtcctagggaccggggctggtcctgggtggccttgcaatagaaaggagagtctcacaccacaaagaaaggaccctcctcccatgcctcctgccagggcctattgtggctgcaaccatgctcctaataacctaacccaagccctaactcgtttgtcatataaacttaaaggatttcttgcacagtgttaataagacaccgaattttccaggaaagcaactattgtgtcaattgagggaagactggactttgtgctgttcataacctgattaagaggggttttgactaagcctgggcaccttctcaaggtctccttgagaaagggacacctgaactgagagctgaagaatgagcaggggccgacagaggaagaggaagggaagagtgtcccacggtggtgttggaaattaaagctcgaagtctcaaggaaaaccagcactgaaataaaagatttttcagcaaagccaatttacttctgcagaagggtgccactcacacatctggtcttcaggaaagcacaccgaacaaaagagagaaggggtttttatccctaatgcggttagtcgctgcttctgtgtcctgttcccattggctggggctggactgcgcaatctaagctaatcccgattggctagttcaaatggagcagaaatgtgggctacagtggtagggcaagcggtttcggcaggaagaagagtttccgcgggaatggcaattgtagcgagggtatccaagggaacagatgtgagttatagattaggacccgcgggaaggttgtttaccgtaactaggggtaaggaggtacaaagaacaaggaagttaggctttgaaaatagagaacaaagaacaagtaagctgaacaagtaagttcctctttggagaggcaagagggcaaagaagctgaggacccagaagacaggattgtgcctaagaaagtggccttggagcagaggcccaaagaaagcggggagagcgccttgcccat

SEQ ID NO: 25975 - DNA, 2300 bp, Homo sapien
gggtggggtgggaatggagtttagggattcctacagcataagggatcatggcctgtcttcccagggtgttcatagtccacgacatcacaaagaaaccatattcaacctggcttctgagcactagatcagaaacagtaaaggaaatgaatgtcttcaaaaactggtgactgtggttaaccctaaggaaagtaatgtctgggagccctataaatgagacactgagacctctgaattttgtacctgtagatgcccatggcagataaatcacaaaaatatccacaattctataccccctctttgtatccacaccttttgcaattaggctttgcagttccctaacaagaggcaaagtctattttccattccttgaatcttgtctggtcttgtaacttgatgtggccaaaagaatatggcagaagtttccttgtaccttgcactgtctctcaaaactgcccctttcatgagaacaagactaagttagtgtcctggaagatgagagaccacatagaggacagctgaggtacctgggttaacaatcagtcaaccgcagtaacaaagccacctagccaacctgcagctgacctcaagtgcatgaacattcccagccaaaatctgctgagatgagaagaccgaaccaccaaatggagccctgactgaattgtcaacccacaaaatagtaaattaactgaacatttagtttttaagcttctaaattttggggtgctttgttatgcagcaatagctaaccaatacaatgccttgcctattaaaataaaattatttgtaagtaaaactttagaaaaaaacaatagctgagaaagaaatctgcatagatgagcaggtgattcagaaattcccgtgtaagaatgacatggaaagtactgagggtctggtggaatcatctaggcttgtggccctttcaaagaagtttcactatatagatctcattgacaggagaacaagtagagggagtaatggaattgagcaggggtatcaatgcaaggcctcaaaagtctagaaaagaccagtcacagacccagtgcaaagtccttggggaccaggccagactaacctcctcatagtagacaccagacctctgggacccaggggacatactcagatccaaggcctgccaccctgttgctggagaatcttcagcttcctctgcacccagaaccttctgaagcatgagggaggaagtgaaataatgaaaggctgagttgttcttgtacttttccctgagttaattaaaagactgagttaacctaaaagacaatggtgaaagcctatagagtgcttactccaccccacacatgctaccacatttttattcctgttttacagatgaggaaaccgaggcataaagtggtcaaatgattgtcctaaggtcacacagccagactgagtaaagccaagatttgaacccagacagtgtggctaaagagattgcctggattgcatgaattggcaagattaagcttttccttcttgatagccagcaccaggaggctcctgaggaagttcagatcacttacaggaaacaaagatgccacaaacgcaaatgtttgcacaatctgagtatgtttcacttggaccccaggaaacagaggctgagagagttacacatgattatacttttaggaattaggcctgtaccctccctgcagtgctaaaaggaggcccccatggggcttgctttataataaatccttcttcttaagcaatgtcacctcctctactttctgcacatcatgaataataatggttaatatgtttagcatttacattgttctgtgccctcacattatttctcataatcttaccaaaactgttctgaggagggaactgccgttgttcctacgctgcagatgaagaaacaaaaggctcagaaatgggaagtgactttgaaatcttgcacagccaagaagaggaagatccaatgtttgctccaaattccacccgattctggagtgcgtcctatgacctcagtgcccacctccctcccgggcacctaggatggagcctatggcaaggttttagcacagtgactacaggaatcacagcccagacacaaaagcaggaaaccctttgaccgggctccttcctattgcaccaacagccttgtgttgctgcaatgaaaacacttccccaagcagctgtggccaagagacgcagaaactgccttgtccacgggccccgcctcagactccaacactcacaagagagcagaggagccccaagtcttggggaccacagaagatgccatgtgctccacgatgtcggcccccacctgcctggcc

SEQ ID NO: 25976 - DNA, 2300 bp, Homo sapien
ccagaatccaacccctaaacttttgctaataaaactactgccttgaagccagcacatggagctagatttgaggtagacttctgtcttcctgttagtcaacttgcaataaaaagcttttcttttctcaaaagcctggtgtcacagtattggcttctagcacatcaggcagcaaccccctttcacttggtaacaagtggataagtgagggtatagaacatgagtcccttcctggtttgacaaactgcttagatgatggtaccatatacaaaacaggcatggtgtgggagaagataaggtttgtgagtgcagatctgaaactcaaacttgaatatttaaggtatacaaagaggccaggctcagtggctcacacctgaaatcccagcactttgggaggctgaggcaggtggatcatctgaggtcagaagttcgagaccagcctaaccaatatggtgaaaccctgtctctattaaaaatacaaaaattagccaggcgtggtggtgggcgcctgtagtctcagctactcgggaggctgaggcaggagaatcacttgaactcgggaggcagaggttgcagtgagccgaggtcataccattgcactccagcctgggcaacaagagcgaaactctgtctcgaaaaaaaaaatacatatatatatatatatacaaatgaagatgtcaagaaggttgcagaatatacaggtctgtatcatgggcccaagattactcagctcttaggaggtgcgttcaggattctagcctagattatatctgattccaaagctggcactcttggatactgacccgtgagtactgactctccaaggaacttagagtctaatgaaaggtgagaagattcctcagagtaggggaaggggaggatgatggaggctggaggaatgttcctgtctagttccaagcaggggccatggataggaattcctttgtggaattcatcatttcagaacaacgggataggatgatgacatcacaaggggatggggactcttgtcgtctcagagagaacgtgccagcctggctctgctttcttttcctagagggtctaacacctctcccggccctgacatctagctggttcctgaggaggaggcagaagtcatgaggaggcaatggggaaacagccatggcagccagtgcctgcctgtggatgcttggacattaaagggtcaccagctgagtgtgggctgagtgtccctgaacacaacatttgtgcttaggaagaacccattccagagctgagagagaaggatgccaacatgctgcttcctccctctttctgggggcatttcttctgcccctccaatcccatctctgagagctggtcccaggtccagcccaagcaggagaggcagccctcaccttcccaggtgtttgtaggcatgttactctccctcctagagagtgttccccgcagctccgccttccctgcaggcctcctccatcctctaaagcacaaatcatcaccacctgcacaactcgaatgtctttctcagccatgcctgattcctctgcaggaaggaaaaaggaagcagttcctggtagtgtatggagggacccacagaaaagccaagagcccacagcagatattgcttgttttttacctctaactactctggagtgcaagaaagggcatccattgtaaagtccaactcttaccaagtgggtgaggctatagacatcttgtctctttcttcagctgtgcagctcagacaggcccagatgttgagctcatgcaggagctagacccatacctgcgcatcatgtggatgaggcctttgtctagcctatgtgtctgaggctcctagataggcaaaggccatgaagttggggagaacctgtgagatgggatgaaactcaggaaggagtataaggctgtgggtgtcaagccccccagccccagcaaagctaaatacttccagcagcaacttcctagcttgaagcaaccttgtctgttcaattttataatcacaaaggaaaaagtgtcccagtcccctggcctttcctctcatcacaatccccttcctctgacatcacagaggcaagaactgtcttctctgctcggagcactgagtcgagggcatctccaggacaggcattcaggcagagcaagctccaggtttcaccacaatgcccatccctgcctccccactccacccacctctgccttccttactgctgtatctgctgcttgaactggcaggtgagtggggcctcagtgtatgtgtgtggtgggttctcccctctgcctgtttagtgaactctccctcacctgttcccatagaa

SEQ ID NO: 25977 - DNA, 2300 bp, Homo sapien
gaggacctgactatgagtgagtgaataatgtcctgagcccaagtcttcacaggaacaagttgttcccatgaattgtgtaatggatgctgagaggcacctggctgtggagatggtcctcagcatcagctctatttgcgattgtctcagctgaagggagtgcccttgcttaggtcgtatctggtaacaaaccacatctcattggactcatcaacctagtcgtataaaggcccagctctcttatcctaactcagagcaactctggaggaatatcctagtaccaggctccatgcaaggtcagctgaggtcttcaatgggacttcattgcagcccagcttcttcttctacccagtcctgcttccatcttctcccgtccacaagtgttgatcctaaaagtactccctgaaagataacctgcttgttcatcttcaccccagagtctgtctcccagggaacccaacctgggacagtgaagctatgctacgtatcagaaaggtggggatcccttcatctctaagggagcaagtcagtcacagaagaaagccttgtttatagtacctccagattaatgagaatccacaaaaatgtttattcaagagagggacataattaaatctatgttgtaaaaagaccagtctggctgaagaaggagaaagagattatagggggcaaataaaaatgggggtaccctagtgagaaggcaattgttcttattcaggcaagagatgatgatagagatggagaaagagattaattcagaagggatttaggaggtaaatccaatagggcctggtaggggcaagataggagtgtgaaactatgcccccaaagagttaaagaaaccagtcactaagaaattcttgagtttacaggatagcagataagaaaaaaaaaaaattgctaaactgccgaaacttcctccacttgtaggataacaaaactgactaaaatctgttggaaccaatatggccaactggagtttgctcagaatgagcttgctgatgtcacagcctgagtttctaccacgtatttcatgatgacgccccagggttttgcacatgggagccgtgaagaggcatagagagataactgtacatgcccaaggactttccagacctcccctttcctttcacaaatcacatactaatcccagaatccaacccctaaacttttgctaataaaactactgccttgaagccagcacatggagctagatttgaggtagacttctgtcttcctgttagtcaacttgcaataaaaagcttttcttttctcaaaagcctggtgtcacagtattggcttctagcacatcaggcagcaaccccctttcacttggtaacaagtggataagtgagggtatagaacatgagtcccttcctggtttgacaaactgcttagatgatggtaccatatacaaaacaggcatggtgtgggagaagataaggtttgtgagtgcagatctgaaactcaaacttgaatatttaaggtatacaaagaggccaggctcagtggctcacacctgaaatcccagcactttgggaggctgaggcaggtggatcatctgaggtcagaagttcgagaccagcctaaccaatatggtgaaaccctgtctctattaaaaatacaaaaattagccaggcgtggtggtgggcgcctgtagtctcagctactcgggaggctgaggcaggagaatcacttgaactcgggaggcagaggttgcagtgagccgaggtcataccattgcactccagcctgggcaacaagagcgaaactctgtctcgaaaaaaaaaatacatatatatatatatatacaaatgaagatgtcaagaaggttgcagaatatacaggtctgtatcatgggcccaagattactcagctcttaggaggtgcgttcaggattctagcctagattatatctgattccaaagctggcactcttggatactgacccgtgagtactgactctccaaggaacttagagtctaatgaaaggtgagaagattcctcagagtaggggaaggggaggatgatggaggctggaggaatgttcctgtctagttccaagcaggggccatggataggaattcctttgtggaattcatcatttcagaacaacgggataggatgatgacatcacaaggggatggggactcttgtcgtctcagagagaacgtgccagcctggctctgctttcttttcctagagggtctaacacctctcccggccctgacatctagctggttcctgaggaggaggcagaagtcatgaggaggcaatggggaaacagccatggcagccagtgc

SEQ ID NO: 25978 - DNA, 2300 bp, Homo sapien
ggctatttattaagcacctactacatgccaggctatgcccttgcacttaccctcactcatcttcccagggtggggtttctatctacttttggcccttggccaccaaggatcctctcagagtctcgccctacacaagggctcacatgaggaccccctctgacaaatagagggaggattgaagtgttgagaggtacagagagagcagccagcatcaggctgccaagaagccctcaaaaaatcggaactgaagacagcctctcagccttctagggacacccatgctgctggtgtctcaaagacttgacatcttcaagtgacaccctccttactgtgctctcacattatttcacgcatatcagggagcaagttaatattggcaaagtcaaacgtataatatgtgctttctaagaggacggcagaaggttcaaggtaacaattagcaatttgcagacacccttaaaattcatctacatggagaaactgcactcgttgttctgattctccaatgtgtttgctttcaaggcccagaataggtttctgtctgttggtgtggcctgggtctttgtctcttgtaattaattaacgatgaaaaagctaaccacctttggctttcttagtactcagtgatccttgtttttcacccaaacctgtcctaactgaagattcagattcccaaaaatttcctcttttcaaatttaggacttccagcagattagaacaactaacaacaacagcaaaatgattgttaggaaggccaaaggaaatagcatttatctgaaagataaagaggtgcaatttgggtacactgagtcagtgaaaccctgaatagtgtcccgtatggcaatacaggaccggttttttataggggattttcactaaaggttgtttttggaaacagttcattagctggttgaaaatcctcaactgcaaacccactctcattggttatttcattaaagtactccaggtgaaagagatcaaaatcccacggaccctggcttcagttgttatccaggtctatctactgcaacatcctgtggcttgacctctagcaggtgtgattccaatgctcttacaaactcttggctctacgttaaagctttatccttaattaatgccttttatttgacagaacgaaatatttgtgaaaagaaaaatacggaatgtttcatatttttataatacctaaagagagacctctgtgtatctgtaaagtctgggttaaagatagatctgtgttttttcggggaagcatcttctgtgtttgatccagagcaaaactgcttccattgccccattgaatcctggcgacatcccaggaagtagaaacgccgtcctccgtcctcctgttttgcggatgaggagctgggggtgtcagcccacccctgtcctgggctgagcagcctggttgcagctctcacggtggtgccactttgccattgatccctgtattggcttctataaatgccctctctgaggttagtgagccttccgggggaggacagctaggaccagttaataacatggagggagaccaatcagtaattttgttcctatgcccagattggtggaagtctccctgtgtggagaggactttgaactcaggcctggacttccctctgggccctgcccctacactgtctcacctcacatgggtcctcacctctcccaacctttgcatcctgctctgtaaaatgacaataaggacaccaccctcattaatctttccacattattggaaggataaaaaataatgtctcagaaggttcttaacatctcacacacttatcgttagtgattgtcatctgagtcatgtctcctgattatcgatggtccttttgtagccaaaccctctgcccccgtggtatcgggccctgcggcgagggccacacctcagcacacagtgagcttcacctgcgagtcccacggcttctcacccagagacatcaccctgaaatggttcaaaaatgggaatgagctctcagacttccagaccaacgtggaccccgcaggagacagtgtgtcctacagcatccacagcacagccaaggtggtgctgacccgcgaggacgttcactctcaagtcatctgcgaggtggcccacgtcaccttgcagggggaccctcttcgtgggactgccaacttgtctgagaccatccgaggtagaggaccctcacccagcccaagcccacacctgaccaccaagcccaccccccaccaccctccactcatccagctctactcttgctccagggcttgaaatgcctggaacctaaattcctaactgcccacctcccatg

SEQ ID NO: 25979 - DNA, 2300 bp, Homo sapien
gtaatctttacaggaataatgccctgagtgatcatgggctgtcagcactttatggaacatggcacctatcccaaccttgctgtggaggctgcgcctaattgacgttatggcttcttctctgcttccttcctgagagatatctctcccttcttatgagaggtgtcatagtgaaggccatggagtgtgacaacctgtgttctagttctaaaagctgggtgatgttgaacaaatgtattattgcctgcgtgcctcaagtttcctcacctataaaaaaaggttaatggtagtgctaatttcatgggaccagagtgatgaattaatgaggtaactgacaaaatgcttggcacagtacctggagcacaggacatctgcagtaaacacagcagctactacccttcatgtcatatagagactagtttcttgttttaaagtgtaatttggcatcgattaacatgattttatcatttttatattcatttctgtgagtgtggagcaggaggtgatgatttcaccctctgtgcatctgccacattgaaaaagaaatttgcatggaaatgtgatgacttttacaatttcatttgacaattactcatgataggtgaaggattgcaagcccagcatgggaaagagaggtttccagacaggtctttcttagtcacagatgatggaggagaaaccatttctcctaccaaggaaatttttctaaagcacaagtatgtcagggaagcagtgaactcaccctgtacacaaatgtaattatagccacaattttttggttataattaaatatgaatcaaaccttctgtatggcttatattactcttaccatatcactacaaggtgcatgttataacttccatttacatgtaattaagttaaggcttagagaagtcaagtgtcttgttgaaagtcacacagctggagattgtaagaaaaggaattcatctacagattgacaaaaagcagggtgaagaggatccagagggagaaattgatctcagagtgtcagaggtagaccaagtacaccataaaagctgggttccagaagtccggggaacatgggagaaggccactggtgggaaactcagcatgcagtagaaatccatttaaaagcaatatttgagttccctctcttcacctggcaccatgagtatcaataataacctactgaatctcagggatgtatagtcattatctcttttgatgttcactaaaacatggcagtgagacttattatcccaaggttagaaggcaaaactgaacctaggcaggcccagtaacttccccaactccttagcacatcttcttagggtatttattctccctccctcctcagttcccatctgaagacagtgatgaatggaataggtgttctatgtgcagagcaaagagtattgaaatcgatgtgactgctccaggaatctgccctccatattctcccccataataaacatatcccctttccataacccataatccccacctcacctcacaaagcagatccttattaccctaagcccacttcctctcctggaagaagtcaggaaataattccttctgctgggtgcaggcatatgaaagtgctaacggccacatgagactgaatttgggctaagttttgccatttatatttataaaagttcggaatagggaaccatttcaagagcagacctgttcctctccaacactgagcaggtccagtgatccctcatcctgccccaactgagtagcacttggttgaggctgttgtagaatgagaccacaagccaaccacatcctgaggtcttgagatggaaagtttaggaaacatttcataaccacaggtccttcctggcttaagagcaccaaatggcaaatcaccaagaagacataaagatggggttaggagtcatggaaggagttaagacctcaggtgggaaggaagcattatttctgctaagcctgtctgattctcctgaaatggggcatgcataactgcttgcattgtagctgcttgctgttcctgatttctgtttcacaatccagaagcaggttactgcttcactccatcgcagccacttcctcttgaactaagggaggcagggcttgtcttctctcctcagagcagagtctgcgatcttcccagcacagacgtttggacagagcaggctcctaaggtctccagaatgcccgtgccagcctcctggccccaccttcctagtcctttcctgctgatgacgctactgctggggagactcacaggtgagcactgccttcggttaaaatcttttttcctgcccactgagccatggcctgtccct

SEQ ID NO: 25980 - DNA, 2300 bp, Homo sapien
tgggggtgattataccacagaaattgtcaagtacaacaaatcagctttttttttcctttaagagagtccatttttaaacacttaccatctcacgagtggacataagtattttgaaggcagaattgaatatggggtgtaaagagacatcagggaggattcgggagtcaaggaggcttttggactgcggcagcatttccgccatgagcagcagggcggggaagcctgcaggatgctagaactagtgttcccatcacagagagagcagggagagcttctttgtttctgagtgtgaggagtaggacccttagacaaagaggaaggataatctttttattttcttaaaaccactttgggagtgcatttgtattcaagaggcaatagagaacctcaacaaggctggggagttgggataggcaggaatctggaaggcaggataactcttgagaacctggagagcgtctgtggtttacggtcagtctcaaggcgatggatgggagtcctggtgtgtttagatttggcatgtttctcgccttctagggaggtgccgttaagtcagtgcccagagcccaatcccatggcacctgctcaggaccatgaatgaagaccttgctctggggcatccaggtctgtgtgaaggagcaacaggagcctgtgggcaggcagatgtcttgggaggggagatgtttggagccaagtctagagaagcttctcactggctcattctctcaagctgagcctctcaggaaaggaaggaggcagcagagatgagggtcccacgtggcaggggaggaaggaaggagctgtaggaaaacacatccacacttagtcatctgctcatctttcaagacatgtttcctgagagtctgttatgttctcggggctggtctcctgggatacctgtcactggtggacaggcagtcctgatagaactctgcctgctcagccatcctgccaagtcctgatgccctttccaatattccttccactcagacacacagagggtcagagcacaaacagccttcagggcttcccatttgggtttctcaacattagtttacaatgtggatttctctgaccccatggagtcccagcattcaaataatctacagatagcctgcaagggaccacccactcatcactgcctccatgaaactcctagggcactgtggacatctttgaacacatttcaagcatcccacattgtacaccacccacataatttctgtgggttgggagccttttaaagggttccccaagacttccgagggtgcggagggagcttaactccacggaccctggtgctgcatggcatgtgggctgggccttcctgttggccttgcccttctgagacagcccttggtctgtcctcccttccttgtacttacagtcaggtcttctgcttccaggggacgtagatggggcccaggaggacagctatgaggagcagcgcagtaagggatgatgccgggcctggaaatcagggaagacgaggggctatgagagagaccacttgggaggccattgtaggggcctccacttaccccatctgaggctgcctgggcccatctatgccccacctttgaacctgcatcctgcccaggctatcttcactccagcacaaggcagaagccacagaaagaggctccccattctcactcatcctgtcccaggttgccagcttattctcctggagggaagaggtggagggggtgtgtactcaggtattcatacatgtggcaacggggttcctcacttgaccctcacaagcctatgggagcagggattgtcattccattctgctagggaaactgaggcccatggattttagggagggtcacaaggttacttgcattcaaacctaaagaagctcatcactagtgttccttaggttgatccctgagaccatgtcctttggaacaaaacaagtccaaattcctagggacattttaatgactataaaagggtaggcaggtggcttgaggatggcttcacaatgagagttgcaggttccctgcttagccccagaagtaaggggaggactccgtgttctcagaacttggaggagccatggaacactggacataatgaaaccttccggctagaaaacatcctggtgagtcacggaaatgggtctcatgcttgggagggcctcagatgtcacctaggccacctccaccccagtgcaggtgtcatctgaaatctttctgttagttgggcacactcagttacggggaagcacatgtttggacgctgcatttttaacatgagcagttcaggcttttaaaatcaacatttttaac

SEQ ID NO: 25981 - DNA, 2300 bp, Homo sapien
cttatccttgtcatctaatgtccactgaagcctccaagcctcagaaatctactgagcaataactttacaatttttgaacgttcaccatgtggcagacactgttgaaaatgccttacctcttttacttcatgtgatcattatatacaaggtagatattcttgtcacctttcctaacagataagaaaacagaagcacaaagtgctccaggctcactcattggtaactggtagagctacgatttgaactcaggcactctgactctagaggtcacaggtttcaccattactcaaacacttccggtcttgattctattccatgagatttctgcagctgctgctcttgggtgtggagtgggcaatgtggtgtgaagggagattgtggttttcttctctgggctcttctactttctgtatgtttgcaaactgattttttttcactaagtcctctacatgggaaactcattttctgtcaaattccacaggagcaaaccacctaaaatagaagatttcagtcttcgagggaaatgtcccactgagcaattcaaacattacacacatatctattggatacctactatgtgccaggatctgacataaaaacatggggtactttggtagaataaaagagaaaaagtaattgcccttttgttgcttacatccactgcagagaaagacagtaatcaatacacatgataaataggtgaatgaaaaaattaatttttgacaatgataagtgcaataaaaataaagtatgagtaggtgaatgttatcatcttgtgaaagtattcatatatcctttttattgttttcatcgtaaatagatgtacaaatttaccagatgcttttctgcatcaaaatagatgatcatgtgttttttctatttattctataaataaatatttgtagaataccatattgtttgtctgtcatttgtatattgaaacatactcatattccaggaataaataccacttgttcatggtttataatccttcttacatgctgttcaattcagttagctagtatttggttgaggattgttgcatcaacaaatccagtagtaataaggccactgtcaacagaaaggtgtgcagctgcacctgacaaattttaattttgtgtttcagtagaagtttaagttccagtgggacccatttcagatgagcagggactggcctgtgagacaaccagtggttaatgcttgcaacaggaaatattccccctagatctggaccacaagccagtagattctagtagataaccagtcattttttgttagaatgaagtaaagaacaaggcagagaggggcttttttgttttgttttattttttgttttgcgttagaagccctggggaagtttatgaccatcaggagtggtctagaaattccaagaggaatgaaaatcattgccaaagtctctagagagaagaggtatttttgtttgtttgaaagcactaaaaggagtgcctgttgattttaatttgcaagtaaaatttgtaaatgtagaatacattgccactggcacctcaaaacaactcagagatgctggattatgtgatattattataagtatcacatgagtcttctttgaagaggttgctataacatcctgtgctcttgaagaaaggcagctgtcattattgatattggaataggatacacattttaggatagagagtcttggcagcactccaaaaggcaacacatagctgtgcatagcacaacacaagaaaggcatcagggcaaaaaaaaaaccttctcaaattgtggagccaatcagtagcaaatccgtaagccatgaacagtcaaagtgcatctcctaggaatttgctaccccggtttagaataatcccctcctcattgccattagtgttgaaaatggtagagtaagtcctgcaggttgtgtcttaaaggatcactctaacctggtcatgagaatttcatctggagaggcatagctgggtagggcatgccacacaggaagccatatgggaggagctcccagggagtaggctcaaccaagcagatggggaagcaagagagatgagagatgagaagccattgcctttaatgggagtcagggtggaggacaccaagaaaaagcatgatgggttttactagaacgtttcagtgtcactaagtcacagaagaggaggacaagaagaggaattatggcagggaccagctttatcacagtggtgtacctggtttggcagggtgctcacaacttgtttgtgggatgtggaggtatcaggtaaatatgattttttaaaaaaaatttacatataactggacatctt

SEQ ID NO: 25982 - DNA, 2300 bp, Homo sapien
ctcgtggagcatggcacctgccccagcctcactatgagggctgctcctaattgaggctatagcttcttctctgctttcttcctgagggatgtctctcccttcctgcaagaggtatcatagtacaaccattaaaagtgaaggctgtggagtgtggcagcctatgttccagttctaaaagccgggtgatcttgagcaaattcattactctccatgtgcctcgggttttctcacctgtgaaaggaggttaatggttgagcttacctcatggggtcagagcaatgatttaatgacattaccaatagaaaaatgcttggcaccatatctggagcacaggaaactctcaataaatgatagctgttataattccttcatgtcatatagaagccaattgcttgtattcaagtgtaattagacattgattcatatattcttttcattttgtgttttcactactgtgggtgtggagaaggaggggaagatttcaccctgtgtacatctgccacattaaaacaggactttcaattaaaacatgataacatttacaatttgatttgacaattattcatgacagattaagaacctaaaacccacatgtgagatgaaggattctggacaggtctttcttagtcatagatgctggaagagaaatcatttcttttaacaaggtggcttttctaaggcacaacggtggcagagaaccagtggactcttcctgtacacagaaaataattatagccatgtttttttgcttataattaattatgagtcaagcattcagtatggcttatattattcctaccatagctctacaaggtgcatattctaacatttatttacatacaatcaaaccaaggctcagagaagtagtgtctttttgaaaatcacacagctggaaattgtaagaggaggaattaatctatggttgaacaaggagcgggatttagagaatccagagggagaaactgatttcagggtggcagcgagagtccaaatacactatataagctgggtctcaggaggcctgggttgctgggagaaagccactggtgggcaactcagcatgcaggagggatccattcaaaagcaacatttgagttcccgcacttcacctggcaccgtgagtatcaataatgacctactgggtttcaggcatgatatgctcattacctctttaatcgtcactaaaacactgcacaaaaagacttactattcccagtttaggagattgaaactgagcataggagggcccagcgacttccccaactccttggcacacactcttggcaggagcatggatttttcctctttcctcatttcccatccgaactcagtgatgaatgaaataggtgctctgtgtgtagaagaaagggtattgaaattgatgcgacggccccaggaacctgcccaccataatcttccctcatgataaccctatcccctttccataacccacaatccccacctcactccacaaagcagttgcttattacctcaaacccagtttctctcctggaaggagtcaagaaataattccttctgctgggtgcaggcacatgaaagtgctaaggtccacaagagactgaatttgggctaagtgttgccaattatagcaatttggaatagaaaatcatttcaggagaagatctggttcctctccagtgttgagcaggtcctgtgaactcttctcctacgtccagcggagtggcatttggttgaggctggtgcagaacaagaccacaagccaaccacatcctagggtcttgaaataaagactttagaaaacaatacctaacaacagatctttcttgacttaaaagcctcaaatggcaaatcaccaagaagacctgaaaatgggtttggggacacgaggagggagcacaggtcccaggcaggcaggaagcattatttctgctaaccctgtctgattatcctgaaaatggagcacgattaactccttgctttgtagctgcctactgtgcctgatttgtaagtcacaatctagaagcaggttactgttgcattccatcatagccacttcctcttgaattgagggaggcagggcttgtcttctgtcttcagagcagggcctgacatctccccagaacagacgtttgaacagagcaggcttctgaggtctccaaaatgcctgtcccagcctcctggccccatcctcctggtcctttcctgcttctgactctactgctgggacttacaggtgagcattgcattgggctagaaccctttctccctgcttcctggacctagccttgcccctggacttgcagcaatttcagataagc

SEQ ID NO: 25983 - DNA, 2300 bp, Homo sapien
gaagccctgctgagcgcctttgccaaaggtgctatatataaatagcaggtggttcaattattatccttccctaatctccagtttcctaatcccccagcaggtttgtgagtgtgtatgtgtcttgaggaacagtgaacagcagagccttctggaagtccagggcaggaggctgcctcttctctgacttcatcagcagcccccatctccactcccaccccagatggagtctggtgacagattttcccaggagcctccctggttaccttcatggtctagacccgatgtggcctgaagagttggagaccttccctgcacccacctcagataccaggataaccccagaacaatctttctcattggtgcccaattccacgctcctctctctccagtccaccctccgcttgcagactggccttttagacacataaatcagacatggccctcccgtgctgaaaaccctctaggggtctcccaactgcagaataaacgcaggctctttacccaggtcttggagaccatcccaccctccccagtcctgcatactgcgctttctctcctccggcctagccacctggggccttcccctccttgtgctgggccctcttcctggaacacctttctccccaaatcttcgccttgctgaccctacttgtgattcagcaacccatgtctcagggaggtcttactggcccccttatctaaatacgctcacccctctccttctctaagttcaatcttccgttcttcattaattatttctacttgtccacttacctgtctcccctagtagaatataaattcctcatggacagggacctcgtgctctcccacacccagagaaatgaaaattcccttgcacttcaaatgctgcccagaaccctgtgggttctcaaggactgttgtcaaacacttcacttatttatcaaatgcttatgttgcacttggtatgtgctaggctctttttaacatgtcttacaaatattaactcatcaaatcctcacaattgagactcacgctggcctcgtctcagatgaagaagctgaggcacagaagaggtaaggcactttccagtccacccagctcataacagtagccgggggatttgaacccacggagttcagcccatgttctcaagtgtggcaccttccctgcccccctgcacaacagcagggccatgccttcaccaggaggctcggggcaggaggggaggcagtggtgttactttgcacaggtctttaacctgggaatcaggaattcaaatcttgtttctaccccaagctttgctgtgtggccttaagcaaacctattccctctccgggcctcaactttctgtccatttacagggttgggccttctctcaccttgtgtcattcctgtcctcttaaccgccactgtgtgaaccaaaattctctcccattagcagcggggtcttgaacttgtgttcctcccacagtgcggagccttctgccaggtgaccacgacactggcactccccatcactgacctggctactacaggaacggcgttccctccgggaaaaccggggttctgtcctctccaactccaggcctctggccccggctccccttcccctcatcttcctcagggcttgtccttctcccggaacccaggccttcagggccccgctctcccacacacgccccggcctgggcctcccacccgcccagtccgccctccaccaccgagacacctggccagggggcctccacctccctgggaaggccccgacccttcccctctggttgcgcgccacagcccccttctcgctccctctcctccccgcgcctcttttccaggcggcaccgaagtccttcctacacacacgctatttttgtaccatcatctcttcttcctctccccttccccctgcgttcacttacttccttcttttccttcacctcggcccggctctgaaaggatcgggcccctccggcccgcacccacccccaagaggggccttcagctttggggctcagaggcacgacctcctggggagggttaaaaggcagacgcccccccgccccccgcgcccccgcgccccgactccttcgccgcctccagcctctcgccagtgggaagcggggagcagccgcgcggccggagtccggaggcgaggggaggtcggccgcaacttccccggtccaccttaagaggacgatgtagccagctcgcagcgctgaccttagaaaaacaagtttgcgcaaagtggagcggggacccggcctctgggcagccccggcggcgcttccagtgccttccagccctcgcgggcggcgcag

SEQ ID NO: 25984 - DNA, 2300 bp, Homo sapien
taggggtctcccaactgcagaataaacgcaggctctttacccaggtcttggagaccatcccaccctccccagtcctgcatactgcgctttctctcctccggcctagccacctggggccttcccctccttgtgctgggccctcttcctggaacacctttctccccaaatcttcgccttgctgaccctacttgtgattcagcaacccatgtctcagggaggtcttactggcccccttatctaaatacgctcacccctctccttctctaagttcaatcttccgttcttcattaattatttctacttgtccacttacctgtctcccctagtagaatataaattcctcatggacagggacctcgtgctctcccacacccagagaaatgaaaattcccttgcacttcaaatgctgcccagaaccctgtgggttctcaaggactgttgtcaaacacttcacttatttatcaaatgcttatgttgcacttggtatgtgctaggctctttttaacatgtcttacaaatattaactcatcaaatcctcacaattgagactcacgctggcctcgtctcagatgaagaagctgaggcacagaagaggtaaggcactttccagtccacccagctcataacagtagccgggggatttgaacccacggagttcagcccatgttctcaagtgtggcaccttccctgcccccctgcacaacagcagggccatgccttcaccaggaggctcggggcaggaggggaggcagtggtgttactttgcacaggtctttaacctgggaatcaggaattcaaatcttgtttctaccccaagctttgctgtgtggccttaagcaaacctattccctctccgggcctcaactttctgtccatttacagggttgggccttctctcaccttgtgtcattcctgtcctcttaaccgccactgtgtgaaccaaaattctctcccattagcagcggggtcttgaacttgtgttcctcccacagtgcggagccttctgccaggtgaccacgacactggcactccccatcactgacctggctactacaggaacggcgttccctccgggaaaaccggggttctgtcctctccaactccaggcctctggccccggctccccttcccctcatcttcctcagggcttgtccttctcccggaacccaggccttcagggccccgctctcccacacacgccccggcctgggcctcccacccgcccagtccgccctccaccaccgagacacctggccagggggcctccacctccctgggaaggccccgacccttcccctctggttgcgcgccacagcccccttctcgctccctctcctccccgcgcctcttttccaggcggcaccgaagtccttcctacacacacgctatttttgtaccatcatctcttcttcctctccccttccccctgcgttcacttacttccttcttttccttcacctcggcccggctctgaaaggatcgggcccctccggcccgcacccacccccaagaggggccttcagctttggggctcagaggcacgacctcctggggagggttaaaaggcagacgcccccccgccccccgcgcccccgcgccccgactccttcgccgcctccagcctctcgccagtgggaagcggggagcagccgcgcggccggagtccggaggcgaggggaggtcggccgcaacttccccggtccaccttaagaggacgatgtagccagctcgcagcgctgaccttagaaaaacaagtttgcgcaaagtggagcggggacccggcctctgggcagccccggcggcgcttccagtgccttccagccctcgcgggcggcgcaggtccgggcccggcagggacggggaggggcagagcgggaccggtcggggctggggaccagccgcgcgggcttctgaacgggcacgctgtcggagccggaggctcgtctagtcccgagccccagcgggccgcggcggctcgcggggccgccttcccgggacagcagccggggcccgggcgccggcgcgggggaggacgctgccctccccggccgggcgcgcagctcgcagccctcgctccctcccccggggcgcgcaggcgggcgctcgctcgcagagaaggtgccggcggggccggagccccgaagcctccccgggcggcgggaagacgggaggaggggaaagggaaggagggagggggtcgggctgccgggagggcgggggcagcggccgggactgcgggccgggagcgagcccagccgcccgcgccgtgtggagcccgggcggggcaggtgggcagcggc

SEQ ID NO: 25985 - DNA, 2300 bp, Homo sapien
ccaaatcttcgccttgctgaccctacttgtgattcagcaacccatgtctcagggaggtcttactggcccccttatctaaatacgctcacccctctccttctctaagttcaatcttccgttcttcattaattatttctacttgtccacttacctgtctcccctagtagaatataaattcctcatggacagggacctcgtgctctcccacacccagagaaatgaaaattcccttgcacttcaaatgctgcccagaaccctgtgggttctcaaggactgttgtcaaacacttcacttatttatcaaatgcttatgttgcacttggtatgtgctaggctctttttaacatgtcttacaaatattaactcatcaaatcctcacaattgagactcacgctggcctcgtctcagatgaagaagctgaggcacagaagaggtaaggcactttccagtccacccagctcataacagtagccgggggatttgaacccacggagttcagcccatgttctcaagtgtggcaccttccctgcccccctgcacaacagcagggccatgccttcaccaggaggctcggggcaggaggggaggcagtggtgttactttgcacaggtctttaacctgggaatcaggaattcaaatcttgtttctaccccaagctttgctgtgtggccttaagcaaacctattccctctccgggcctcaactttctgtccatttacagggttgggccttctctcaccttgtgtcattcctgtcctcttaaccgccactgtgtgaaccaaaattctctcccattagcagcggggtcttgaacttgtgttcctcccacagtgcggagccttctgccaggtgaccacgacactggcactccccatcactgacctggctactacaggaacggcgttccctccgggaaaaccggggttctgtcctctccaactccaggcctctggccccggctccccttcccctcatcttcctcagggcttgtccttctcccggaacccaggccttcagggccccgctctcccacacacgccccggcctgggcctcccacccgcccagtccgccctccaccaccgagacacctggccagggggcctccacctccctgggaaggccccgacccttcccctctggttgcgcgccacagcccccttctcgctccctctcctccccgcgcctcttttccaggcggcaccgaagtccttcctacacacacgctatttttgtaccatcatctcttcttcctctccccttccccctgcgttcacttacttccttcttttccttcacctcggcccggctctgaaaggatcgggcccctccggcccgcacccacccccaagaggggccttcagctttggggctcagaggcacgacctcctggggagggttaaaaggcagacgcccccccgccccccgcgcccccgcgccccgactccttcgccgcctccagcctctcgccagtgggaagcggggagcagccgcgcggccggagtccggaggcgaggggaggtcggccgcaacttccccggtccaccttaagaggacgatgtagccagctcgcagcgctgaccttagaaaaacaagtttgcgcaaagtggagcggggacccggcctctgggcagccccggcggcgcttccagtgccttccagccctcgcgggcggcgcaggtccgggcccggcagggacggggaggggcagagcgggaccggtcggggctggggaccagccgcgcgggcttctgaacgggcacgctgtcggagccggaggctcgtctagtcccgagccccagcgggccgcggcggctcgcggggccgccttcccgggacagcagccggggcccgggcgccggcgcgggggaggacgctgccctccccggccgggcgcgcagctcgcagccctcgctccctcccccggggcgcgcaggcgggcgctcgctcgcagagaaggtgccggcggggccggagccccgaagcctccccgggcggcgggaagacgggaggaggggaaagggaaggagggagggggtcgggctgccgggagggcgggggcagcggccgggactgcgggccgggagcgagcccagccgcccgcgccgtgtggagcccgggcggggcaggtgggcagcggcgggggcggctccgcgcggccgggctcggccgtgctgcccctcgcccctgctcgcgcggtcctctctcccgcgcggtctgtcggtctgcgcgccgcctcgctcctcgctcctcgctctccccctctttctccccctctcgcctctccgtgtctctggctctct

SEQ ID NO: 25986 - DNA, 2300 bp, Homo sapien
ctcagtacatctgacttttcccactgagtttctctgcctttcatcatgatcctgggttcagggcaatcacttttttaaaaaaatgacgcatgatccccaacaggcaaggagccaatgacctttgtctgagcctttggttcctcttctagagaaactggggctatacttagaaaacaggataaaagattgcaaaaatttgtctactctcaaattgcacaaccctagcgtggctggtcaatggctcaactttgggagctggcggggctcagcctctcaacagacttgtcctcctggctctgcttcaatgacaacaggccaagccctcatggtagaaggtgccgttcccaccaacctgggccttctgcccccgcaggccctctctgggcaaggtcagctggtgcggcagccggtcgcatggatctgggccacagacctgtctccagaatgaggccgggtgagagtttaatggcaagaaggctgcagcctgactaaggctgtcggcttgattctgccatggctcccccccatgccagtaaatggaccctgtgcacatgcagattaatgcattatcgctaatgttttgtgccagatgcaaaggcactcgggcagcccggccgagagctgccattaccacaggaccttttgctggaaaatttttcttggggcaattaaatcttcagctgtctcctccaagggagtgccagcttgcattttaattatcctcaaaagagggaagtaggggaaaggacacaaggcaaagaatgaaaaaataacaacctgctttataaacacagtggtttctcccccatcaactccacagtgcccttgacctttagattcctgcctcccgatacccttggaaggacccctttaacgggaagaagggagaggaggtaggagagagcgtttcttgagtgtggaataagtgttagtgcaatgcattatgcctggttaattttttttaaattttttttgtagagacagggtttccctatgtggcccaggctggtctcaaactcctgggctcaagtgatcttcctgcctcagcctgcaagtagctggaactacaggtgcatgccaaccagcccagctaattttttaaaaaaatttttgtagagactgggtctccctacgttgcccaggctggtctcaaattcctgggctcaagtgatcctcctgcttcagtctcccaaagtgctgggattagaggcgtgaaccaccattcccagactcatggaaagttcgagaaccggcaaaactcatcagtcaggtgctagggcgagggaagcacttgactaaaagggacaaagggaactttcggggacctggaaatgcttatcttgattgaggtggtgcttacatgggtgtacatatcagtcaaaactcatcaaactgtatactttaaaatgagtgcattttattgtttgtaagttaatactttaataaagttgattttaaaataataataaaataatacgagttaatatttatctagaccttactatgtgccgtcctagtcgcgcttcgtatgtgttaagccctttatccctcactccaatctgtgacataggcactcagtaccccgttgcccaaatgaggaaattgaaacacagagaagtttggcaactttctaaagtgacgcagctagtaagaggcagggcctgggttcaaatggaggcagattttaagcctatagctgaacagcgaagtccaagattacccaactggttattactagaggcaggattaaaccccggtgcctttccaacgtgatgaaaccggtggaagaggaaaacgcattcattcactagggaaacatttactcatcctccgctgcaggtcgaactgtagacacagagagcaacagacaaatcccaggccctcgtcggggaagaaagggatcatgaaataaacagaaaaataaatgcgaaatgcggccagcgatgaaagctcagaaggcgagcttaccccggacccaaacgcgcaatactaaccgggagtgtaaggaggccacgccctcctcgcgtatttgtgcccaaatgagctgcctccccagcgtgcaccaaattcctgagccacctgctccgagctcgatttccctttcaagctgtgtgttctgcgggggcagggagagctgcaagggctcatctttcaggacgtgctgcaaaggccctttgaagtcatccgccctgctcttggcaccttgcgcctggagctgagctcttccaaaaatgacccctgcgcattccgtggtgcggccgcccagcccaggcagtcgcggtccagagcaggggaagctg

SEQ ID NO: 25987 - DNA, 2300 bp, Homo sapien
ctgtgggtccagaggggagtgtggtggggctgcagcttcaggatctgagggatgggtctcggttcttcctccctccctgggtggctggggcctctctgaacttctgctgccttctccatctgaggacgcattgtgagatccacaccacaggttttcttgttgtgaggatgtgatggaatgtggaaatgtctgaggcataataggtgttcagcaaacagccccttctaccctcctccttatgtgagagtttaacgagccaggtgcagggagaggaggatgcccaggagaacctgctgcatcaaagctggagggatgtggtttatcaggaatgatgggagcagaacatccgctccgtactggctgctttaagtgctattgacacatcctcctttcaccctcacaagagcccaagagccccatgatactgttgtccccactgtacagatgagcaatcagaggttgaagttggcagcttatccaaggtctctccgatggtgagtggcagacctgagagtcaaactcacatcttaaatgtcattaagcacagcctgtgtatggagaggctgagtcccagagaagaaaactgaccccacccctcagtgtgggcagattcaagcctggggagaggcaagggagggggcagaaacttggagggtagatggacctgactttaggttctagctggatgacttacttgctgtgtgtctctaggaacttggagggtagatggacctgactttaggttctagctggatgacttacttgctgtgtgtctctaggaacttggaggatagatggacctgactttaggttctagctggatgacttacttgctgtgtgtctctaggaaagtttctcagctctcaaacctctgttttctcatctgcaagatggggataatattaaccaactggctaggtcatgaggattaaatctgacaactctacctaaccgcctggtgcagccaggtgcccacaaaatgggcggccctgccagacttctgaaatagttgtgcctcccaccacaaactgtctgctattgactgagaagagaagcatgttctcttccaaactcaaagacccttatgttctggaagatctctgtagcaatgaagagtgccaccttcaagctgctgctggtccaggccaagggtatattgaggtgggtccatccctcacccagagtgtgtgctgaggcatattgcagcccatattttgaggggtttttcctgctattcattttgtgttgccgccagagaaaactaaactgcagctcctggctgtcggggaagagctgtgcttctgccagggctagtgtgcctggcaccagctcaggcatgtaccagagccgaatgccgtttgcaggcaaatgtacacacaaaaagattccagcacacgcgtgcaccagccaacacagagttgccacggcacgcaacagcgggccatgcacgtgcctgctgactcggctgtcatcttccgactctcttccgtgatcagaagactgtctcagcctctgtctgtctccacgtctgtctgtctgtggatcagtgtgttttgagtctgacagtctacctggctggtttccttttttcttgctctgtccctctctccttgtgtttctacccatctccctatctctgccactctctgtctctgtttttctttctctttctcccctcctttgtatcactccctaggtccgacattgcctctttctcgatttccgattctctctgagtctctctctctctctctctttctctaactcttctgtctctgtccttccctgtcttctttttcctgtgacactctcctggaaacgcatcaaaaactgaagtggccggatttcaagtgacaaacagcactacacccagaatccgccccctccccaacacggctgccttcctcctccacatccctgtcacgaagagaagcctattgtgtcaggcccagggagttcgagttgaagggcctgggggtctgtgctctgactgctctcagccacttccccattggctcccagcagcctgtgctcagcaagggctgagcgacaggggaggctctcgtccataaaaggggggaagaggcaccagaactgccatttgaaggggctttggtggtgttcacagctgcctctttggcacctcctcccaagccggagtcaaggaggcccctgagccttggaccagccactgccacctccgacctgctcggccagaagctgcccagggacaaagcagagtgcaggtaacatccagagggggcactggaattctatcgcttggttttatttgcttattc

SEQ ID NO: 25988 - DNA, 2300 bp, Homo sapien
tatttgtgtgtatatatacacatacacgagaggatatggatatgcagcaaaatataacaatttgttattctagtggaaaagtatatgatctttacgattcttgaaatttatgtgtaaatttgaaatttaatcacaaaaaagttaagaggttttcagcgaccaaatacattataagaaatggcctgtatccagtgagcactctttagctcattctttttctccatcacacttaccactggcaaaaattatcctgtgcatttatttaataatacttaacattgtgtgcaaggctgtcctaagtgctttacctgtataacctctgtggatcttcttacaggtaaggaacaaatacacaagaaggttgactaacttgcccaaggccacccatgtggtttgtctcctgcagtggcacagaacctcaaccaaggcagaaactgccttgtctattgctctttccccagcgacttggaatggtgcctagcacattacgggtgttcaataaacatctgtagattcagttaacaaacactgggcacccactaggcctacactggaatacaaaatacagaacaaaatattcaaaaatctgtgcctaaatgggagctttgggtactaacagccccacacccaattagcctccatctaggtatttcatttgggtctatcattcctgggaattaaagcccattctatccattttgcagaggatcattagataaacggatgctcagggtgggtcaatgatttgcacaagatcactgggctggtagaagggaaggtcgggattccaacccagtccctgaggttcccaggacagagctatgaatcaaacgaccaagacaatcacccagtcagtatttattaggcgcctactgcggacggttggtcttcacgcagatcaggcgagaagggatagtgatgcgcgggccgctgcggagacccggagcccgccgcggatcacgggaatttcgcgcctattttttgttggctgggtgttctcgccagtgattgggtcccggcaaggcgtgccggtgcgctcggctgcggctgctccgtcgacctttgcaggaccgggcggtgcagggctcactcggctggcgtcccgggggatgggccaccaggagtctccgctggcccgggcgccggcgggaggtgcagcttatgtaaagaggttatgtaaagggctcagctggcgcgaacacgtggaaagccacgggagcctaggagcccaggcttccccagcgagcgccgcggcagcagaaggatccgctacacgccgggctcgggccgccacctcccgcgctgctcggtcccggaggcagcccgggcccggagcggaccatccccaggcaggggctccaggggggaaacgggccgcccggaagtggaggtgcgcgggccaggtaagggcgccgttggaggactgaaggccagcgccgaggctggagttactgccactgcctccgcgcttgggaagggaaatcgggtcctcggccagtcgcactccgagaagccgaacttttcagccaatcccttctacccgtcgccctcggggacttgggtcggtccgctgggctccgctagggcttaattcaatggactgtttacacccgggcgaacacaaggcggggcgcggggaggagcgtcacagagggggccaagcaaagaaaaatatttccgccggccaaatcgcgtctctaagcggttttcagaaggcgtgaagcttgctggctcttctttttcctatcgctacatgacaagctaacagagagagcggagagtttgtgcttttctttccggttccccctctgagctgctgcccagtggttcggtctttcccgctttcccctcccctcccccgttcaatcagcggcggtggcttccgtcttaaaggggccgcggcggccgggggaggaggaggtgggacgccccgcggcctacgctcctggcctccccgccttggcctggccgtttaaccgattctttcgcccgcaggtcacaatccaaggtccggctcctccgcgtcccagggccggacggagggatgaggcagggggggcccgggcagcgccgttgctgctccccccgccgcccgcagccatggaaacggggaaggacggcgcccgcagaggtacacaaagcccggagcggaaaaggcgaagcccagtgccgcgggcgcccagcacgaagctgaggccggcggcggcggcccgggccatggatccggtggcggccgaggccccgggcgaggccttcctggcgcggcgacggcctgagggcggtggcgggtccgcgcggcc

SEQ ID NO: 25989 - DNA, 2300 bp, Homo sapien
atggagaaagtctctgatttggcttatcatgtcaccccagagcctagcacatacagttatgggtcgcttaacaatgggctgcttaacgatttctgagaaatgagtcattaggcgattgttgtgtaatgtcaagagtgtacttacataaacctagatggtgtagcctactacacacctagatgacatgtatggcctatcattcctggactacaattctgtacagcatgttactgtactgaatactataggcagttgtaacacaatggtaagtttttgtgtatctaaacacagaaaaggtaacacatacaccataatatgcactataacattacaacagctacatcactaggtaataggaatttttcagttccattataatctaatgggaccaccgtcatataggccattcctttttgaccaaaacgttgttcatgcggagcatgactgtacttcacaaaggaaaactcacaataaattttttttttttttgagacggagtctcgctctgttgcccaggctggagtgcagtggcacgatctcagctcactgcaagctccgcctcccgggttcacaccattctcctgcctcagcctcccgagtagctgggactacaagtgcccgccaccacgcctggctgatttttttgttatttttagtaaagatggggtttcactgtgttagccaggatggtcttgatctcctgacctcgtgatccgcccaccttggaataaattttttaaataagcaaagacttctacataaatattcactaatacattctttatagtatctaaaatggaaaaaatctgttttctaaagtaggagaatggttaaattatggtacatataatgggaatgtcatacagtccctgaaaagccatacttctaaagtatgacatggaggaatgctcagattagtaatgagtaaaaagaaaaagaccttgaccaactagggcaagatctaaactatgtggaaccggatgtgtgagtaggtgggatacaatcagagatagtgtttattctctgaaaacctgtctacctcttatgcacattttctacagtgagcatttataatgatgagaaagagcgtttctaaaaaaagggagactcggcttaaacgcaacctcctctgagaagacttctctagactttccaacgtgtactcagataattgcacgtttctcccatcaagatatgggggggatctttgaaaagaagcacttcattttcttcaactttgtattcccctgcaagttcacagggcccatgccagggtccagaatgaagaacccggtccaagaagtgggcatacagaaaaaaaagagaggctgggcatggtggctcacaactgtaatcccagcactttgggaggctgagaccagcagatcgcttgaggtcagaagtttgagaccagcctagccaacatggtgaaactccgtctctactaaaaatacaaaaattagccgggcatgatggcaggtgcctgtaatcccagctacccaggtggctgaggcacgagaatcacttgaactcgggaggtggaggttgcagtgagctgagatcctgccactgcacccgctgcaccccagcctgaccaacagagtgagaccctgtctcaaaacaaaaaacaaaaaacaacaacagagagcactcacctagtttaaaatcacccaaaatgcttagccctgaattttaagcagcacatgtgacctggtccattctggtttcaagttcaaaggcatcaggccggtcctgtgggttagcagctaacatatctttcaagagctgcttgatcccctcagacatggaagtcctgcgtttttgggggatgtgcaactccatctttgggttttctagcagcgcctcaccaacagggacgatctcagtcccctgtttaatgtaggtccccaggagctccttcttggtctcagagtcaataaaagtgattctttctatcattgcccagatgataatgcccagggcaaagatgtccgccttggctgtgtagtgtccctcccagacttcaggagccatgtagaagtccgaaccgcaggctgaggacagccagtacttattcacattcacatttttgttgtcttgattgccctctttgcctcggggtgccagcccagcacagaccttgcttagtccaaagtcggccactttgaggatgggggtgccagaccgctctgtgatgaggatgttgtctggcttcaggtccctgtgcacaatatggtttttgtgcaggaaggcaatggcgctcgtcagctgtagcatgaaacttttgttggtggctgggt

SEQ ID NO: 25990 - DNA, 2300 bp, Homo sapien
gtcaggtcattgaaaggagtgcccggggtctgattttccttggctcccaggccaacagcaacaaccacaataataagcaaaacccctcctttcctttagaccacacacagaagcatacagagcactttcacacccattcatcccatgccattcatggagctgtcctccagctttctggcaggatgaacttggcgtcatgaggcctcgcccagagtcacagctagtgcccgtggtaggagccaagaccacacatgagtctcctcttgggtccaggctctttccatgtccctctctaccctctgctcttttcttagtcatctgccagagccaacagtgcatcccattctgcctggcatgggtgcacagccagctgtcttagagccccagaggcctgggaaaggctgcctcatttaggcgctgacctccaaggttaagcaaacacaggctctggagccatttacatatgggtatgaatctcgtggttggagactcaggttaatctctctgtcccccataagatggaaataataatagcccctttgcatagggttgctatgaagatgagaaaagctaatatatgtaaagtgtttagccagtgcctgcccacagtaaacactaaatcaattagttattattagtaagcactaaatcggtagttatgattcccatctttacagtgatattgattcacttattcaagaatgtgcatgttccagccacgtgtcaagccctgtgctagattctgagaagaagatttgaatgatatgcaacctgtaccttcaaggagctcagtctggagatggggacatatataaacagatagttccagtgcagtggatacatacggtaatagaggttctaagatgtacaaaaggctgtaggggcctaaaggacggagaaaggacactgatttctctttttcaattttccaagccacctgcctattccgtcttctctttctcgagatcaaacattctcacttctctctaaagacccaaccttgtcatcatggtgctcaatcttccttccacactgtgatgctggggaaagccttggggcatttctgttctctcgtgaatccttgaagcctcactttaaaaaatatatactcactcctttgtccatcgtaaaccttgatatttgtaaatatcgataataggaactttgaaaaaacatacgcccttagaaacaagcaagcaaacaaaaacacgtagaatgtcagagcttctccccactccacaccctttctttaaactgatgtcaaggtgggcccagtgagggtcagtgacggaacctgcagtctgagaaagacatggcagaagcataaggttagaggctgttcctgctgcctcattaaaaacaacaattttcccccaaatctggactgaaactgacattcaacgccaagtgtgatctcagtttaacctgccctggtagatatgcatacacttcccatgcgcaccatctcatgtgatcgtgtccacagctttgtgagttgagaggggtgggagtgattatccccaaccacaagcaaggcttccgggcttcaagggttggagaccacccagggctcggccagcatcagaaccaacggcttctaattccaaatcaaatgatggtttatgccacactacaaccctaaacaaatgaactgtgatgtgtctcacttccctgtgcaagtggaagatgctaatacatgtgtatcatgagaaaggacctcacaattttcttcttctgggttctgctgagacgtttctttgattcagagagaacttcccaggatcagcaagaaaagcatgtcatcatttcctaaaccctacaatccaggaaatagtccatcattttataaaattataaaagcgaactatttgagtttctttattatctgcccccttctccccaagctggtcttgtacaaacatgatgcacgtccattgggtgacaagtctgtcgtaagtgaaacgtttacaggcactacaggaatgacctggtgcctcgcccacttcattagaattctaattggggtgtgtaggagaggattctataaatggtaaggcaatccttggcagcctgtctgtcagcactgtccgtgccattcccagaggagcctgagaagaggcagaggaaggcgaaacatggctggtgagtgcatggcatcttctccatcaggtccttgccagaagcctgtgcttcccctgggccagcctgccaagccagagtgtccggccaggacagctgcctgccttgggggctctgaaggccagacttcctattttagggtgctagccagaggcggctct

SEQ ID NO: 25991 - DNA, 2300 bp, Homo sapien
atctctatagccagaagaacaattaaattgcttttaaagcatctgattattccccaggcacagattttaatttgtgaagcacccactttatgcctggcattggggtaccctgagccgcccaaggctttggctcccgtctgtcatctctagcctgatcatcagaatcagagaatgttggaactggtaacacttagttcacacccgtattttacagatgaaggcaataaggcccagagaaggtaagtgacctgctgaaggtcacacagccagtttggcccagagataacagaacccaggactctactgccaggctatgatgctcacttctaaactgagtatgggccgggtgcagtggctctcacttgtaatctcgcactttgggaggctgaggtgggcagatcacctgaggtcaggagtttgagaccagcctggccaacatggcgaaactgtctctacttaaaatacacaaaaaattagccgggcatggtggcacacgcctgtagtcccagctactcaggaggctgaggcaggagaattgcttgaacccgggaagtagaggttgcaccgagctgagatcgtgccgctgcacttcaccctaggtgacagagcgagaccctgtctcaaaaaaaaaaaacgaggagtatgaattattatttggggtctcgagcagtggggcaggcagtgattttgatgccctgtcttctgggagctcccgtccaagcaagcccaggatgaaagataaaagggccctgaataagaccatcattagtggggaggagcctgaccctgcataggcagaaaagcagcttcagcagggcccagggtctacagggcagcagcctgcagggtgttgaggaaggagctgccctgggctgctgccagatgtcagtaattataaggctatgtgggtctgcagacagctcattaaagacgcttgatctgcgtgaaaccaggaagcagaactcagcctctttgccactttctgtaagaaatccaaccacatcaaacactttggggtttttatgcagtttcctgaatgttggggtgatcccagggagcggcctcatcctactgtgctcagcacacggttgtctccttacccttccttgtctctttccctcgattctaccccctcccacttccccttcctcactggcccaggccacatccagccttcgatagccccaagtcatccatcaaagcatttctccggcaaaaagaaacctaccccaccggcttccatgaaaataaaatcccctctatttcattaacaaaagacctcagatgccttgaattccagcaccttcaagcccagaatcttagactttgagctggaatggccctgaagaataattgagtccaatccctttagtttgtaggtagaaacaccagggttccaggaggggagaggtcttgtccaaggtcacgggacacccatggccaccaggcctctaagctcctggctggaggccactcacaaagtcagggcagatgggcctagcttctgagtcagaaccagctctcccctttttcttatctacctcctctcaagagtctagtgtccaccaaggaagtctagtggccctgaaggaggatcatggacctctgcctctttagatgcctgcagaacagagtggagctgtgggcccaggagtcttctgctctcacccaggaggggagagggagccacagactgacccggcactgcagcgtgcaaccatgtacttcggggtcctggcgctgagcctgttttttctcatttgagggttgttgtgagggctaagaatggccaaccataaatccgagttccctcagtcttctctctttccccgttctttttcttgccaggcttgtgacctttctgagcctcagtttctccacagtcccattcgcaactccgtgtttccaaggtctcttggcaggagccactcccacagtgaacccctctaggtgcaattacaggatgattttgtgtctcgtgggtgtcgctgctagggtggagggccacgcctcctcttttgaattctgactttcctgcctaggagtgtcccaaggttttccttgttaaaattggtctggctggctgctgtgacgcgccacactgtcctgacggtgcacacactgctgtgtggaggaacagaggagtccagctggccttcacatggcaggtaagtgggcagagcctggggccttgggacaccagggctcatgaggggggcttcaagaaacacgggtctgtgggatgacgtttgatcatcgattgttaggattttacagctggatagtccaccatgaacaca

SEQ ID NO: 25992 - DNA, 2300 bp, Homo sapien
cacataccactcctcagagaagtttcccctgaccacctagccaaaactgtaccctatccctctcagttcctctgcctttatttatttttttcatatcactctaatgttacattgcatacttatttatttggtttactatgtctttctcagtaggatgtaaagctccgtgagggaaaggactctatcccaataatggtgcatggccttagtagatgctaaataaaaatgattttaaatgcatgcatgaatgaagtgttaggcagctgggtaaggtgggggcaaatgaacagctgaggagccagacggacctatattcccactctgactccgccactttgggcaacataattcatttctatgaggcttcgcctcttcatctacaggtgacaggaaacgggacaacagaacacaccctttagagatggtgtgaagatggcaaagcaccaaggtggaagctctccttgctgggtttgaggaacagcaaggagattagtgtgactggagaaggatgaatgagggcaatgttgacggagatgaatgaggttggagaggagcgcagagctagattttattccatgtgtgctgggaagtttttggtaagtggagaccaggacatgacatcatctgatatcccagtacgtttagaaggatccctctggctgccgtgagaacaagaaaggaagcaaagagacaagttacgggctcgttcaatgatccaagacagagacgatggtggctatgactagagtggacgcaatggagtgggtgacaacaatcatattcaagataatttgaaggtgggggccacaggatttgctgatgaatttgattattcgatggcagagaaagagaagaatgaaatatgcttcaaatttgtcattttcttttttttcttttttaatccaagaaacttcggggatggggaacactggtgaagtggttttagaaacagtgaatagaatcaagaattcagttttcaacatgttaaatttggtatacctattagacattcacatcacgctggcagctggatataaagggccaagagttaaatgaagagaccaaggttagaggaacaaacttgaaagccttgggtgtatatgctgtatttaaaagtcataggaagggcccagtgtgatggttcacgcctgtaattccagcactttgggaggccaaagtgggtggatcaggagttcgagaccaggagttgaggtcaggagttcgagaccagcctggccaacatggcaaaaccccgtctctactaaaaatacaaaaattagccgagtgtggtggcacaggcctgtattcccagctactcgggaggctgaggcaggagaatcgcttgaaccggggaggcagaggttgcagtgagccgagattgtgccactgcactccagccttggtgacagactgagactctgtctcaaaagaaaaaaaaaagtcatagaaaaaaaataaatgtcatacgactggatgcgattatcagcaaatatgggtagagcccttattttgtgctaaagtgttctaggcactacagcaatgagtaatacacaaagagaaaaattcacacccttatggatcttacattctaatggggaggggataataaaataactaacaaaaatatacagcgtgttagatagcaagagggaaatacaggagagatgaggatgaggtgggtgggaaggttacaggatggctagggaaatcctcactgggaaaatgttatttaagcttaaaccttgaaagaggtgagggcagcagccttctggtataccttggggactaccattccaggcagaggcgaaagcaaatgcagaggggctgaaaaaggagcacgtccagccagtggagggaaaagcaagaatagtgactgtagaggagagagccggggagggtgatgggaaatgaggaccgagaggttaatgggaaaggcggggtgaagagaaatgagtgtgacacagagcagctctcagtacggatttaagctaggaaggtgtccaaacaggaacttaaggctctccttacgtcaaagccggatgttaacgcccagtccccaggccccgcctctgctcggcagaagctccgctccggggccggaactccagggctagtgagctggaccggaagtaggtttctacccgaccgcattttacgtggtgctgcatttccggtagcggcggcgggaaatcggctgtgggagagaggctaggcctctgaggaggcgaatccggcgggtatcagagccatcagaaccgccaccatggtaaggagggcacaggctggcggcgcgggagctt

SEQ ID NO: 25993 - DNA, 2300 bp, Homo sapien
atgcctgcagcatccaaacaagtcctgttaatgaggggaccagattgggtggggtggggagtactttagagaactgggggactcaaactaaagtcagattgctacctgcatccttcctggcctcaccatctaagcctcactccaagaagtcttgagctccacctctttttggccttttaatttagctatccatgtcctacccattttttcaaaccatggtcttgagttcagaacccaccatcattctaccttacttttagttttagaatttttttttatattgatttttgctgagttttctgaaaaattggtagtggattgccaggcatggtagctcatgcctgtaatccccagcattttgggaggccattgtgggaggatcacttgagcccaggactttgagaccagcctgggcaaaatagtcagaccttgtctctttggggaaaaaaaaaaatcaattttagtttggaaacatttgacctagtaatcgcaatgagcagaaacaacgaaatctgaccaaaaaacttacagaaatatgactacctggagtagtcataaggtggtaccttgtgtgatgagtccacagaaaggatttgggttgaagggactttcaagatggcaggcaatctgacagcacctggttgtgaaattaggtaaagtgattcagattaaaggtgaaataatttatacacgcaagctctaacctaatttcaaaatatctgtgcatatatttctcctatatccaaagtaagttggccgggcgcggtggctcacacctggtgctgggctcaaatccaaaactcccaaagtgctgggctcaatcccagcactttgggaggctgaggcaggtggatcacctgaggtcaggcattcgagaccagcctggccaacatggtggaaccctgtctctactaaaaatacaaaaattagccaggtgtggtggcacatgcctgtaatcccagctacttgggaggctgaggcaggagaattgcttgaacctgggagatggaggttgcagtgagccaagatcacaccattgcactgcagtctgggtgacagagtgagacttcgtttcaaacaaaaacaaagtaagcacatataattttttaaatcattttttctaaaagagagaaaatggtagaggattcttgacagacatgagattctctcattgcataatctttttctataccatgttatgcttttttattttctctaatatgcatgaaatgtgtaagggataaaatctgcattctcgtggaaagattatttttatctagccccatatcttattcattaattttaacctagaaatcattttggagaacagccaaacactcagctgctctttgattaaagagaaatttgggactggttggagcatgacattctagaatcccaaaaaaaaaaaaaaaataatgaaacaaggttcctagagttctacctaactagtgttcttgaagggtaaaagcattccttctgtgagttatggggcaatagttgatgactagaaaaatctcacaaagccaggttacacatgaggataggtgatgctctatctgctactgatgcagaccccaaggccgagtccagcttccccagctcggcccactctcaggtagagcagttgctcagcagcgcccttactgctgccagccatcagttcttacctcttccctgctttccaattcctttgggaactagaaagcgattttttggctggcagaaagagagctgagttttgtaaattttaatgctacttaaaatcgtttttgtcttagcttcctctcttctgtgtctgttctagtaacctgtaacctaggttaaagaagaagggcctgtaccttctcctaagtcacggccactaaaagtggcttgtctttttttttttaatggagacaaggttttactatgttacccaggtggtcttaagctcctgggctcaagcaattctcccaccttggccttctaaagtgttaggattacaggcatgagccactgcatctggtcacctgtcttgagagaaaggctcaacctgtaaaaatctttgagtaaataaattgtgcagtattggaggtacacttgacatagctagtaagaatatgaaaacatttccaatcagattttctgctgaatatattgacaaaggaatttcatatggggctggagatctagaagagatattgcagagaatccgagaggaaacttaagagaatgaaaggaagtgtgataaacagcactgagaccagtaaaaatctgggaagtcagaagtattgcagttgtccaggcaaaatttataa

SEQ ID NO: 25994 - DNA, 2300 bp, Homo sapien
atagctcctaataccacctgccttctttgggaccacatcagtgtaggactttgacttgggcccatcaggatacacaaatgcacatctgtggtaaggtcatgtggtagacatgcatagcaatggaagctaggaggttatctcttcagagtaattgtgagaactggagctctcccttaactaagaaggactgagttttgatctcctaaactcctcacaatacagggacatagggattttttttttttttcttgagacagggtcttactcctgccgtccaggctagagtgcaatggcatgatctcagctcactgcagcctcgacttcccgaggtcaggtgatcctcccacctcagcctgctgagtagctgggactacaggcgcacaccaccatgcccagctgatttttgtattttttgtagagacggcatttcgctatgttgcccagactggtcttgagctcctgagcttaagtgattagcttgccgtggcctcccaaagtactgagattacaggtgtgaaccactgtgcccatccaagacacaaggaactgaatatagatggaaccttgggttggggcaggggaatcagaagctgagttctgcacgccccagttggtctacaggaaacagtcagaggctctttctccacaggcattatgctatattctgtcttctctctgactcaggcttcaggtagtagcagagactgatccaaaacatagagtttgaatctgaggtgcagaggcagaagaagtaaagtttgagagctaagggagagtggcagaacacaagcaggagggcctagaaatgaaggtagagtgaatgaaggtagaaaatccagggatcccatgtagatggagactccgtgtttgttgaatgaggagggtgtgagaggacaggatccctgttgaagaggcataggcctagggcccacaataaaagccccagcaatagcaaattgcttcttcatcccacaggtcctggctgcagggaaacaagctgggctttttataattaaggttggaagaagtcaccacaggcagcagaactccatcttgagatgaaataacatctacctggacctctggcagaatttcaaggcacacactgggctgactctggcgccatgatgttgccttatccttcagcactgggagatcaatactgggaagagattttgcttccaaagaatggggaaaatgtagagactatgaagaaattgacccaaaatcataaagcgaaaggtgagaattgttgagggagccggagggatgaagaggaagccaaggctccaggttcacctgaaaatgcttcagaggtcacctctgagttaagtgactacttccttcatcctaaggctcagaagagctgctcagggagcgtcatggtggggggtggggggtgggggggtctggtttctcatagcttctttttctttccctaggcttgccttctaatgatactgactgcccccagaaaaaggagggaaaggcccaaatagtggtgagttggggttacattttttttttttcctgaagtgctggctcattttccagagaatagacatatattctctttcttgggaaaggaaaaggcggtcaacatctgggtagatgagtgaagcattaggctttcttgaaaaaagttgtcaaagcacatagcaaagacagggattttacagatcccatttagtaacctgagcttttaaaaaatgctcattccagaccccatctgttcactcccatttttctctgtaatccaagttttcttccattctctcctctaaatctttaccactccctactgcccagcacaagccccaagtccatgatgcttttgttccttctgcagcccattctctgctgtttcatctctgaattccttcattatgaatcctcaaagtcactgtcttaaacacagcctgaggtttacaaattaattcacaaatcatttctccggtgaaatcatatatgtcaagggcctagaatgtgttctgtgctcagttatgctcctcacaggttttaacagaaagccaggcagacagtagtgctcagaagaacttcatatggagaaccatatattctgacgaattacatcaacttgcatatccaggctctccagggtcaccagctgtgctccacacacagggaagattgatggtggcttgctatacattaatttactggttgtttgtaggtaccagttacattcagggatgtgactgtgatcttcacagaagcagaatggaagagactgagtccagagcagaggaatctatacaaagaagtgatgctggagaatt

SEQ ID NO: 25995 - DNA, 2300 bp, Homo sapien
gctggtaccggttgttcctttccatgtttagtgcttccttcaggaggtcttttagggcaggcctggtggtgaccaaatctctcagcatttgcttgtctgtaaattattttatttctccttcacttacgaagcttagtttggctggatatgaaattctgggttgaaaattcttttctttaagaatgttgaatattggcccccactctcttctggcttgtagagtttctgccgagagatcagctgttagtctgatgggcttccctttgtgggtaacccgacctttctctctggctgcccttaacattttttccttcatttcaactttggtgaatctgacaattatgtgtcttggagttgctcttctcgaggagtatctttgtggcgttctctgtatttcctgaatttcagtgttggcctgccttgctaggttggggaagttctcctggataatatcctgcagagtgttttccaacttggttccattctccccatcactttcagatacaccaatcagacgtagatttggtcttttcacatagtcccatatttcttggaggctttgtttgtttctttttattcttttttctctaacttctcttcttgcttcatttcattcatttgatcttccatcactgataccctttcttccagttgatcaagtcggctactgaggcttgtgcattcgtcacgtagttctcgtgccatggttttcagctccatcaggtcttttaaggacttctctgcattggttattctagttaggcattcgtctaattttttttcaaggtttttaacttctttgccatgggttcgaacttcctcctttagctcagagtagtttgatcgtctgaagccttcttctctcaacttgtcaaagtcattctccatccagctttgttccgttgctagtgaggagctgcattcctttggaggaggagaggcactctgatttttaagagtttccagtttttctgctctgttttttccccatctttgtggttttatgtacctttggtctttgatgatagtgacatacagatggggttttggtgtggatgtcctttctgtttgttagttttctttctaacagtcaggaccttcagctgcagatctgttggagtttgctggaggtccactccaaaccctgtttgactgggtatcagcagcggaggctgcagaacagtggatattggtgaacagcaaatgttgctgcctgatcgttcctctggaagttttgtctcagaggagtacccgtccatgtgaggtgtcagtctgcccctactggggggtgcctcccagttaggctactcaggggtcagggacccacctgaggaggcagtctgtccattctcagatctccagctgcgtgctgggagaaccaatactctcttcaaagctgtcagacagggacatttaagtctgcagaggattctgctgccttttgtttggcaatgccctgcccccagaggtggagtctacagaggcaggcaggcaggcctccttgagctgcagtgggcttcacccagttcgagcttcctggacgctttgtttacctactcaagcctcagcaatggtgggtgcccctcccccagcctcgctgccgccttgcagtttgatctcagactgctgtgctagcaatgagcgagggtccatgggcgtaggacccactgagccaggcgcgggatataatctcttggtgtgccgtttgctaagaccattggaaaagcgcagtattagggtgggagtgacccaattttccaggtgccctctctcacccctttctttgactaggaaaggaattccctgaccccttgcacttcccgggtgaggcagtgcctcaccctgcttcggctaacactcggtgctctgcacccactgtcctgcacccactttctgacactccccagtgagataaacccggtacctcagttggaaatgcagaaaacacctgtcttccgcgtcgctcgcgctcggagctgtagactggagctgttcctattcggccatcttggctcgtctcattttaaacttggggatttctagcctccatatctgggtggtaggagacaatcctgaatctcacactgcctgtttcatcctcaggtccaccttctccaatccctgcctgctgggagaggacgatctcttgagaaaggaaagacttctgtgctcccgagaacttcctatcaggtaggtaccacttacctttcacattcccatagcgtcttttctgctcgaaaccatggctgtatttcctttgcccgtctgacatcttgtaccctgaagtgttccaattgagg

SEQ ID NO: 25996 - DNA, 2300 bp, Homo sapien
gggctgaggtggaagactcacttgagcccaggaggttgaggctacatgagcggtgatcatgccaccgcactctagcctgaatgacagagcaagtccctgtccaaaaaaaaaaaaagaaaggaaaaggaaagaaaagaaatggattcccccagtcttaaaacttgagaaggtcacatttgtcctgagttcctttctcaggaaaaccaaacatcaggcctcccagatagtatcaaggagctgcaacttaccaaatcattgcatgtggacaatgagaacccacactcctcatcagtcatattgcctaaccaatcacctccttcctgttccaacttacctctccctaatttctgttttcccacacatagttacatttcttccctgctatacaaacccctgattttggtcagtcagggagatggatgtgagactgatctcccatcttcttggctgcagcactcaattaaggccttcttcccttgcaatactcgtctcagtgattggttttctgactggcaaccagcaggacctagacccaacccctggtgtttcagtaacagattctgcccagtactaacacggcagcctccaagacaagagaagggaattggtcctttctgtgaaaggcaggacagaatatcaagaaatgtttgtctgtctcctggctcacaacggccttggggccatgttctctatctcctgagtactggagaacagagaagcctcagaaggctgatattgggaaggtgaaaagaaataagaagatggaaggaggtgttggagaaaataaaaacaaaatctcctgctaacccagaaaatccccttcacaaacgtagaaaagaaggagaacagttttattaccaaataatattgaactggactgggaagcacattgtagacaatctgctaatcagatgccagacagaaagagatcttactttttatctagttgggcagatacaatctattacaaacatgtcctcaaaattaatggtaatttgcccccttgtaagaggatttgacattgtttgctatacaatttttcataattcattctaaattcacctggtaattggagtagccatctacactagttaattgcctttatcaaaaagaaaaaataaaacttttatctgtgacaagcgggcagttacgagtttggagctaggcacctaagctaaactcccaaggtgacagggagataagggcactatcttcttcactgtttacatttcaaagagatggctcatcaggcctttgggggaaacattcctcttttgtaaagttggcaggtgcttattcagcctttcaaaagtatcaggtacatatcaaaggagcacttatacatagatttctcatggaaatactccaagggcgtgaggtcaggtttatttccccttcagtaacaagtaaaatttaattcaatttgtatttgccattaagatttaaacgcgcctcctatgagctgaaggtctgatctgcaaacccctaattgccgtgttgcagaaggtaccagcgtagcccagttttaaaaatattattagttttaaaatatatacatttaactcctgggctcaagccatcctccagcctcagcctcagcctccctcggggttacaggaatcccaggcgcgcgccaccacgcccggctctagtagcccagatctgaaccgggatcttagataagaggccagagagccagactccagcctgagtgaagcttccaccctccagaaactggatgagagtctgtccctaactttgaggacttcgacaagaaaggtgactacaggccacccacaggagtgcactggtgttgagggtaagggttcaactgagacgctgggaggcggctttgccctgcctgtgtgtcacaggcaacacgaagtcgaatctacatagtgctcacgcaaggtagttcgcgtgctatggagcctcagcccagggaattcaggtggtccggtgcagtaaactctgtacccaacacacgcctgacagacagcgcattgctcccgctagattcgccaatcggaaatgacttctctcgttgaccccagcttccggaagcgcctgcggaagctgccgcagaggcttgtggggagtgtagtcttttttttgcagaatgggccaaggggacagagacttcactcgggagccagaacctgttttcaacatgggtattttaagaagagacggagaggctgtcactgcagtggtcactgtcctggaaaagtaaccgttgcacggcccagaagtggctctgtggcggccaatgggagccgaagcctgcgaggatgttggga

SEQ ID NO: 25997 - DNA, 2300 bp, Homo sapien
gtttcattaagttttttgaatttggtgctgactgtgattacagcttacattttcctttttggtaatgtcagaggcatttgaaccagagcaactggttgaataggggctgggtaaaataaggctgaaacctactgggttttatttccaggaggttaggcattctaaatcacaggatgagacaggaggtaggcacaaggtactagcccagagtggtggctcacacctgtaatgtcagcactttgggaggccgaagtgggtggatcacctgaggtcaggagttcgagaccagtctggccaacatggtgaaaccctgtctctactaaaaatcaaaaattaaccaggtgtggaggtacgcgcctatagtcccacctacttgggaggctgaggcatgagaatcgcttgaacccgagaggcggaggttgcagtgagccaagatcatgccactgcactccagcctgggtgacagctccgtctcaaaaaaaaaaaaaaaagaaaaaaaaaaaaaagaatgaacaaacaaaaagaccaaacaccttgctgataaaacagcatgccataaagaagcctgcccaaaaccaccacaaccaagatggccaggaaagtgacctctgatcgtcctcactgctcattatatgctaattataatattttagcatgataaaagtgtctttttttttttttttttttttttttttttttgcaccatgacagtttacaaatgccatggtaatgtccagaagttaccctatatggtctaaaagagggggaagaaccttcagttccaggaactgcccacccctttcctggaaaactcctgaataatccaccccttgtttggcatatagtcaggaagtaactacaatcagttgagcagcccacgctggtgctctgcctatggagtagcccttctttattcctttgctttcttaataaacttgctttcactttactctatggaatcgcctggaatttttgcccaaggtccaagaactctctcttggggtctggatcgggacccctttctggtatcagtaacacctttctggttaatattctcagccatgtgtgcgcaagtccctctaaggccagaagcacggagaatggctcagggtttggggcttcatcgcccctgcggtccccgaaccctttcccccgaccccccggaggcctcggggctgtgccgagggacaggggctccggatgccagatgctctccatcctcaccttcctatggaagcttggaaaagtcaggtctctgaggccactgaagctaaaaattgggacttcggtttggggcggcaagcggggagtcagcctacgcggggtggcgggtgcggagggaacggggactcggcggccggcagcctggggcggcactacggcgacagatcgggactcgttcccttaagcgcgaggtgggggcttagcctctggtagggcgggtggggattcggccgccggcggcgtagaccatcacttagtcttggagcggaaggccgggttagacctaggataaaaaatgctgaattccttttctggggggaaaactgcgggatccgcctctggaggaaacagcggggctgagcccctcggggagaggcggggactaagcctcaggagcgggaagccgggaagcggggattccattcgactccggagagggggactccgctttcgaatggagagccgggaccttggcgtctgggccccgcggaagatcgggagccagcgggcgcggtggctcacgcctgtgatcccagcactttgggagggggagttcgagaccagcctgggtgacacagcgagactctcgctcaaaataaaaatagtaagagggaagggccaaggcagggagggcgggcctgttgcagcgccggggctggggtccgggcttcgggtcgtccctgcacctggcttcctttctgaaaggcctccagatcctctgcgaaggccccctgggctcccccggcggggcccgcagctctcccccgcgctgaatctgaggaactgggcccggaagctcgcgagtctcggtcctggcggttcgggcgggcgccccctgttggccaagttgggacttgccattgcggcaaaacctgcgattcggggcaggggcaggcagtggggggacagcctggaaccagaacgcgaaacccagcctcacggtaagaagtggagacctagtggacactagcaggtatgtgtgaaagcaacctcaaaatcacacgttctctgccagggtaagcatttgttgtgagttagagcgacttgagatgaatttaagcagtataatttatctg

SEQ ID NO: 25998 - DNA, 2300 bp, Homo sapien
cagcagaaaccttactcaccagtcctctgggccacgctgtcctgtggctgcacagctgcccgtgctgcttctcacatggaccggggtcctgcactggcatggccctggtggggagagggatttgcggctgcagtcctgcagtatggatgccagagaatgcaactgagatcctcccactgccctcatgccccggggactggggcggccctgcaggaaccagttgggtcggagatcaaggtgtgggacaaagagaaaagcttcaaagcttgagatgaaccgttgcacgtgcattttagaggtagctcctttgccccttccctcgccaagcttgcatgaggacaggcactcctactcctgacccctgagaaagtacatgggcatgatcagaggctaggtctgtccttgacacccacaggagacttgccctggggaaggctttttattctgttgtgtcatagaatcctttggcatcctggtaaggtccgtagacccctttttatatttttttttatttttgagacagagtctcactctatcacccagggagtgcagtggtgcaatctcagctcactgcaacctccacctcctgggtcaagcaattctgcctcagcctcctgagtagctgggactacagacacatcccaccacgcccggctaatttttgcatttttagtagagatggggtttcaccatgttggccagactggtccggaactcccaaccctaggtgatccgtctgccttggcctcccaaaattctgggattacaggcgtgaaccaccacgcccagccacagaccgcttttcagaacatagacattaaatccataaaataaaacactaggattacaaaggagaccaatgatcctgaaataggcatcaaaatcactttaaatatctttcatataatgacaatatatgcttcctaattaaataacaagatttcatggcaggtctctaactatcataattttgaagttgtgataacatgtaagatattttgagacatccccagtggtttaattgggaaaaaaaataactgtgacttttgctgagacaaaaatcacatctttgcttacattcatgattgagggaaatgctaaatcgcagttaaggctaggaaaagtgaaagtgtagtattttctccatcactattcacaaacccacagaattccatccacagctctgggggttccagggactccagattaagaactccacactctgagaccttatgactgccttccagagggtccctctgacactttagtgatggttttcaaagcagccaaatctgtgcctccctgaagccagggaggaaaagctgctgagggagggggcgggggctgagcgggaacattcatctgtgtgggctcaggacgcctgcagcaggatccacagtgcaggctcccagggcctggcacagactgactgattccaacgcccagtgccactcctgggagtatgcattttatttttaaaaatttattattattatttttctttttgtggagatggggtctcactacgttgcacaggctggtcttgagctcttgggctcaagcaatcctcctgcctctgccttcctaagtgctgagattacaggtgtgaaccaccacatgccagaatctgcattttaaacagaagcccaagtaataacttaaacaaacattctagaatttccctggtgctttgtcccaatcagggactcaagatagtgggagagggcctgggatgctcctcacacctcctctggctagagtgccagcggcatcattgccaggagataagcctgcagctcctggcccctccagggcccctcatgtataactgatgcctgaaacatgaggccatgctgcctctttgcagggaaacctgagaagaggagtgtgtggccggattgatgggccgggaactcgtcgccttccttcacccgtctctctcccccaaacttcacccacctccacattcaatctcaaaccaagaagccccgcctgctgtcaggtctaggaagggaggccagccaccatgagggcaggaaagcagcccaggctgaaggcgtgcatacaggagcacgctgcgtgagcctgtgcaggaccccagcagtgctgctgaccatgagccaccaggtaaagggcctgaaagaggaaggtgagtccacgtcctgatcctgcggggcccgcccacagggttcctgggcagcagcaggggatgggggaagcacatatggtgttcagaggcatagggaggagctgggtttgagtccagggcctgtcccctgtgcgctgagcgacctcggctg

SEQ ID NO: 25999 - DNA, 2300 bp, Homo sapien
ggccacttccatccaaagccagggtaggggtgactgggggctttgacttttcctccaggattgtgagagagggacaaagaagatcaatgtctttgaaacactttgaacatgtgagaagtaaaatgacttcttttgtaagtttattaaaagagacataatatacttgtataacagaatagatgtgaaaattctgtgaattaagactttggggtctgggagagctcatttttcatcctggttctaccaattactctgtgtctagggcacaagtttaataatcaaaaatcaatttttatatactaacagaaaacaattcgaaaataagtttaaggccaggcacagtggctcatgcctgtaatcccagcactttgggaggctgagacaggtggatcacctgaggtcaggagtttgagatcagcctggacaacatggggaaaccctgcctctactaaagatacaaaaattagccgggtgtggctgggtgtggtggctcacgcctgtaatcccagaactttgggacgctgaggcgggcagatcacgaggtcaagagatcgagaccatcctggctaatacagtgaaaccctgtctctactaaaaatacaaaaaaaattagccgggcatggtggcgggtgcctgtagttccagctacttgggaggctgaggcaggagaatggcgtgaacctgggaggcggagcttgcagtgagccgagattgtgccactgcactccaggctgggtgacagagcaagactcggtctcaaaaaaaaaaaaatttagccgggtgtggtggtgggcacctgtaatcccagctactcaggaggctgaggcaggagaatcacttgaacttaggaggcggaggttgcagtgagccgagatcatgccactgcactccagcctaggcgacgcagcaagactgtctcagaaaaaaaaaaaaaaaaaaagaaaaaaaagtttaagttctattaatagtatccaaaaaaaacccataaaattcctagacataaatttaaccaaaataatgtacaagaccattacaccaaaagtataaaatattgccgaaagaaattaagaaaccctaatggagagatatgctatgctgatggattagaacagaggttggcaaactatggcccacaggccaaatccagcctgctgcctacttttacaaataatgttttatcgaaacaaaggcattccaatttatttacatcttgtctatggttgctttcatgccacaatggcatagctgagtggttgtgagagagaccatatgaccagcaaaccaaaaatactatctagctttttatagaatgagtttgccaaccctcgattagaagactcaatattttaagattcagttggaatctatttgacctatagacttaacatgatcccaatcagttactgaaatctctctgggccttggggtctgtaatgtgggtaataacagtaactattctactggtgtgttgctgggattaagagggacaatgcagccaggcacagtggctcatgcctgtaatcccagcagtttgggaggctgaggcaggcagatcacctaaggtcaggagatcgagaccagcctgaccaacatggagaaaccccatctctactaaagatataaaattagccaggcgtggtggtgcatgcctgtaatcccagctactcgggaggctgaggcaggagaatcacttgaacccaggaggtggtgagccgagattgcaccattgcaccccagcctgagcaacaagagcaaaactctgtctcaaaaaagaaaaaaagagggacaatgcacggaaagtaccacgtctgacacatggtgactatttaagaaatctaagtgtttcttacatgtactggaatagcaataacaacaaacatatttttctaaagaaaataattatccatagggcacagggcattacatcatctcctctgtattatttcatttctggaaatatagaaagtactattttcagggacccaacagccatggttctggcatttctggcctgacatttatgcacatctcattttcacacattaaggaatcaatagtggatgaacaagagagtaacaaagaagaaaatatccatctgacaagatttcttcgtgtcctggccaactttctcatcatctgctgtttgtgtggaagtgggtacctcatttactttgtggttaagcgatctcagcaattctccaaaatgcagaatgtcagctggtatgaaaggaatgaggtaagaaaaacatcgctgatgaactgaaggttgatggcaaatactgaaatcactggttcctatg

SEQ ID NO: 26000 - DNA, 2300 bp, Homo sapien
aattattttcaagagaataatgaatgactggatagatgcatgaatggatggctgaatgcttagatggatgaatggatggatggatggatggatggatggatggatggatgggtgggtgggtgggtgggtggatggatggatggatggatggatggatggatggatggatgaatagacaagtggatggatggacagacggacagatgaatgctgacttagagtagaagataacttcatgggaaagacccaagaactacagcctctcctgtacatattgaaagcctgagaagggaattttggaaggactctgtccaggggagagcagaagctagatggtagggttgtggcatttgctggctttcactgttcttatggaaacagttggaccatccctagctccttcctaccccacacctccatcttctgttctagcttgctaatgaagagacaataaagaacatcactcactggactctgtttaactattacaactcttctggttggaacgagagtgtcccccgaccacccctgcaccctgcagatgtgccccggggttcttgctgggagacagctgtgggcattgtgagtagttacactctctaaaaaggtgacccctgttctcagttctttgttattccctccttgatgtttccatttgaggaataaccctgaaaacttaccagctgttcatccagcaaacatttcataatcatctaggaggaaataaaatgaccaaagcagatcctgtgacccctgggaactccaaatctctttggtgtctcaaaggttgtgattggtgtctggtagatattttcaatttttccaaaaacatagtaaattatgtctattctacaaatgcagagaaagctttgtccttcagtttttggtccttcttctatgtgcctctgtgcaaaacctgttttattttctctatatatcaaaaaaaagaaaaagaaaaagaaaaatctgactagcagaagatgaaaaaagctaggcattgtctccagtgactgacggtcacatttggtcttagtgggggcagctggcacttcagaataagtggggaagcaaggccttcgggtcctagtgatgatgactacgatgcattgggcatagtcaatttaacaggcaatttgcatttgcatacataattactaagtttcacaatagccttttgagattgatatcaatatcaacttcaagaggttcagagattattccaaagccatacaattggtaatgtggagctgggacctaaattaagcattttccagagccaggagtcgcctctcttcacacacaaaggatcagagggtcacagagacaaagtcaggtgggtgggggagagtttattagactctcaacaaactctcagggagggtgggagaagtgggcaaggtctccaaccaccccctcttcctgtgttcctctgcaggaattcatgaggctgacggtgtctgacatgctggtaacgtacatcaccatcctgctgggggacttcctacgggcttgttttgtgcggttcatgaactactgctggtgctgggacttggaggctggatttgtaggtcaccacttcatggacattccgcacaaaggaatttcaactatcttctttgatacttatagccagatgcattcttgggcatttcatttctttggaagcttaatgacggtctctgctctgtagagtagtaaagtgtttaatttgtatttcctttaagggtcctatttgccttcataagggaaactgctttttcccagtgtaatgaacaatgtgaccttctattctaggaaatggaggcatttggcctaggggaaagtggaccacacactccagtactgagccaatggttgatagggaattgcatctgagcagcctcaactctcattatgggggctgaaatctgacagtggaggcgaatatttcaggaagtcctggaacacaccaagaacacaataaccattggtcctgtcttctggatgatgctttgagaaacctcctttgacttgtattcccttatagccctcttccccacctacctggtaaatgtgtgtcatttcctctctgtagtgtccttctatgctctggcagaatctctggctcaggcacctgtgctgtacatgtctcttccacaacacctcactggcccagcctgcagtcactggtgtgcatgtaaggtacctacctcttacctgagctcctggtgaaaggctccgtaggatgttgacctatgtatccctcatcctggcctggcccaggtaagggccccagtacaggtttctgtcacatttttttt

SEQ ID NO: 26001 - DNA, 2300 bp, Homo sapien
gaagggatggagatgagaaaaccgaaggaaaccttttaatgttcataccacatccatatctgatcacaagcattggttatctcaccagcagaagcacttttcttcagccatctctgtaagtcagcaaactacttcatgacagctcctttgtaaccagaggacccaaatttttccagagtacgactggttaccttttggctcattgattgaccctcaggttttttatattctgatttaacacacaaaagtgtgttcatatagttacatatatatgtatatatgaaaaatatttgtgtacatatttctatatatgtatgtagagctgagacaaaagttttacaatgaacagcaccttactctaagcaacacactcttatttctattcgctttaatcctttttcttttttttttttttttttttttttttgacagagccttgctctgttgcccaggctagagtgcagcctctgcctcccgggttcaagcgattctccttcctcagcctcccgagtagctgggattacagacatgctccaccacgtccagctaatttttttattttttggtagagacggggtttcaccatgttggccaggctggtctcgaactcctgatcttaagtgatccgcctgcctcggcctcctaaagtgctggattatagcccacccaatcctatttttttaaatgctgtccattaatgcattctgacttcttgcttgaaaacccctggtttagtggataagcacctgtaactccaggaagattcaggattaagggcagaaataatgaagtaaattgaagtattagcattagtattttccattacattttggaatcgtctattttgatgtattcacgacggttaaaataatttaacatgctaatgtatggattaacttggcaattccattttaaaatattaaatggaataacgattctgactcgtaagtagacatgtgtaacagaattcaaccacatctgtaaaccatattgaaattatgagagtaagatttaccaaccacatttaggtttgacatattagatttgtgagtgaactatgtacttggattttgtcaagtaactcaatcgcttaacaaaataacaattaaatgtataaatgcagtttatagctatacattatttttaaaaatccccttcgaatgactctttaaaacataccaggggatacgctacttaagtataactaggttttggatttataacgttaatattaattattaaagcaaaactcatttctaaagagtcgcctgagtgcccaaaagacgccctcaaggacagggaagcagctgcgattcactcagcgatcaccagcgcccagaattcagggccgcccaagcggaggagcaacacgtggcccagcaaaaggagctgggtcccgtgcagcacagcaacaagaaactggcctaggaagacgctggagcgtctttctttcgcacgttactgcctgctacagtcatttaaaaaaaaaaaaccaaaaacaaaaaaaagaaataaattaatagtacgaagaaaactgcgcgagctacattcccagcagggtctgcgccagagcgcgccaggcaccgctcccgttacgggtgggaggaaaggatgcaccgcccacccggcgccggggaggctcgtccccgagtaggggacgggaacgcctgggtcccggggacgtggggcgcagggtctggggcccgaggccacggacgaagcgggaagccggctaggcagcggtctctgtctgggatggacgccgcgccccacgcggacctcccgccccgacttcacccagctctgctgcccgtaactcatatgacaagaacatcaggaaccggactattaccccgaaagggccttcccaagtcgtttcgccgcctgcagtgcccgaccgggggccgcgcgtccccggcaaccacgcccgcccgcgcagctgcagaggccggaaaaggcccgctcgcccgcgctcggcaccacccagcccgcgctccgggcgataccaccctgggcggcccctccaaaggccggagatggtgtcgtccccggcctccgattggtcgggggggcgggggcgtggcctctggagcctggttccgcgcgccggagcgcgctagccgcattgcgagccgaacccgggagctggcgccatggtgaggagtggttgcggggcgcgggcgacgcgacggtgggggtttcggcctgcgttcgggccgcagacagggcctgggcctgggcctgggcctgcgcctgcgcctgcgcctgccctgggaacgggttccggcagacgctgaggt

SEQ ID NO: 26002 - DNA, 2300 bp, Homo sapien
tttttttgacagagccttgctctgttgcccaggctagagtgcagcctctgcctcccgggttcaagcgattctccttcctcagcctcccgagtagctgggattacagacatgctccaccacgtccagctaatttttttattttttggtagagacggggtttcaccatgttggccaggctggtctcgaactcctgatcttaagtgatccgcctgcctcggcctcctaaagtgctggattatagcccacccaatcctatttttttaaatgctgtccattaatgcattctgacttcttgcttgaaaacccctggtttagtggataagcacctgtaactccaggaagattcaggattaagggcagaaataatgaagtaaattgaagtattagcattagtattttccattacattttggaatcgtctattttgatgtattcacgacggttaaaataatttaacatgctaatgtatggattaacttggcaattccattttaaaatattaaatggaataacgattctgactcgtaagtagacatgtgtaacagaattcaaccacatctgtaaaccatattgaaattatgagagtaagatttaccaaccacatttaggtttgacatattagatttgtgagtgaactatgtacttggattttgtcaagtaactcaatcgcttaacaaaataacaattaaatgtataaatgcagtttatagctatacattatttttaaaaatccccttcgaatgactctttaaaacataccaggggatacgctacttaagtataactaggttttggatttataacgttaatattaattattaaagcaaaactcatttctaaagagtcgcctgagtgcccaaaagacgccctcaaggacagggaagcagctgcgattcactcagcgatcaccagcgcccagaattcagggccgcccaagcggaggagcaacacgtggcccagcaaaaggagctgggtcccgtgcagcacagcaacaagaaactggcctaggaagacgctggagcgtctttctttcgcacgttactgcctgctacagtcatttaaaaaaaaaaaaccaaaaacaaaaaaaagaaataaattaatagtacgaagaaaactgcgcgagctacattcccagcagggtctgcgccagagcgcgccaggcaccgctcccgttacgggtgggaggaaaggatgcaccgcccacccggcgccggggaggctcgtccccgagtaggggacgggaacgcctgggtcccggggacgtggggcgcagggtctggggcccgaggccacggacgaagcgggaagccggctaggcagcggtctctgtctgggatggacgccgcgccccacgcggacctcccgccccgacttcacccagctctgctgcccgtaactcatatgacaagaacatcaggaaccggactattaccccgaaagggccttcccaagtcgtttcgccgcctgcagtgcccgaccgggggccgcgcgtccccggcaaccacgcccgcccgcgcagctgcagaggccggaaaaggcccgctcgcccgcgctcggcaccacccagcccgcgctccgggcgataccaccctgggcggcccctccaaaggccggagatggtgtcgtccccggcctccgattggtcgggggggcgggggcgtggcctctggagcctggttccgcgcgccggagcgcgctagccgcattgcgagccgaacccgggagctggcgccatggtgaggagtggttgcggggcgcgggcgacgcgacggtgggggtttcggcctgcgttcgggccgcagacagggcctgggcctgggcctgggcctgcgcctgcgcctgcgcctgccctgggaacgggttccggcagacgctgaggttgcgttgacgctcgcgccccggctcccgttccaggtgctgttgcacgtgctgtttgagcacgcggtcggctacgcgctgctggcgctgaaggaagtggaggagatcagtctgctgcagccgcaggtgggtgagatccgtgggctcctttggcggccccgcagaccctcatcgcgcgggtcccagcatgcacagcgcgctcccacgtggccggccgagcggttcggggcggggggacgggcctggaaagctctagatccgggggtctttaccttgacccatgggtagaatcgctctagcaattagaaataagcctcccggacgccgcccccgaacgattaaagcagaagctgggatgtggggcccaggtatcagcatattttaagagcttccaaggctgagaaccgctgcttgactgcgcc

SEQ ID NO: 26003 - DNA, 2300 bp, Homo sapien
aacacaatcaagtgtctggttctctgctttctgttcgattggaaagggcagttgggtaaacacaggctgagaaaaaaaggtttggttccagaaggcaaattctacgaaatactcgagggtgtgttacaagctattatttattgcccacttgtgctatcagacctgaatgcagttgttcccatggctgggccaggctttgcagtgatgacttgcgaatcaaatctgtcaatcccctgagtgcaatcactgatgtctccatgtctctgagcaatgcctgatggggagggatctaggtatgccatcccagcgtgctcggtgggaccagggtagtcagctgagggatgttagagttgatcgtccttcagcctgttagtgggaactgtgttctttcccctgaggggttgttcatgaggacctccgcctgctcttggagacccacctgccgtccaaaaagaagaaagtactcttgggagttggggatcccaagattggtgccgcaatacaggaggagttagggtacaactgccagactggaggagtcatagctgagatcctgcgaggtgagaccatcatctgttatattcctgttatcctggacattttgggggaggaggttctggaaacttggttgcttgttgtgatttctgggaaggccttcaggctgggctggtgcccgtgggtgcgggagctagctcagagccccttgttgctcaccgtcttgccctcttcttaggagttcgtctgcacttccacaatctggtgaagggtctgaccgatctgtcagcttgtaaagcacagctggggctgggacacagctattcccgtgccaaagttaagtttaatgtgaaccgggtggacaatatgatcatccagtccattagcctcctggaccagctggataaggacatcaataccttctctatgcgtgtcaggtaaagtgcaggggccacccataatactggagcctttggtctgtagttcagttaattttgagtcttgatgaggactgaccatcctgtgggtagaaccatgtgggctggggctgggtgtaggcctcctggtgcttaccacaggctgtgttcttacactgactgtatagaaagaggaggtagagtaaacctaccccatatacacctcagctcaggccctgtgcctggtctgtattgtgaatgggggaacatagaattgaggaagatttggatctttgtcccatttcctccaggcagagtaggtgtggagaaggcaaggctgtagctctatggtttttgatgaagcagctgggccagggagtgactgtggctctttgcagggagtggtacgggtatcactttccggagctggtgaagatcatcaacgacaatgccacatactgccgtcttgcccagtttattggaaaccgaagggaactgaatgaggacaagctggagaagctggaggagctgacaatggatggggccaaggctaaggctattctggatgcctcacggtcctccatgggtcagtgcagagcctggcaacctgcataaggtatggggctctaaatagctggcctcttgcattcacacttggtttttcctaggcatggacatatctgccattgacttgataaacatcgagagcttctccagtcgtgtggtgtctttatctgaataccgccagagcctacacacttacctgcgctccaagatgagccaagtagcccccagcctgtcagccctaattggggaagcggtgcgtcacaggggactcaaaaatgggagaataaggactgttgccatgtgcacctgcactgctgtatttcgtgacccaccatgtcttccctagttgtgcttgatggggaggtggggagcagggctgtcgtgcaactgggcaggtcagcagttcatttctctgactgcttccttgactctctctccaggtaggtgcacgtctcatcgcacatgctggcagcctcaccaacctggccaagtatccagcatccacagtgcagatccttggggctgaaaaggccctgttcaggtaccagtgagggcacctgcccacaatcaggtgccacttctggtgcccactgcttgttgggggatcacggtgatggctgaccagggctccctgacctatacaggcctctgctatgggggtgatggccagtcctggtgtctgagtgattcccagggcccagcaaagggaccaagtttccaggtcagcgacattggatgccttccctctgcctctgggagctatgggttggcatgcattggggtagagatccaatctggcctgaggctcactcaggacttcgg

SEQ ID NO: 26004 - DNA, 2300 bp, Homo sapien
gtaacagaaaatgtagttttttaaaaagagtaaatttggcggggtgcggtggctcatgcctgtaatcccagcactttgggaggctgagggtggcagatcacctgaggtcaggagctcaagaccagcctggccaacatggtgaaaccctgtctctaataaaaatacaaaaattagccgggtgtggtggcgcgtgcctgtaatcccagctaccagggaggcggaggcaggaaaatcgcttgaacccgggaggcagaggttataaatcttccatttttttcttagtcagaaggagaaatatttggagaagaaaaatagtgacgaatattaatagtgatgtggaagctgggacgagggagtctatgggagcaagacggtggtgctctctggttttggttggtttcatgggatatatgaatggaaatagaggagtgtgttatactaatattatattagctataataacagctctatatttacccagtacttttcatttgttcaaaactcttacacattacctagtttaatcttctcatcctactactatataggagaatgtcgcacctaaaggattgcagaggaggcacaaagcctatgcatattccccaagaatagaagcactgggaatgcctttgcgttgccacctttttggctggttgaggtatatacgaaggaggaacttatcacagagaacctagctagtggttcttaaatttcagtgtgtattaacggggagcctgttagagatatattttctgggcccccatcactgagatttggattcagcaaatgaagtatgactcacaagcctgcacttttaacaagagctctggtccatctggataggtgatccaaaaccatacttccagaagagcgggtgaggcaaatcttcctgtaccagtttgtctttaggtgtgtcaattgtacacacctaaaatcgtgactggaggccgggcttggtggctcacgcctgtaatcccagcactttgggaggccgaggcgggcggatcacgacgtcaggagatcgagaccacggtgaaaccccgtctccactaaaaatacaaaaaaaaaaaaaaaaaaaaaaaaaaattagccaggtgtgatggcgggcgctactcgggaggctgaggcaggagaatggggtgaacccaggaggcggagcttgcagtgagccgagatcgcaccaccgcactccagcctgggcgacagagcgagactctgtctcaaaaaaaaaaaaaaaaaaatcgtgactgtaattgttttgagacgggtctcgccccgtctcccaggctggagtgcagtggtgccatcacggctcactacggcttccacctcccgggcttaagtgatcctcccacctcagcctcctaagtagctgggactacaggtgtgtcaccacgcctggctaatttttaaattttttgtagagtcgaggtctccctatgttgtccaggctttttttagtttttatgattgttactttaaggatcagtctgaaattccctttagtcacacttacacgcttgaactcatttctgacactagttatgggcctgtcctggggagttcaagtccgggacacactattagggaaataactgtcagagcaaagaacaaaaccctgtaagaaaaaactacgaggcgacgggtaatacagaggtcctgggcactctcggagactggcggagaaacccgacacacacctcccatgtctgtactgtattcctcgagagcctgacatacaggtattcagtgagtactggttaaaagaataacaaacgcattgacacacaaattttaacagcttcccaaggattttctctcaatcgcttgttaagctcaggtcctcgtctgataaacatgacgctacatttttccccctaatgttattttgaagtttcgacgtagattaaatatggcgactgaaaacaaagcaagagacaaagtgcttgcgcatcccatgacctccccaccggcaaggaaaaggagaaacaggcgtgagcaagcagtgctggttggcgcagagagagaaataccaggaactcagtacaggccggaagtcggggtacggggccgcgccagcttcaggcgtcacttcccacgcgacttcctgcgggaaacatggcggcattgagcggagtccgctggctgacccgagtgaggccccgggacatgtcgggcaggggcgggcgaaggagcggagagtttgtcctagggtttcctaaacagggcaaagtcaactgtagtgttcggggtctggatgtctcaaagctgaccttacaggcttgtgtgtccctgttgca

SEQ ID NO: 26005 - DNA, 2300 bp, Homo sapien
agacagagcaagactctgtcttaataaaataaagtaaaataaaataaaataaaataaaataaaataaaataaaataaaaaagaggggatggggccggatgtggtggctcaggcctgtagtcccagggctttgggattatggagggaggatcacttgaagccaggagttcaagaccagccttgggaacaaagcaagatctcatctctacaaaaatgtatttttaaaattagctggcatggtacgtggtggcaggcaccaagctactcaggaggctgagtggggaggattgcttgagcccaggagttccaggctgcaatgagctgtgattgtgccactgcattccagcctgggcgacagagagagactgtctcaaacaaaaaagggggatgggggagggatggggccaggtgtggtgggatggaaggatcacctgagggcaaggagtttaagaccagcctgagagaccacgtctatgaaaaattttgtaaaattagccgggcatggtagctcacagttgtcgttccagctgctcaggacagtgaggtgagaggatggcttgagcccaggaattcaagactgcagggggctctgatggtgtcactgcactctagcctgggtgacagatcagcaaccactctctaaacaatttttttttttttaggccgagtctcgctgtcacccaggctggaacgcagtgacgtgatctcagctcaccacaacctccgcctcctgggctcaagcaattctcctatctcagcctccggagtagctgagactacaggcgcatgccatcatgcccggctaatttttgtatttttagtagagacagggtttcaccatattggtcaggctggtcttgaactcctgacctcaggtgaaccacctgcctcggcctcccaaagtgctgggattacaggcgtgagccactgcacctggcctctaaacaatttttttaaagctatgtgcttggtgagtgtgtcaggcaggtggtgctattgtgcttgagaacagcctctgagtaatctggccacctttgagactaattttcagatttcccttttccttcctgattttttttttttttttttcagatggagtcttgctctgtcgcccaggctggaatgcagtggcacgatctcggctcactacaacctcttcctcctgggttgaagcgattcttctacctcagcctcctgagtagctgggatcacaggcgcccgccaccacggccggctactttttgtatttttagtagagaccaggtttcaccatgttggccaggctggtctcaaacacctgacctcgtcatctcccagcctcagcctcccaaaatgctgggattacaggcatgagccactgcacctggcctccctcttgaaagtctaaactgtttctcctggaccatctaagagggttcagaaaccacctttccacatgtggcagtctctgaaagggcgaatcccatctgacacttatgggcattggcagtacaggccggtatgagcatcaataccagtaatacatttgcagtgaaagccactgaattggcccaagggccccacatggagcgttacttaatttgccttcttccactgcaaactttgctcaaagcctatcagttgaacttgggggattttttaccttctgggaaaacaaaccaaggtgtttagtgtgtgcacatcaggagcaaaagcaacagctgccgggagctcaggctagctcacagggtgcagctaggaggcttttatttctccttggcccctggcttcagggttggcattgctgctgcttcctctgtgtagctccagtgtccatccagagagttcccaagccccgaggcccctttcattttgtccccagtccacactgcagtcctggggtggtgccttcagccatctctgcacccatccacggaactaggtaagatggtgaattgggcacttgggcccaacagagatatacaagttttgaggactttgcctccgtgaagttccccagcatactcaactttttcattacaacagctgagccagacacggtggctcacgcctgtaatcccagcactttgggaggccaaggcaggtggatcgctggagcccaggagttcaagaccagcctgagcaacatggcgaaaccccggctctacaaaaaataagccaggtgtggtggtgtgcacctgtggttccagctattagcgaggctgaagtgggaggatcacctgagctcaaaaggtcgaggctgcaatgagccgtgatcatgccactgcactccagcctgggtgacagagcaagaccctatct

SEQ ID NO: 26006 - DNA, 2300 bp, Homo sapien
cccactgctgccaggaggtcccaggccctgaagcccaagagagaccacggagtctgagagcagaagcaggaaggcagggctggaagggagccagcacacaagggccccaggagtggcttgctgggggccagtcaggcatccttggcagagcgttcctgtgaacggtctcagacacaggaggggcagaaattgaagaaggaggcgaggaggaggggacagttcttttaagaatggggagatctgagcagagaaaagaacatattgagacacaaacaggagatcggtggggtaatctcaggaaaggcagaagacaggactaagcaaaaaggttccacatccatctccacagtggaagaccgagagaagagaacgggtgaaaagacagaaacgaggaggagcatacgccgctgatggtgccagcagggttctgccaagattccctgagtcctctccactgggtaagaggaagggtgtctgctggaaatgagagagccagaggtgggtctgaatgttggggagaggagtggagcaagtgtggaacagctctgggggggcttctcacatgtaatgtgtgtacaggtcttggtaaattgcaggttccgattcagcaggtcccggcagggcctaagagtctggattcctcaccagctcccaggtgatgtcaatgctgctggtccggggaccacactgtgagaagcaagatttagagaggcagatcaggagatggagaaagagactggcttaagaattgtcttaaggagaaacccatgtttgataatcccacctagggtaaaagctgagacctgaaggagtcctggtgggaatggcagccccctgtgggtgatggggagaggcatagagagaaggggtggtaaagagaccaggaaaggaggtgagagggcctctgtgatggcaggagaaccagcagtgcccccaggacgcctcatctgggccaatgtgtgacagaacgctaactcacacttggaggccccccagaagaggatgggagtgagttggagcaggaaggtgttattgcaggggtgtctgagcgtgaacatggcaggcagggcaggtggcccccatgctgttctgcaggaaagtgctggactcagtctgggcttgctcgaagcctggccaggacaacgtggggagaggggcagaaatgtctctgccccacggtcaagggccagacgacttctgtgccaggaactaataaaaaaaaaggaatgggatctgagacgggacgcggctggggagaaacaggaggtgagctgggctctgagcctacctgtccaactcgcaatcagaaatcaggaggttcctgaaaggcacagatggaaactgaaaatgctttaggcttaggtaacccagcatcaggaatcgggatggttggatgcagggacctcgcccagcttgtctggggccgcagcctacggcagggacgtttcagtccttagctggggtgaaagtgaggtcagggtcgccggggaaatgcgggagtacagtcacgcgggagaaagacgtcaagagcgaaagctcggaggcgtcaaaatgagcagcaagtccaggcacaaggcgtcgggcgcggagagtacggcgggtgccgggggagggagatgaggccgcgaagacgccggggcttcgtccggcggcgacggggaggccgcggaggttcccgagcgcagcggggcgcgcacctcccgctcgggccgggctccctcgccgcgcggccccggatcctccctgcgcgggtttccgtggcccccgccgggctcttccgttccctcccgcggcctcgaccaggccgcagcccccagcccaggcgaccgactcgccagggtccgccccgccgccgcggcccgggcccggccgctcctcccccgatgatgtcacgtccccggccgcccctcggccggccgcgccgccccgcccccgcctcccccgggcccccgtcccctgggcccgcccgctcccgacatccctcctcccgcctgcgctccctcccttcggctaccgctcccccgggagcggcggcggcggcggcggcggcggcgggatggcccgggcccgaggccaggccccggggagcggcgggcggcggcggccgcggcggggcggcgcgggaaccgggccccggggggagtcggccgggctgctgctgctgctgctccaggtgctgccgcccggggctacggcagggccgggacgccggggcacgcggggcgctggcgctggcggcggcggcgtctgctggcccggcgcggccccagcctttccccgggacgcgcggctgctgctgc

SEQ ID NO: 26007 - DNA, 2300 bp, Homo sapien
caaaaaaaaaaaaacaggaaaaaaaagagtacaacagccagaatgttgtccatggctaccttactggtaggtgacaggaccaaggacccaccctcccagccaactgccaggaaggagaggaggacaaagtgctcatgtgtttgtctaaaaagcaacctcatcagcgcatatgtgtttttttcccaataactctatgtaaaaaagaagacattcacggtgtctctgtaccacatgtctgacagatacaccatgtgtatatggtgggtatgtgctctgtatgattaagcttttcctatgtgtataatggatataaaatgtgtgggaggaggatatgccatgtgggaggtgaatttgctgggggcatctgctatatgggatggctttacagtatttgcaataactatattttgggtaatcatttacaacataaaatgcgtattaatgtatttgttctgtgtatttcctatttctctgtgcatatactgtgtagggtgggcatacaccgtgcatgatgggtacaggctctgtgtctgcttagtatgccatatgtgtgggatgagtgcaggctatatgtggagtacatgttgtttatgcttgtgtgaaggttataccccgagtgtgtgtgatggctgtattttgtgagtaatagtatccaaggcataaacagtgtctacaaagaatgtgctgtgtctgaggagtgtacatggtgtgggtgatgggtatactctggggagggatgtgttgtataacagatgtgctatatgggtgatgagcatatactgtgacgtatacacagtgtgtgataacattacatggggtatgtgtgcgtacacgccacatacggagcatatattgtatgtgtgatgggtatacagtgcgttgggtataatgagtaataagtataggtagtgtatataatggacttactcttcatggtgaatatatactgtgtgggagtgctaagtatacactttgtggcataaataagccctgtgtgatcagcacacggtgtgtatggttgtatagcgaagttgtcattgtgatgggtctgtctggtgtgtatcaggcaccctggtatatggaggccatgatgggaatatgggatgtgtgcctgagtgggagcaggcagaggggactcatcctgtggggagggggcatggcagggagcagttggatcttcatctgtttccagaacccccagacccttgagcccaccgaccacactgtttcaggttcttcctcaagttcttcctcaaatgcaaccagaactgcctgaagaatgcggggaatcccagagacatgcgccgcttccaggtgggtctggagagagggtttccccttgcaaccccaccctttcctgatggaggggaggggagggggaagggaaggctgtgaccctgccaccctgggaaaggcctccaaggcagatctctgcccagccctgtgcctccccagcctggttggtgcctgctgggggtggggcagctccttctcaacttgtgctggctgccaagggaggcttcattagagtcccacttaagaagatgctaattgtgacatttttacatgattaacgacccaggcaatttgcatagcgtgaagcggagagcagctgcccttagcacatccccaagctgcacacccctctcagtgcagggcgggggaagaaggcagccccagttttctccccagaatagggcaggggctcctgctgctgagttctccggctgatgctgcccacctccacttgcctaagaccccattcctggcttggaggtccgtggatacaacccagcattctgtgtatgcaaaaacagtagccattctttgcctaaggagccagttttttcaggggtctttatttttgtagcgcctggggagtcagttcatctgggggtatcacctgatccagctggcccccttccaccagctcagacactgcaggattgaagccctcctcctcccaccagtgaccctaaattccagcatccaaccaccagcctcaaggtgctggttccccaccacattcccctcccgggagcccccgagggccccagccaggctggcctcggctctccccgcaggtggtggtgtccacgacggtgagcgtggacggacacgtgctggccgtgtccgacaacatgtttgtgcacaacaactccaagcatggccgcagggcgcgccgcctggacccctccgaaggtcaggacccccggcccagccccggccgccgcgggcccagccagccccccaggccccacctcagcgcggtcccctgacctgggtcctctcctgcctcc

SEQ ID NO: 26008 - DNA, 2300 bp, Homo sapien
ggagccccaccctgcgcactggtctccgttcttggtgataggagttagccgagctctacgctgtggccacgacccctagacggccccgggcccctttaaccacctatgcctgtgatcgctccgctcgcaggaccgtctttccctggctctgtgtgtttccctccctggcctctggctccttagtcccttccccggggcaaagtcccccccacaaccaacattcttactccctcagccatctcacctcctgaacattgtgtctcccgcccgcactctccagggtttagagcctctccaaagggatgtttattccaaagatgccaatggggtcgctgctccccgaatcttctctgggtctcttggttcccccacgctaccccaggcctcactctgcatgtacacgcacacacacgtgcgtacatacacaccccttgcacgacgccagggcgagcagtgaacacacgtggagaggcagtgtagaaccccccagcctggctctatttggccgctggccgagtcttctccatttccatcctcccgccccgccccagctgagccacccacttctcctctccaccccaccgcagtccccaccatcgcgcagccccccgcaccgatgctcatcgagcccttcgagggacactcggtagtgaccctacttagcctccccggagctccagtctaacgcggaaaggctgagcagagaaccgcatggggtgggtggggtcacgcggtcaaggggctgacaatcaaggaaaacctttggtagggagtgcctgctgagcccggctcaaccgaaacccgagggctgagtggggaggttgacctggggaaggaagggtggttgcagaaggaatgataaggaccgatccccagaagtgagtgctttctctttgccgggaaactaaaggaaatccactaagtcaggatcagaggtgaaggtagggctctgagactggtggattaggtcggggccaggctatctgaaaagggcggtgcggggatcaggaaaaggggaaggaggaggagaagggcgtggggagctgggtcagacgcgcatacacacacacaccccttgcacaacgccagggtaagcagtgaacacaacacacgtggagatgcaatgtagaatctggccgctggccggatcttctctacttccatcctcccgccccagcccaagccacccacttctccagttgcttccctggggtgcatgcaaacctctagccttcagatgctgcagagagtccacttgagccgtgataaatggagattgttaagttttttcttttttataataaactcctgatttgaccagatgaaaagagaaaactctccatcgagtcctgcccttaggactataactcatatgtgtatacggtttcccttttttctaatcacaaatgggtgcatgtgtgttcataccaagcgcctagggccgaggacagaggctggctcagtaaatatttgttgagtaaacaaacgaaagaactgaaacttccctgaatctcgctgccgggggtgcctggagttttccgggggacttgggctgggcctggtggagggggctgcagcgaggctctcggactgggcgctggcctgcttttggcgccctgcgtctcaccctgggagtggggggctgcgggggagacgtcctccaaacgccgcccccttccccagctctgaacgagcccaccattgactacggattccagaggctacagaaagtcattcccagacaccccggagaccccgagaggctgcccaaggtactcagaggggcggggcggggcggggctgagggtgtcctgtgggcaagggggtgaggaggggctcccgagggccccttggtcgcccccaggggctgcccctccgtcccgctgtctctccccctgtccccaggaagtgctgctgaagcgggcggccgacttggcagaagccctgtacggagtgcccggcagtaaccaggtatggcgcctccgccctcccagcgccgccgggaccggggccccccagcacgcggcgcccgcggctgccccggccgtgccccgctcttgtcttcgcaggagctgctcctgaagcgcgcggcggacgtggccgaggctctgtacagcaccccccgcgcacccgggccgctcgcacccctggccccgagccacccacaccccgccgtcgtgggcatcaacgccttcagcagcccgctggccatcgccgtcggggacgccaccccggggcccgagccgggtgcgtgggccgcgcctccccgccgtcctcgggcgccgccaccgcccctcccc

SEQ ID NO: 26009 - DNA, 2300 bp, Homo sapien
cgtccggcagagcgagcgagttctgtgtgatcagacagaatttgagtttcagtgtccaaatcaggagctgccgggcattcagcaagttacttatttgaacttgtttcctcgcagtcaaatagggtcaattccaccccctgcttaaggttgatctcggatctgaatgtgccactgtgcctaaagggccagtgtgtgatttcggagtcccagccctgactgtgggcgctgaccacatcccatctggcttcttagagtggggagctcagagctgggtggacaggcaatgtctgcatgtcatgagtgagtgaccttccgaacggctttgatgccttgtcattttacactgccctcaagactcttccatcatcaagttccagatcagcatgttcacagctctttttagcttagctattcagcaggcatttataaagcgcccactgtatgcaaagcccagggcttgggggatccccccactcctgtcacctgcaagaagcctccctatcaatcataagagagattgtccctgaagtcccaggcgactctgccgagctggagaggtggtgaaggctgtcccagaaggaactggtcatggctttgcccgtggtgccctctcctctccctgtcccatatttgccattgccgagactgcactgtctgtccaccagcctggctttccttgcagggcgtgtgtcctgcctgctttctggctgaaggcttgagcctggccctgtcctctggcctgggctcaacttctgggacccaaggccccataagccagagtccacataggccatggccttctggtgtccctcccaaggcccctgcctctcctggctctttgctcaggccaggattgactgctcctccttcccttcagttctggggcagtaccctcacagcctctctgtgggcacccccttgggccaacactggtgggggtatggaacatcacatacactgtggtcaacagtagaggaacactctgccccagtgtgcagaacccagcccagctggggtcttctgattcagcaagaagatcaagaattctagagctgcttaaacccagcatcagctggagacacactggacttgagggagggttggtcccatttcatgatattgtcttgaccgaggcttacccaggtacccttccactccccacgttcagggtgctttgtggcccgactccaaggggtgtcattctcattgagtttgcgagaacattcctggagtgacatcagaactgccccagccagaggctcaggggctgtttgcttgggtctctctttgtttttctgcttcagccaccagcaaccctggaatgaatcacaactccccacactacctacccaaggtacaaaatgtggccgtgagccctgggcattgagagctatagtacattttctggcattggtctcaagcccttcatcgggctctggggcctctccagctggcagtaactgttgtcttaaaggagatgaggctgagggcatttggaagaggggcagctgttgaaggcattcttgtatcaagggaggtaggagggccctctgatgccaaaggcagccttctcaggctattgctttcttccaggaagccccacccaccccactgcctgctgcctggacaatactcagatcacagccttaccagtctttacaggagagaggcagggaattgggttcagatgaggatgtagaaaggtgggatccagcgatgccccaggcctgagcccccaggagaggaggctgcaggaagagggggcaggcaaagtctgtgtgcaggaggctcccttgccattcccaggagggcaagccgcagcctgggtggctagggagtttgagagcaggaagatctgaggatgtacatccctgcaatttgctttaaaattgaccagctggaagtgggagattcaggagaccacccccccccacagggcccaggctggagatgacaaggacctgcattaagctgtaaggaaacaaagtaccccagggtgcagggggaagtgggagagggacagaggagcatagggaacattggcaaggagagcatatttgaggaggaagttggagtgctgtttgtgatgctgggcagagaggcttataacaggagcctgtgcgttcccccaaacttcatccctaactacttgttccagctcttctgtgactcctgaactatgactctagccttggcaccccaagcaaggctcataaatgtttcctagcatctcagaatcccaggggttttcagcagaaatcctgaagtagtccagctgttgctcatctcatttttggggg

SEQ ID NO: 26010 - DNA, 2300 bp, Homo sapien
actagtagcatatgtgactcccctgagagtatgtgaaggggagaaagtatttgggtatgtgggtgggagattgactagggaatggagcagatggagagggtgtaggtgaagagtgagcaggttgaggaggatgtaataggcaaaaggaaggatcatctaagacatcagaaccgggaagggaggacgttccttggaagcatacatgacaatttgtatgtaattttgggtttggatttggggataaagcaaaaaagacctgaacatatgggacttctgaatcctttccaaggttccggcaaaaaatcagttaagttgtaaagtagcattgcaatcccaagtttcattaattggccaaattgattgattagggagcttgtattgaacccaagcaatattagaaaaaaggatatgctttttaaactcttatttattttttatttgtattttttgagacagagtcttgctgtgtcgcccaggctggagtgctgtggcgccatcttggcccactgcaacctccgcccccggggtacaagtgattctcctgcctcagcctccctagtagctgggattatatgtgcccgccacatataattagccccctggctgattttttttttttttttgtatttttagtagagacagggtttcgccatgttggccaggctgatctcgaactcctgacctcaggtgatccactcgcctcggcctcccaaagtgctaggattacaggtgtgagtcactgtgcccggccaagttttgcatttttagtagactcccggtctttaactccggacctcaggtgatctgcctgccttggcctcccaaagtgctggggttacaggcataagccattgtgctcagccttatatgcttatttttaagagtttgtgggtcaaaatgagaccaatgggaccatttttaaggaggcaatccaagggcgagttggatggaactgaattaattgaaccgaagttgggtttagacaaggaactacaagatccctgaggcatccctgtgtagaattgagatccaccgcttccaggacaaggcttatggagtgttaaaatgaaagtgccctgccactctgacaggcaatagctcttttgtcttggccttggggtaataccgggggatggcgcttggccagaaactgtcagttgccaacgagaactcaagctggttcactggcagtccgaaaacagaaaagagccctggccagtccctcacccctaagggcaaggacagccaggtatcccttctctagggcttcaggatcccacagaagagctgcctccaccgggaccggcagttccccaaagagtaaagaaccagaccgtggaaggaagcagagagaaaaaggaagagggaaatcccagtgaagtccccgtatgggccaccaagatgccaggcgaggtgtcagagctccggaaccgggaagtggttggctcccgggtggtaaaagaacttatcaacaaccgtgtaggtctgaaaaggaaagttttattagacggaaaggacgaggcagcagagcgcagtaggcgcttcagcaagagaggactgagctccctgcggggaactgcagggtaatttggaccacattagtcacttaggtcatggtaaatggttacatttgtcgatattttggtgccttgatgtcagcaaagtttgcacaatgggtcttaacgtgcactcattccggaaacgtacagaaattctagttacttataaattcttgggacggaagcttggtaccagatgtggctttagacaatagggaagtgtcattctgaattgctcagataaggggctttgcctcctgttggtcgacttgatggccaccaggtgatctctggtctcttcagtgtggctttgcagactataaaggcgcagcgcgccaacgaggcgggttggccccagacggcggagaggaagggcagagtcggcggtcctgagacttggggcggccccttggaggtcagccccgctcgctcctcccggccctctcctcctctccgaggtccgaggcgggcagcgggctgtgggcgggcaggaggctgcggaggggcggggggcaggaaggggcggggggctcggcgcactcggcaggaagagaccgacccgccacccgccgtagcccgcgcgcccctggcactcaatccccgccatgtgggggctcctgctcgccctggccgccttcgcgccggccgtcggcccggctctgggggcgcccaggaactcggtgctgggcctcgcgcagcccgggaccaccaaggtcccaggctcgaccccggccctgcata

SEQ ID NO: 26011 - DNA, 2300 bp, Homo sapien
cctgaggtcaggagtttgagaccagcctggccgacatggtgaaaccctgtctctactaaaaatacaaaaattagctgggtgtggtggtgggtgcctgtaatctcagttacttgggaggctgaagcaggagaatcacttaaacccgggaggcggaggttgcagtgagccaagatggcgccattgcactccagcctgggcaacaagagcgaaactctgtctcaaaaaaaaaaaaaaaaaaaaatagaaagaaaggttttcctcctcagagcactccctcaataaaccatgtgtacaagtatccccatctcaggctctacttttagaaattatgacccattgatatagtctgaatatttgtccaaatctcaagttgaaatctcaaatcccaatgttggaggtagggcctgatgggaggtgtttgggtcatgggggtggatatttcatggcttggtgctgtccttgaaatagtgagtgagttctctcaagatctggttgtttaagtgtgtggcaactcccctaaccaccactctctcccttgctcttcaccctttgccttctgccatgattggaagtttcctgaggtctccccaaaagcagatgctggtaccctacttcctgtacagcctgcaaaactgcaagccaattaagcctcttttcttataaattacccagtctcaggtatttcttcatagcaacgcaagaatggcctaatacacccaccatctggtgcagtgcctggcacataggaagcacttaaataaatgattgttgaatacaaaataaactctgagaaaatcacagacagaactctcctatacatgcatacagagcacctggtgcatagtaaatctttaaggagctttagactctccgatccccccatgccctgcaatatggagtagcctcatcttggtggactcatcaggacatgctccccaggtctgtatgtccaggaatgcaattgtgtggatgcatccaggattgatcaggctcagggaattgccaatcttaaaccttaatgttcctttacaagcacaattggaacttaatgccaaaaaaaaaaaaattctgggatcttctgttataccctatcccattacggacaaatctactcgtaaaacccagctgctggataagcaagaacagccagaccaagggcgatcagtgcatggtcattagggctggtgaccctcgtctctgggcaaggcctgctggaggtggatatgcagcctgattcttgttctgtctcctcctctcctaggggctgtatggccactgtctcccattttgccacccctaccagttttccttcaaagtatgatatgtgggcaaagattaagttctcttaattatgacacatttccgctcttgcctctcaagtcactaaactgagatgtgctggacccctatggccaccacccatttacagatgatcagtgtaatctgatatactgataatccaagtgactaagcccttcattatatgttcattttccttaactccattctcagactgtaaccttaacctctaataagggggttactaggtcatagtcctcttaagttcatgtcctctacctcattactggaaccccagtatgcataacaccccctataaactgtagtgcttagaatacctgaacagccccctcctctctcacccccatttagcaggttatgcggaagcccagccccagaagcctcaggcagtcccctggcagagcccatctctgcaatctggaacttcaggcctgaaaaatcccctagaaggacccacagggaagacagctggggacagagatattgaatgacttcgccctggacctgcagctctgcaaactcacaggaagaagaaagcagacctcgctcccttggacagatgcccaagtagtaatggggttagaatgccttcctgacaactcagatccccaagggagggccctagggcagagaatcagcaaaggcaagaggatgagtcttagttctcagaaatccctgacttcccagctaagccccacctaggccaccagctgcttatgaggtcagagcagcagcagcagcagccccctccctaccccacggccccacgtggtaacaggtcacaatgccccgggtgcccactcccagaatgctgaccaaagtgggaggaggtgaggagggtttgctgggtgggtatgggggagggggagactctgcaggagcctaattccccactctgagctcacccttctgtctgcccgggccctaccccttcccctactctcacccttataatccttttcagcactaggtcttcccgt

SEQ ID NO: 26012 - DNA, 2300 bp, Homo sapien
gtgatgcactggggccctcagaggacagggctcagaaacagaatgggacacagccactcaagggaagtagaggtcccttgaaggactcctgtggcttctgcatgcaccttcctcaacccctgaggagggttagatcatcggagcaatattcttgtccaagttccagttttctacagtctggctgtgtagtcatttctgtgtgcttgaaggagcttgtacaagtattgaccacataaggcagcatgttgcaagggtcctacccaacagattaacaggaaagaaatggggcatgggtgtgaggagtggaaagacagggaggaagggccatccaggcagtgtggcagaagcaaagaagcccacagctggggggtgggggtacagtcaactggcagggtgtggaacagggatgttgcatcgggaaggccagccttatggacttgggctcaatggacagtgttccataggcttcttagttcagcctcagagtcccactgtgactggtgcagcttggtgtagctctcctcgggccccatctctgggcctttggtggaggcttctgagggccccactcccccttgttttgaggcactgctccccatcacatctcaactgtaacactctgctgcagaacctctgtttccatgtcaacaccctagtccctgcatgcacacaaagagggcaccatggctgattgtctccatggctgcttctcccctgcatcgtgtccttaaagggcaagtttcctgctgcacttgttgacgactcacccctttcagccccagtgtctagcacaatttccctgtacacagtatcaacagaattgtatttgttgaatgggaggcacgagtcatgttagaaggccgattatggcagcacaagaggatgtgggggcacagagagtccaggaatatcatagagacagacctgtaacacttggtagccaggagttggagcatcagggaggtgaatacagattttggttaaacatccccattttcttgtttagatgtaataattgatccccagcaaatgatgggatgccctgaaggttgtaaggctagttttgatggcttaggcctttgaaatccaatttggagctacagaagttagggccatgaaaagggagagttgatttggggtggaaggatgagttggtgagtttggtcacagcagattgatttgaggttctttggaaatacagagtagatttgcagtcattggtacccagcagagagattaaaactgagggcacagtggcagctgtgagggagacagaacgatgctcatgctttggattggcaggaaagaggggctatggcggaaacaaaaggagatgagggcaggggcacttttaggaaggactgaggctgctggcagtgtcacatgactgttgagaagaagggaatttgttagcaagtggttacatttagtaggaaaagtgttgagggcatgggtttggattaaaggagggagtgagcaattgaggaggaagtggaaattgggcaaaacattccttttggaagtttggatggtaaaaggaagttgttggggaagggaataacaggatctttatgtttggcttatttactggtctatggggaggaggtgggcgaggaaaaagctagatacaagacctgggcaaacaaagaaggctctggagggaagtgtaggttagaacaaaggtaagtctgagaggtaagagagaaggaacacactttgggcttggcctgaaatgagagggaatgaggaaaactgggtagagggcaaggatgctccagcctggtggctctgctctccaagaggaaggaatagagctttagaagtgtggatggccagagttcagggcagcctggctcccaagcctacctaaaacaaccatcccattcctagacccgtggattgaggactgggcagagatgaatcatccattccagggaagccataggcagaccccagacttcggggagcacctggccttgctcccacccccaccttcttctttgcctcctcccatgccttttccctacccgcttcctcagccctcgccacctcccctcttcccacccctgccccaggataccccttttttcccaggccagcccttcccaccccatgaattcttcaactataatccagtggaggacttctcgatgccaccccacttaggtaggtgcttctgcagctcccccaccctcttgtacctccccttacccagcctcctatgcctaggtgagctgagaggagttgggtagctccttgtgcccctagcactgggtttggtcacagcagtccctgagtct

SEQ ID NO: 26013 - DNA, 2300 bp, Homo sapien
agcccgctgcgggccaggcgcgcggtgcgcaggcatacccgggtcgcgggtgaacaccgcggagccccgggacttggtaattggcgcgagcgggtgcgcgcatgcgcgggacggcggcgggcacgtggcgaggcgcagggcggcgccgcgcgggaagctccccagtgccctggaggcctgctggctggacgaccccctgcctctggtaccaagtgtgaccaaggctggcgccaccatggctctgctgccgtcacctcctccctttagcattgagcagccccggaggggctagccctgaggctgacctgcccagagtccccaccatcgcgctgcttagtggcctctccctgcagcctgtcgttgctggtggcggcatggtcttctgtctgtcgagcgaggagccgcgccgcccgctgcgaagcgacatggtccacttccaggcctcggaagtccagcagctgctacacaacaagttcgtggtcatcttgggggactccagtgagtgcctcttctagggtgacgcttccagtcccacaccttgcagcccgttcagtgtgtctggaccatttgtttccatctcacatctcttgtctgtcttctggtctgttccgtccagtaggttttctctttttatgtcccacacatcttccacaggagtcctgacaggtgtaataacctgtgcactttttagcccatccttgctcagcatttctcgccctgacagctccccataatttccatcacgaaagcgttgcattgtgtagtgtgtctcctgggtgacttggccgacttaatttctgccaggtgatcttgggtcactgtatactgctggccaggaggcacacagaacagaggcaatgccaggactttttaacctcatcttttctcctgcgtctaagtcaaccacagagctggtgtcgggcacctcagccctgggaaaatggggtcctggacttggaaggagctggggcaggctgaggtctgcctcagccttgggatctctgtctcctcccagttcagagggctgtgtacaaggacctggtgctcttgctccagaaagactcactgctcacagctgcccagctgaaagccaaggtgagggaagcttggtggccatgtcagtggtgggtgggcacagaccctggcctggcagggttctcctccctggcatgggtctgaccagtagggtggggggggtgggtagggggagctgagctttgaacaggaccagctggtggctgggggccagctgggcgagctgcacaacgggacacagtatcgtgaggtccgccagttctgctcgggctctggccaccaccttgtgcgcttctacttcctcactcgtgtttactccgagtaccttgaggatgttctggaagagctgacatatggacctgccccggacctggtgatcatcaactcctgcctctgggatctctccaggttggggcgagggaaaggggaatactggttggggctggaagtacggctgaggcagtccacccttgtgctcttgcccaccctgtgtgttatccaacagatatggtcgctgctcaatggagagctaccgggagaacctggagcgggtgtttgtgcgcatggaccaagtattgccagactcctgcctgctggtgtggaacatggcgatgcccctcggggaacgtatcactgggggtttcctcctgccagaggcaagtgactgaggcccatcaggacaagagatgggatagcagactggtagataggacaccctgctttcagaccctgctgcgttctgtggctcttagaggctgcactttctcacttagctccagcccctggcaggctccctgcggcgggatgtggttgaagggaacttctacagtgctacgctggccggggaccactgctttgatgtcctagacctccactttcacttccggcatgcagtacagcaccgtcatcgggatggtgtccactgggaccagcatgcacaccgccacctctcacacctgcttctgacccatgtggctgacgcctggggcgtggagctgcccaagcgtggctatccccctggtgagccctaccataagtgggggggtagtgatgcactggggccctcagaggacagggctcagaaacagaatgggacacagccactcaagggaagtagaggtcccttgaaggactcctgtggcttctgcatgcaccttcctcaacccctgaggagggttagatcatcggagcaatattcttgtccaagttccagttttctacagtctggctgtgtagtcatttctgtgtgcttgaaggagcttgta

SEQ ID NO: 26014 - DNA, 2300 bp, Homo sapien
tccccgaggggcatcgccatgttccacaccagcaggcaggagtctggcaatacttggtccatgcgcacaaacacccgctccaggttctcccggtagctctccattgagcagcgaccatatctgttggataacacacagggtgggcaagagcacaagggtggactgcctcagccgtacttccagccccaaccagtattcccctttccctcgccccaacctggagagatcccagaggcaggagttgatgatcaccaggtccggggcaggtccatatgtcagctcttccagaacatcctcaaggtactcggagtaaacacgagtgaggaagtagaagcgcacaaggtggtggccagagcccgagcagaactggcggacctcacgatactgtgtcccgttgtgcagctcgcccagctggcccccagccaccagctggtcctgttcaaagctcagctccccctacccaccccccccaccctactggtcagacccatgccagggaggagaaccctgccaggccagggtctgtgcccacccaccactgacatggccaccaagcttccctcaccttggctttcagctgggcagctgtgagcagtgagtctttctggagcaagagcaccaggtccttgtacacagccctctgaactgggaggagacagagatcccaaggctgaggcagacctcagcctgccccagctccttccaagtccaggaccccattttcccagggctgaggtgcccgacaccagctctgtggttgacttagacgcaggagaaaagatgaggttaaaaagtcctggcattgcctctgttctgtgtgcctcctggccagcagtatacagtgacccaagatcacctggcagaaattaagtcggccaagtcacccaggagacacactacacaatgcaacgctttcgtgatggaaattatggggagctgtcagggcgagaaatgctgagcaaggatgggctaaaaagtgcacaggttattacacctgtcaggactcctgtggaagatgtgtgggacataaaaagagaaaacctactggacggaacagaccagaagacagacaagagatgtgagatggaaacaaatggtccagacacactgaacgggctgcaaggtgtgggactggaagcgtcaccctagaagaggcactcactggagtcccccaagatgaccacgaacttgttgtgtagcagctgctggacttccgaggcctggaagtggaccatgtcgcttcgcagcgggcggcgcggctcctcgctcgacagacagaagaccatgccgccaccagcaacgacaggctgcagggagaggccactaagcagcgcgatggtggggactctgggcaggtcagcctcagggctagcccctccggggctgctcaatgctaaagggaggaggtgacggcagcagagccatggtggcgccagccttggtcacacttggtaccagaggcagggggtcgtccagccagcaggcctccagggcactggggagcttcccgcgcggcgccgccctgcgcctcgccacgtgcccgccgccgtcccgcgcatgcgcgcacccgctcgcgccaattaccaagtcccggggctccgcggtgttcacccgcgacccgggtatgcctgcgcaccgcgcgcctggcccgcagcgggctcctagccaagcctcatgttcccgcgccccagtcggccagtcggttctgcaaagctcccgccccgcagagaccgtgggtccaggttagccgtcggtgcacagcccagcgcccagcgctctccatgcgagcgtcgctgtggccccgacggcgcctcaggcctcggcgcctcgggctgcgacgctcacagcttccacttccgttcacccatgtcccgccctgagcgacccccagtgcccgaagggaaagcaaggcgatggaggtggccgccacagggcgcaggagccagggctgggcccacttggcgggcgcgaagcccaggtacgggctggggtctcggggcggcagccaagtgaggctgcccacagtggtgatggccgcggcggcggcctcgccacgtgacccggacgggcggaagcggaagtgccggcctggagcccgctctaggtgggtgtcccctcggtgcttcccagctgccgtctgcaccagccatggactgctacacggcgaactggaacccactcggggactctgccttttaccggtgagctgccccgccctcccgcccacggcctggcttaccctgctcgcccgccggctggagtctcccggcggcgttcgcccctgtcactactggcgctgg

SEQ ID NO: 26015 - DNA, 2300 bp, Homo sapien
acaaatagaccatacctaaaagaccctagcactgggcccagtgaggcccacaggattctattgggggagaatcaggcacagttccagaaagaacccttgaactactaagtcctgaaggatgcgcaaaattcttcagtgagataaagagagaaatggcagtatccacagaaactgcagactggttagggccttgtaattctgcgcagctggaacgcaagatttgggtaggagagcggtagatgaggttggagagacaaacgggctgccttacagatagacgttccacgagaagttcgtagtttttcctattagggaagctatgggaaaatcctaatctgggtaacgatgtaacgggtttacactttagaaaaatccgtggtttaggactctacaactcccatgggcgggctgccctaacccaggggttcccacttccgctgttccgggattcacggacgactcgcccccttttcccagccttggtcagcactgttaccccgcccgccgtgcgatcccgcccccctcggagcgcccctgtggtctgacttcagcagcactttccggcaggagactgggcactcgctgtcacccgcgagctgcctccctcagcgagatctgagcatctttccggaggctaacagacctgggcttcggggtgaccactgtgcttgcctcagtttccttttctggagcaggggaaggcccggctccctgcccaaaggcggctgtgcgctaagtggcagacgctcggggagagccggcgcggggcggaccccagcgccagtagtgacaggggcgaacgccgccgggagactccagccggcgggcgagcagggtaagccaggccgtgggcgggagggcggggcagctcaccggtaaaaggcagagtccccgagtgggttccagttcgccgtgtagcagtccatggctggtgcagacggcagctgggaagcaccgaggggacacccacctagagcgggctccaggccggcacttccgcttccgcccgtccgggtcacgtggcgaggccgccgccgcggccatcaccactgtgggcagcctcacttggctgccgccccgagaccccagcccgtacctgggcttcgcgcccgccaagtgggcccagccctggctcctgcgccctgtggcggccacctccatcgccttgctttcccttcgggcactgggggtcgctcagggcgggacatgggtgaacggaagtggaagctgtgagcgtcgcagcccgaggcgccgaggcctgaggcgccgtcggggccacagcgacgctcgcatggagagcgctgggcgctgggctgtgcaccgacggctaacctggacccacggtctctgcggggcgggagctttgcagaaccgactggccgactggggcgcgggaacatgaggcttggctaggagcccgctgcgggccaggcgcgcggtgcgcaggcatacccgggtcgcgggtgaacaccgcggagccccgggacttggtaattggcgcgagcgggtgcgcgcatgcgcgggacggcggcgggcacgtggcgaggcgcagggcggcgccgcgcgggaagctccccagtgccctggaggcctgctggctggacgaccccctgcctctggtaccaagtgtgaccaaggctggcgccaccatggctctgctgccgtcacctcctccctttagcattgagcagccccggaggggctagccctgaggctgacctgcccagagtccccaccatcgcgctgcttagtggcctctccctgcagcctgtcgttgctggtggcggcatggtcttctgtctgtcgagcgaggagccgcgccgcccgctgcgaagcgacatggtccacttccaggcctcggaagtccagcagctgctacacaacaagttcgtggtcatcttgggggactccagtgagtgcctcttctagggtgacgcttccagtcccacaccttgcagcccgttcagtgtgtctggaccatttgtttccatctcacatctcttgtctgtcttctggtctgttccgtccagtaggttttctctttttatgtcccacacatcttccacaggagtcctgacaggtgtaataacctgtgcactttttagcccatccttgctcagcatttctcgccctgacagctccccataatttccatcacgaaagcgttgcattgtgtagtgtgtctcctgggtgacttggccgacttaatttctgccaggtgatcttgggtcactgtatactgctggccaggaggcacacagaacagaggcaatgccaggactttttaacctcatcttttc

SEQ ID NO: 26016 - DNA, 2300 bp, Homo sapien
tagatacatctatatgtctatctatagatagatacatctatatgtatctatagatagatacatccatatgtctatctatatatagatacatctagatgtatctatatatatatagatacatctatatatctatctatatctatctatctatagatagatatagatagatatatctatatatagacggagtctcactctgttgcctggactagaatgcaatgacgctatcttggctcactgcaacctccgcctcccaggttcaagcgattctcctgcctcagcctcccaagtagctgggattacaagcacctgccattatgcctggctaatttttgtagagacagggtttgaccatgttggttaggctggtctcaaactcctggcctcaggtgattcacccaccttggcctcccaaagtgctgggattacaggcatgagccactgcgcctggcctaaaataatatttttaatttttcagagggagtatgctatgttgcccaggctggagtgcagtggttattcacaggttctaacatcggtccctacaccctcaaacttctgggctccagtgatcctcctaactcagcctctccagtacctgggactataggaacatgccacaaagctcggcccagtaaaatatttttaaaaaactttaatgggcaattattacatagcaagcactgttctaaatatgcactggtgataaagagaagcaagaaacatgcttttggccgggctcagtggttcacgcctgtaatcccagtactttgggaggccaaggtggatagattgcttaaggtcagaagttcaagaccagcctggccaccatggtgaaacctcacctctagcaaaaaatacaaaaattagccgggcgtggtgacaggggcctgcagtctcagccactcgggaggctgaggcaggagaatcccttgaacccgggaggcggaggttgcagtgagccgagtgcccctgcactccagcctgggcaacagaggaagactctgtcaaaaaaaaaaaaaatgctttcagccctgaaggagcctggtttagcagaagaaacctatacaaatgtcgcctaaatatacaaatagaccatacctaaaagaccctagcactgggcccagtgaggcccacaggattctattgggggagaatcaggcacagttccagaaagaacccttgaactactaagtcctgaaggatgcgcaaaattcttcagtgagataaagagagaaatggcagtatccacagaaactgcagactggttagggccttgtaattctgcgcagctggaacgcaagatttgggtaggagagcggtagatgaggttggagagacaaacgggctgccttacagatagacgttccacgagaagttcgtagtttttcctattagggaagctatgggaaaatcctaatctgggtaacgatgtaacgggtttacactttagaaaaatccgtggtttaggactctacaactcccatgggcgggctgccctaacccaggggttcccacttccgctgttccgggattcacggacgactcgcccccttttcccagccttggtcagcactgttaccccgcccgccgtgcgatcccgcccccctcggagcgcccctgtggtctgacttcagcagcactttccggcaggagactgggcactcgctgtcacccgcgagctgcctccctcagcgagatctgagcatctttccggaggctaacagacctgggcttcggggtgaccactgtgcttgcctcagtttccttttctggagcaggggaaggcccggctccctgcccaaaggcggctgtgcgctaagtggcagacgctcggggagagccggcgcggggcggaccccagcgccagtagtgacaggggcgaacgccgccgggagactccagccggcgggcgagcagggtaagccaggccgtgggcgggagggcggggcagctcaccggtaaaaggcagagtccccgagtgggttccagttcgccgtgtagcagtccatggctggtgcagacggcagctgggaagcaccgaggggacacccacctagagcgggctccaggccggcacttccgcttccgcccgtccgggtcacgtggcgaggccgccgccgcggccatcaccactgtgggcagcctcacttggctgccgccccgagaccccagcccgtacctgggcttcgcgcccgccaagtgggcccagccctggctcctgcgccctgtggcggccacctccatcgccttgctttcccttcgggcactgggggtcgctcagggcgggacatgggtga

SEQ ID NO: 26017 - DNA, 2300 bp, Homo sapien
tcatgttggccaggctgatctcgaactcttgacctcgtgatctgcctgcctcagcctcccaaagtgctgggattacaggcgtgagccaccacgctcggccaattgcacaggcatatttctaagagagaattataaataaacaacaaatgcaacaggtctctaaaaactgccacagggcacttgtccatctaggaagtatatcacattaggtaccaaaaattacatttaaaagttttaatatgtcagtgagaatggtatacagtttcattagcacaaacaaatgtcttctatttaagtaagacccccatgcaatgtctttgtgatctttacttgcaatccataacatatatctatctatctatcgatagatacatctatctatctatcgatagatacatctatctatcgatagatacatctatatgtctatctatagatagatacatctatatgtctatctatagatagatacatctatatgtctatctatagatagatacatctatatgtatctatagatagatacatccatatgtctatctatatatagatacatctagatgtatctatatatatatagatacatctatatatctatctatatctatctatctatagatagatatagatagatatatctatatatagacggagtctcactctgttgcctggactagaatgcaatgacgctatcttggctcactgcaacctccgcctcccaggttcaagcgattctcctgcctcagcctcccaagtagctgggattacaagcacctgccattatgcctggctaatttttgtagagacagggtttgaccatgttggttaggctggtctcaaactcctggcctcaggtgattcacccaccttggcctcccaaagtgctgggattacaggcatgagccactgcgcctggcctaaaataatatttttaatttttcagagggagtatgctatgttgcccaggctggagtgcagtggttattcacaggttctaacatcggtccctacaccctcaaacttctgggctccagtgatcctcctaactcagcctctccagtacctgggactataggaacatgccacaaagctcggcccagtaaaatatttttaaaaaactttaatgggcaattattacatagcaagcactgttctaaatatgcactggtgataaagagaagcaagaaacatgcttttggccgggctcagtggttcacgcctgtaatcccagtactttgggaggccaaggtggatagattgcttaaggtcagaagttcaagaccagcctggccaccatggtgaaacctcacctctagcaaaaaatacaaaaattagccgggcgtggtgacaggggcctgcagtctcagccactcgggaggctgaggcaggagaatcccttgaacccgggaggcggaggttgcagtgagccgagtgcccctgcactccagcctgggcaacagaggaagactctgtcaaaaaaaaaaaaaatgctttcagccctgaaggagcctggtttagcagaagaaacctatacaaatgtcgcctaaatatacaaatagaccatacctaaaagaccctagcactgggcccagtgaggcccacaggattctattgggggagaatcaggcacagttccagaaagaacccttgaactactaagtcctgaaggatgcgcaaaattcttcagtgagataaagagagaaatggcagtatccacagaaactgcagactggttagggccttgtaattctgcgcagctggaacgcaagatttgggtaggagagcggtagatgaggttggagagacaaacgggctgccttacagatagacgttccacgagaagttcgtagtttttcctattagggaagctatgggaaaatcctaatctgggtaacgatgtaacgggtttacactttagaaaaatccgtggtttaggactctacaactcccatgggcgggctgccctaacccaggggttcccacttccgctgttccgggattcacggacgactcgcccccttttcccagccttggtcagcactgttaccccgcccgccgtgcgatcccgcccccctcggagcgcccctgtggtctgacttcagcagcactttccggcaggagactgggcactcgctgtcacccgcgagctgcctccctcagcgagatctgagcatctttccggaggctaacagacctgggcttcggggtgaccactgtgcttgcctcagtttccttttctggagcaggggaaggcccggctccctgcccaaaggcggctgtgcgctaagtggcagacgctc

SEQ ID NO: 26018 - DNA, 2300 bp, Homo sapien
agcatgggcaatgtaggggtcacagagggctggggacgcggggtagagtttatgaccctgtggctcccttaacccatggccccctttcctcaggaagtgctccagaaccgggttctggatgcccggatctttcacactgagtttggttccggagtggccatcctcacaggggcccaccgcttcaccctcagtgccaatgtgggtgacctcaaactccgccggatgccagaggtgccaggtaagccctgacaccgctgagatagccaagcagtacccacagatgtgcctctagcctgtgagacccataaaaacagaagctgtggctagagacccatagaaacagaaacggtgggccttggtcatcctaacactgtccttttccctggccataggtctgcaaagtgcaccctcctgctggactgtgctgtgccaggaccgagtggcacacattcttctggctgtggggcctgacctttacctcttggaccatgcagcctgctccgcagtggtaagggccctgagtgggaatgaagtggacgggctgggttaggcaatagggaggttctgaaaagtcagtatgtatctgtcccacccctaccctggctctgcctcagacgccccctggcctggccccaggagtaagcagcttcctacagatggctgtctccttcacctaccgacacctggcactcttcacagacacaggctacatctggatggggacagcatcactcaaggtatgatcctggggcaacacaggggtactgtgccttgtccagggtacaagatcttttggtgatgcgggagggcttttcgactagaatggtgactgctgggacagggccatgacattgcccacaccatttcaggagaagctatgtgagttcaactgcaacatccgggcacctccaaagcagatggtctggtaaggatgggggtgttattgctgggggtgtgggtgagacatagcttgcttcctgggacaatcagttccttgattcgtcatgtctactggccaagcctagtggagtttggatcttaccttctctgccattgcacacttgaaggaaaccattgtcctctgtgggccacagctgccttgagctgagagctcagggataagagggaagtggagaggtcagtgtacagtcagtgatgcaagtgtatacaggctgtcccgagacaaaggattatgagcagccatgtgggagacatggccatgggacagtgtctagccagtgtgtatatgctgctcacaggtgcagccgtcctcgtagcaaggagagggccgtggtggtggcctgggaaaggcggctgatggtggtgggcgatgcacccgagagcatccagtatccttggagggctgcctgtgtgtggagagaggggaggggagggttcacctgccccgtcccatctgtaggtgctcttaggagccttaaccaagctcaggtttgtgctggatgaggactcctacctggtgcctgagctcgatggggtccgcatcttctcccgcagcacccacgagttcctgcatgaggttccaggtgaggccttcacaagggcaccacataacccaaggtggggactcctcggcaccccagctgccctgggccagtgccacagagcaggaatagggtgttgaggcagggctgagggtttccctgcctttctccctcactcaccaactcccttccccagcggccagcgaggaaatcttcaaaattgcctcaatggcccccggggcgctgctcctggaggctcagaaggagtatgaggtaaagccctgggcttctctcccagtcccagaatggttcctcctgcccctgcgtgggcatgtgtgagcatagccaggtgccacctgtcaagagaggggtccaggcaggacactggtctgggctggggagggctggctcatgtaaactgaagagacactatgtcctccatgtggtgtgatagggacgggcagagcatccccactatccccacccagtctgggttactattgggaggagttctcaaggcccccctaaaggcagctgtgggctgatacgagatgatgtctgtgggcacctcaggtggattgagtgggctgagggagttggggctccagcctgtgcagctcctccaacccagcttatttgaaccacaacccagaatggttaggggccagatgtgggagtgttctctgtcatgatgccctggctctggactgctccccaccagaaagagagccagaaggcggacgagtacctgcgggagatccaggagctgggccagctgacccaggccgtgcagcagtg

SEQ ID NO: 26019 - DNA, 2300 bp, Homo sapien
agaagctatgtgagttcaactgcaacatccgggcacctccaaagcagatggtctggtaaggatgggggtgttattgctgggggtgtgggtgagacatagcttgcttcctgggacaatcagttccttgattcgtcatgtctactggccaagcctagtggagtttggatcttaccttctctgccattgcacacttgaaggaaaccattgtcctctgtgggccacagctgccttgagctgagagctcagggataagagggaagtggagaggtcagtgtacagtcagtgatgcaagtgtatacaggctgtcccgagacaaaggattatgagcagccatgtgggagacatggccatgggacagtgtctagccagtgtgtatatgctgctcacaggtgcagccgtcctcgtagcaaggagagggccgtggtggtggcctgggaaaggcggctgatggtggtgggcgatgcacccgagagcatccagtatccttggagggctgcctgtgtgtggagagaggggaggggagggttcacctgccccgtcccatctgtaggtgctcttaggagccttaaccaagctcaggtttgtgctggatgaggactcctacctggtgcctgagctcgatggggtccgcatcttctcccgcagcacccacgagttcctgcatgaggttccaggtgaggccttcacaagggcaccacataacccaaggtggggactcctcggcaccccagctgccctgggccagtgccacagagcaggaatagggtgttgaggcagggctgagggtttccctgcctttctccctcactcaccaactcccttccccagcggccagcgaggaaatcttcaaaattgcctcaatggcccccggggcgctgctcctggaggctcagaaggagtatgaggtaaagccctgggcttctctcccagtcccagaatggttcctcctgcccctgcgtgggcatgtgtgagcatagccaggtgccacctgtcaagagaggggtccaggcaggacactggtctgggctggggagggctggctcatgtaaactgaagagacactatgtcctccatgtggtgtgatagggacgggcagagcatccccactatccccacccagtctgggttactattgggaggagttctcaaggcccccctaaaggcagctgtgggctgatacgagatgatgtctgtgggcacctcaggtggattgagtgggctgagggagttggggctccagcctgtgcagctcctccaacccagcttatttgaaccacaacccagaatggttaggggccagatgtgggagtgttctctgtcatgatgccctggctctggactgctccccaccagaaagagagccagaaggcggacgagtacctgcgggagatccaggagctgggccagctgacccaggccgtgcagcagtgcattgaggctgcaggacatgagcaccagccagacatgcagaagagtctgctcagggttggcctggatggccgggccggggagggtggggctgggagggggtgggatgggcagcagggaagctctctcctatcgccctctggctcttctcaggccgcctccttcggaaagtgtttcctggacagatttccacccgacagcttcgtgcacatgtgtcaggacctgcgtgtgctcaatgctgttcgggactatcacatcgggatcccgctcacctatagccagtatccctgtgcacgccagaagggtaccctacagccaggggtggcaggggaaggggctggagatgcgtctgcaggtacctggcaagcggggcttattctccaactggatccttaaccgaggaaaatacagatataagcagctcaccatccaggtgctgctggacaggtagggtaagcccaagggtgcagtgagcgggctgtcaggggggtgggcattacagccttgggtggggtcttatggtcactgctcctgacctatctaggatgtgggaggcctgatgtgcaggctgaggccactctgctccctttctcctccacctcactccttgtatcctttacccaccgggtctaccaggctcgtgttgcggagactttaccccctggccatccagatatgcgagtacttgcgccttcctgaagtacagggcgtcagcaggatcctggcccactgggcctgctacaaggcaaggatgtgggatggggtccaagggcatttagaggattccaggccctggtgaggtggaggaaatagaaagtgtagaactgcgctgggcacggtggctcatgcctgtaatcccaacactttgggag

SEQ ID NO: 26020 - DNA, 2300 bp, Homo sapien
tggggtccgcatcttctcccgcagcacccacgagttcctgcatgaggttccaggtgaggccttcacaagggcaccacataacccaaggtggggactcctcggcaccccagctgccctgggccagtgccacagagcaggaatagggtgttgaggcagggctgagggtttccctgcctttctccctcactcaccaactcccttccccagcggccagcgaggaaatcttcaaaattgcctcaatggcccccggggcgctgctcctggaggctcagaaggagtatgaggtaaagccctgggcttctctcccagtcccagaatggttcctcctgcccctgcgtgggcatgtgtgagcatagccaggtgccacctgtcaagagaggggtccaggcaggacactggtctgggctggggagggctggctcatgtaaactgaagagacactatgtcctccatgtggtgtgatagggacgggcagagcatccccactatccccacccagtctgggttactattgggaggagttctcaaggcccccctaaaggcagctgtgggctgatacgagatgatgtctgtgggcacctcaggtggattgagtgggctgagggagttggggctccagcctgtgcagctcctccaacccagcttatttgaaccacaacccagaatggttaggggccagatgtgggagtgttctctgtcatgatgccctggctctggactgctccccaccagaaagagagccagaaggcggacgagtacctgcgggagatccaggagctgggccagctgacccaggccgtgcagcagtgcattgaggctgcaggacatgagcaccagccagacatgcagaagagtctgctcagggttggcctggatggccgggccggggagggtggggctgggagggggtgggatgggcagcagggaagctctctcctatcgccctctggctcttctcaggccgcctccttcggaaagtgtttcctggacagatttccacccgacagcttcgtgcacatgtgtcaggacctgcgtgtgctcaatgctgttcgggactatcacatcgggatcccgctcacctatagccagtatccctgtgcacgccagaagggtaccctacagccaggggtggcaggggaaggggctggagatgcgtctgcaggtacctggcaagcggggcttattctccaactggatccttaaccgaggaaaatacagatataagcagctcaccatccaggtgctgctggacaggtagggtaagcccaagggtgcagtgagcgggctgtcaggggggtgggcattacagccttgggtggggtcttatggtcactgctcctgacctatctaggatgtgggaggcctgatgtgcaggctgaggccactctgctccctttctcctccacctcactccttgtatcctttacccaccgggtctaccaggctcgtgttgcggagactttaccccctggccatccagatatgcgagtacttgcgccttcctgaagtacagggcgtcagcaggatcctggcccactgggcctgctacaaggcaaggatgtgggatggggtccaagggcatttagaggattccaggccctggtgaggtggaggaaatagaaagtgtagaactgcgctgggcacggtggctcatgcctgtaatcccaacactttgggaggctgaggcgggcgaatcacctgaggtcaggtattcgagactagcctggctaacatggtgaaaccccgtctctactaaaaatacaaaattagccgggcacggtggcgcatgcctgtaatcccagctacccgggaggctgaggcaggagaattgctttcacctgggaggcagaggttgcagtgagctgagattgcactgctgcactccagcctgggcgacagagcaagactctgtctcaaaaaaaaagaaagaagtggcgggggcggaggaggagggaaagagagagaaagaagaaagagagaaagaaagaaagaagaaggaagggagggaggaagggaactgaaggggtgggtcctaagggcttgcaggagtggagagtgaggaatggcatccagatgtttgtgacaccccgcatcccttgcaggtgcaacagaaggatgtctcagatgaggatgtggctcgagccattaaccagaagctgggggacacgcctggtgtctcttactccgacattgctgcacgagcctatggttgtggccgcacggagctggccatcaaggtgtgggtgcccagccctccacagacactctgatgtggttgttcagggcccccatgccagctc

SEQ ID NO: 26021 - DNA, 2300 bp, Homo sapien
tactattgggaggagttctcaaggcccccctaaaggcagctgtgggctgatacgagatgatgtctgtgggcacctcaggtggattgagtgggctgagggagttggggctccagcctgtgcagctcctccaacccagcttatttgaaccacaacccagaatggttaggggccagatgtgggagtgttctctgtcatgatgccctggctctggactgctccccaccagaaagagagccagaaggcggacgagtacctgcgggagatccaggagctgggccagctgacccaggccgtgcagcagtgcattgaggctgcaggacatgagcaccagccagacatgcagaagagtctgctcagggttggcctggatggccgggccggggagggtggggctgggagggggtgggatgggcagcagggaagctctctcctatcgccctctggctcttctcaggccgcctccttcggaaagtgtttcctggacagatttccacccgacagcttcgtgcacatgtgtcaggacctgcgtgtgctcaatgctgttcgggactatcacatcgggatcccgctcacctatagccagtatccctgtgcacgccagaagggtaccctacagccaggggtggcaggggaaggggctggagatgcgtctgcaggtacctggcaagcggggcttattctccaactggatccttaaccgaggaaaatacagatataagcagctcaccatccaggtgctgctggacaggtagggtaagcccaagggtgcagtgagcgggctgtcaggggggtgggcattacagccttgggtggggtcttatggtcactgctcctgacctatctaggatgtgggaggcctgatgtgcaggctgaggccactctgctccctttctcctccacctcactccttgtatcctttacccaccgggtctaccaggctcgtgttgcggagactttaccccctggccatccagatatgcgagtacttgcgccttcctgaagtacagggcgtcagcaggatcctggcccactgggcctgctacaaggcaaggatgtgggatggggtccaagggcatttagaggattccaggccctggtgaggtggaggaaatagaaagtgtagaactgcgctgggcacggtggctcatgcctgtaatcccaacactttgggaggctgaggcgggcgaatcacctgaggtcaggtattcgagactagcctggctaacatggtgaaaccccgtctctactaaaaatacaaaattagccgggcacggtggcgcatgcctgtaatcccagctacccgggaggctgaggcaggagaattgctttcacctgggaggcagaggttgcagtgagctgagattgcactgctgcactccagcctgggcgacagagcaagactctgtctcaaaaaaaaagaaagaagtggcgggggcggaggaggagggaaagagagagaaagaagaaagagagaaagaaagaaagaagaaggaagggagggaggaagggaactgaaggggtgggtcctaagggcttgcaggagtggagagtgaggaatggcatccagatgtttgtgacaccccgcatcccttgcaggtgcaacagaaggatgtctcagatgaggatgtggctcgagccattaaccagaagctgggggacacgcctggtgtctcttactccgacattgctgcacgagcctatggttgtggccgcacggagctggccatcaaggtgtgggtgcccagccctccacagacactctgatgtggttgttcagggcccccatgccagctccttctctctgtgccttccttctcacctcacagctgctggagtatgagccacgctcaggggagcaggtaccccttctcctaaagatgaagaggagcaaactggcactaagcaaggccatcgagagcggggacactgacctgggtgagggcaaggctggggggcccctgggctaagtgggagcctggctggaattcccactccaccttactctcctgcagtgttcacggtgttgctgcacctgaagaacgagctgaaccgaggagattttttcatgacccttcggaatcagcccatggccctcagtttgtaccgacaggtgtgtgtagtgggcagggttgtggtgtagccttctgagcacttgagttggccttgctgactgattgcctgcctgtggccccagttctgtaagcatcaggagctagagacgctgaaggacctttacaatcaggatgacaatcaccaggaattgggcagcttccacatccgagccagctatgctgcagaag

SEQ ID NO: 26022 - DNA, 2300 bp, Homo sapien
gccagtatccctgtgcacgccagaagggtaccctacagccaggggtggcaggggaaggggctggagatgcgtctgcaggtacctggcaagcggggcttattctccaactggatccttaaccgaggaaaatacagatataagcagctcaccatccaggtgctgctggacaggtagggtaagcccaagggtgcagtgagcgggctgtcaggggggtgggcattacagccttgggtggggtcttatggtcactgctcctgacctatctaggatgtgggaggcctgatgtgcaggctgaggccactctgctccctttctcctccacctcactccttgtatcctttacccaccgggtctaccaggctcgtgttgcggagactttaccccctggccatccagatatgcgagtacttgcgccttcctgaagtacagggcgtcagcaggatcctggcccactgggcctgctacaaggcaaggatgtgggatggggtccaagggcatttagaggattccaggccctggtgaggtggaggaaatagaaagtgtagaactgcgctgggcacggtggctcatgcctgtaatcccaacactttgggaggctgaggcgggcgaatcacctgaggtcaggtattcgagactagcctggctaacatggtgaaaccccgtctctactaaaaatacaaaattagccgggcacggtggcgcatgcctgtaatcccagctacccgggaggctgaggcaggagaattgctttcacctgggaggcagaggttgcagtgagctgagattgcactgctgcactccagcctgggcgacagagcaagactctgtctcaaaaaaaaagaaagaagtggcgggggcggaggaggagggaaagagagagaaagaagaaagagagaaagaaagaaagaagaaggaagggagggaggaagggaactgaaggggtgggtcctaagggcttgcaggagtggagagtgaggaatggcatccagatgtttgtgacaccccgcatcccttgcaggtgcaacagaaggatgtctcagatgaggatgtggctcgagccattaaccagaagctgggggacacgcctggtgtctcttactccgacattgctgcacgagcctatggttgtggccgcacggagctggccatcaaggtgtgggtgcccagccctccacagacactctgatgtggttgttcagggcccccatgccagctccttctctctgtgccttccttctcacctcacagctgctggagtatgagccacgctcaggggagcaggtaccccttctcctaaagatgaagaggagcaaactggcactaagcaaggccatcgagagcggggacactgacctgggtgagggcaaggctggggggcccctgggctaagtgggagcctggctggaattcccactccaccttactctcctgcagtgttcacggtgttgctgcacctgaagaacgagctgaaccgaggagattttttcatgacccttcggaatcagcccatggccctcagtttgtaccgacaggtgtgtgtagtgggcagggttgtggtgtagccttctgagcacttgagttggccttgctgactgattgcctgcctgtggccccagttctgtaagcatcaggagctagagacgctgaaggacctttacaatcaggatgacaatcaccaggaattgggcagcttccacatccgagccagctatgctgcagaagaggtctgagatccatggggcgtgtggggcgtgtggggcatgtgggctggggctgttggtccggttccttcaggaatctaggccttcgtgttgggtgcacactccatctggtcctcactgtgagggagactctgacgtgaggccaggatgggggttagtgtcagaggagctagccatccctctaggacatcagagtggtgcacctagcaggcaaggctgaccctggcgaccctgggcacagggatgggggagaagactgtagcctgggtgaggagggcgagggtcctgcatgctgtgagttcaggccttccttcttgtctttatagcgtattgaggggcgagtagcagctctgcagacagccgccgatgccttctacaaggccaagaatgagtttgcagccaaggtttggcccacctttttccaagagcctcctcgtctcctggtcttccctcctggtccctcatccccatcatgcctcattatccgggtccccaggctacagaggatcaaatgcggctcctacggctgcagcggcgcctagaagacgagctggggggccagttcctagacctgtctct

SEQ ID NO: 26023 - DNA, 2300 bp, Homo sapien
ctgcaatcactatttcagttatattaaaaatataagtagcatgtcaaccccttctagggtaatacaaataaaaagtaaaaaaaaactaatcaacaaaaagaaacatattaagaaataatagtgtaaattagatataaggcaaaagtaagctggtggggtttggttctagagcatagggctgctatcccagctactgaggtacctcctgcgtttgcagtcattacttgttaggggttttcacactttgacttcctgcttttcacttttccattcggtgttgcgggatagattgagtttggacttaaggggatatgtgaatgttgggcgtggggaaggatccaccctcactggggtctgagcgttaggagagtaggcgtgtggactctgggcctttgggctggagtgtctattggtcagaggtgtcgggttcggccatttcaccctcacctctaggctggccctgctgagagggagagagagtcacaactcccactcaaggagagacttccctgctggggaggggacggcctgaggcccgccccacccatattcccaggccctggctctggttagcatggactaacttattccacaatacggaggagtggggcacagagtccctaactggcgccccaacagaaggcggtggtggggaccggagatggtaggactggagatggtaggggctgctgatgtgagcccacaatacggaggagtggggcacagagtccctaactggcgccccaacagaaggcggtggtggggaccggagatggtaggactggagatggtgggggctgctgggagccccttttgcgccgcagtgtttcctgccatgaagagttgccgccggtcacaacccttccccgggggcgccccgaatgtgggactccttccggcctggggtgcgtgagggggactcaggggttgcccggtctggaggagagactcgccgccacctaccccgggaaccgcagactctgggtctgggataaagcgtcccctacccgcaagctcggtttgtgcgctactgtgcaatctgtcttttgcctgcagacgcccagccgctcgccctgcgcgggtctcggaatgtccaggggtccctactggggatcacaacccggcgaaatgtcgcatttgccaccacctatctcgactgcgtaatcggctttcagccgcagacgctcaggtcctgcagcacccgcggggatccgtgtaggaacctgctgccgctggatggactgagcgattgcttcgcgggtgtcacgcaccagacgccgtgccgggagcgccgggaagggggtacgcgccccaaccccggccgggggagggcgcactctggctcctctctgcgttttgagcctcccctcccccgccaggcgtatcgcaaaaggcacctccatcgcagagcaccatgtgttgtgcttctactcagctcggtggcgagcggggccccagcatgcgcatctggaaagcgggggagattaccctggagctcgggtggggacggcgtgggctgacttgatataagacgacacccacggagccagatccgttctagggacttggcaggttcctctccctccccagtgagatccgtcgttctttgcagcaattaggggagggaaaaaaaagacccacagtatcacgtttggagagggttaggaagatggctctcgagttgcaggccgccctggtggctagacattggtgtagtttgtgcctggcctcggtttcctgatctgtaaactgggaagaaggcccaagtcatgaggcctgtgactgtagaatggctgaaggcactggtgcactcgcagccggtccttccggggtccagcttcccgaaggactgggcagccccggggcgaacccctctggagctaccaggagaacgtgcgaccgggttcggcgccccagccggcaagtgagcgcccagcggagcgcaagggcggggcccgcgcgggccggagacgcccgttcgctgtcggccaaccagcgcctgtctctgaacagccaatgaacacgcgtcttacagccaaggccgggtcgggagcgaggctgcggcgagtgcggcgctgacagagacgcgcgcgcgcgcgatcgcgctcggaccccggccgctgccgccatcactgtcgcccgcccagtcgcccctcagccgcttcccctcgccatggaggcgaggccgccgccgccgccgcggggctcggagccgcgggccgggcggcggccctgagggctagtggcggcccgaaacgccgccgcggagccgaggcggagccgctgtcctcgtccccagc

SEQ ID NO: 26024 - DNA, 2300 bp, Homo sapien
tttgcttgcccggttactgtcgttctgtctgggacattggtctcatctctgaaagcaggagggcaaactgaatgggctctgtagtctcttctaaaagtttttagtttaaactattaatagtacaactttgatttaacaaatgaggaagctgagcttacgagatgtctgtgaagcccattgtctgatcttttatttccttagtacctgggaatgcgcttttttttttttttttttttgaagaacaccaacagttgttcacccttccttgaatttgggtacactgtatatacagagtataccaatttagcctgccattagaacatgtcttcacgagcaaaatctagtataaagtcttactttaatattttctttattatgtataaataatagatggttgttatggaatactggatagtacaaaagtttagaatttttaacattttggtttatttattgggactcttttttccccccagtgattcttgtttctccaacaatgtgaatgcgcactccattcagtgtgaacgtgaatgttaatttatgtgccagctggattctacaggaagcagacacagatggggttggaggggcaaagggcttattagaggagtaatgcctgtgaagaaaaggggaacggaacatgtttgggtatagggagccatcagactgcagtgcacacctgacgaagtctctgcccacccagattgcctgatagaggaataccacaagaggtagaaatggctaggctcttgtactaccactttgcacagtcattgactagagatagatctttgatcaatgtagagattttcagccttggcattgttgacatttgggactggatactttgttatagggggttgtcctgtgatttgtaagatgcttagcagcatcctaggcctctatcccctagatgccagtagcccagcctccctgctattagttgtgacagtcaaaactatctttagacactgccatatgttccctagggaagggcctaatggtatataaacaaccctatggtggcatagtccaagttttgggacagggaggagtgttctatactacccttactggaaagacctatgagctattcagaaatctgaactatttaagatggagctttgttctgtggctcctggaattttaagcacacccctgtgaaacatcttgttaggatatactccactctccaaaacaatccataatgtttaaatagggctgttttattgattgattgattgattgattgagatggagtctcactctgttgcccaggctggagtacactgtcacgatctcggctcactgcaacctccccctcctgggttcaagcaattctcctgcctcagcctcccaagtaactgggattacagacacccaccaccgtgcctggctaatttttgtatttttggtagagacggggtttcaccatgttggccaggctggtctcgaactcctgacttctcaggtgatccgcctgcctcggcctcccaaagtgctgggattataggcatgagccaccgcacctggccttatttttctttttgagatggagtctgactttgtcgcctgagctggagtgcagtggcgcgatctgggctcactgcagcctctgcctcccgggttcaagcaattctacctcagcctcctgaacagctgagattagagatgcgtgccaccatgcccagctaatttttgtatttttagtagatgcaggatttcagcatgttggctaggctggtctcaaactcctgacctcaagtgatccacccacctcggcctcccaaagtgctgggattacaggcatgagccaccgctcctggctattttcttttgagactgggtctcattctgttcccaggctggagtgcagtggcacaatctcagctcactggaaactccaccttctgggctcaagcagtcctcccacctcagcctgctaagtagctgggattataggcatgtgccaccctgcctggctactttttgtggagatgggattttgcatgttgcctaggctgggcttgaattcctaagctagaacaatctgctcagggatgttgtatatttctaaaggtatttttccttttgttgcaggtgacacaactaaaaaaaaacaaaggtatttatggaattccactgagtggtaatggatgatgcagttcaaataactaaggtaagagaaataaaaccagaactgtgaggaggcttttgccagccaagtagtgtccttaaataaagctaacatcacatgctttcctgcttcatttcgtttctaagctgtaagagtagcttat

SEQ ID NO: 26025 - DNA, 2300 bp, Homo sapien
gtaaagtctattaatgtaataaatctcctttcttaagtcaaaaaataattttgtgtaattccaaacaggaaactgaaaaggcataggtattctcagcagtctctaaagtcccaaaatctaatggcaattttaccagagcagatctttagaagtattgctataaatttggatatcccattctaattttaagccaaatgctttttgagaaataagccagctgtttggaaatgcttgtattataatcggtttgataagcagttatgtcttatgcagatgaattaggggctacctgtttttatgcactggtctttggggtgcttttgaacagtagtgtctgatgttttaattgtcaaagcaaaaagaaatgagagggagggcaacttttcttcctcttctgaagtccaggaaactggttattttctcatgcatattattttaaaatatattccagccaggtgcagtggctcacgcctgtaatcccagcactttgggaggccaaggcgggtggatcacaaggtcaggagttcaagaccagcctgaccaatatgataaaaccccatctctactaaaaatacaaaaattagccgggcgtggtggtgtgcgcctgtaatcccagctactcgggaggctgagtcaggagaattgcttgaacctgggaggcagaggttgcagtgagccaagatcgcgctcttggctgcgatccagactgcactccagcctgggtgacagagcaagactctgtctcaaaaaaaaaaaaaaaaatcagactcttaatatttgtaaagaagtagtccttgagctactacttaagtctagaaagagttgatattcttgttttaagagtgttagggcactttgggaggctgaggcaggtggatcacttgagcccaggagttccagaccagcctgagcaatatggggaaaccttgtctctactaaaaatacaaaaattaaccaggcatgtggtacgtacctgtagtcccagccacttgggacgctgaggtgggaggatcacctgagcccaggaaatggaggttgcagtgagccaagattgcgtgactgtactctagcctgggcaacagagcaagactctgtctcaaaaaaaaaaagggcggggattatcatagtgccattattattatgagtttatgatggctttctctaagcaccttttacattcggcatttattcagtacctattaagcatcaaggagtccagaaaaaattttatatataaatatatataaaatatgtaaatatatatatgcatatgcttccctatctcaggaaggaaatatgtgaacatcaggaaccgaagtctactcagttacatgccattggatatatcacacaaagtgctgagggaactcagaaggctcattatatctggggagtgggaaggaggcacagagatgtgctttgggaagtttaaattaaaatagcaaatggggaaaatgaagacacaccagacagggcacaagcaaagagacatgaaagagtaagtcatgtgtttgaggatctgtgcgcagttgacatgtgtgaggtgtggggagtgatcagaggtggcctcaacagaatgggtgtggtggtccactgagttcaggagttggagcatctcctgaagatgatggtgagtaaggaagtaacatagtcagattttggttttagaaagatattccagaggacttaggggagatagatggacaatagaaatttaggtttctgaataatttggctcaaaacaacggtgattgggctcaacccagtggttagattctagaggcaatccaatgaatattgctgtttttagagccaataggaaacatttaaaacaacattacaaccttgcctttgagagctgataaatacttgtaccaaaaagtgtggcaataggtaaatgggccataggaactggggctataggactatggctattcctttactgactagtttgtagttgaccagtgtgtgtctgaagtccttaagtcactcacctgtttagaggtgagcccttcaattaatatggccctttgttttcaaggaaagaagttatagcaagtaggtatctgttgtcccgggacaccattttagtggttttcattttcatgcttgctccctggcctgaatctagaaagtaaaactttgctggaatgaagttggggttgaaacagtttcggtttgtaaccatactgtctctgtctcatctactcagctctgcctttgtaatgtaaaagcagccatagatggtatgtaaatgaatgaacatggccatgttctgatagcattttatttacaaaaac

SEQ ID NO: 26026 - DNA, 2300 bp, Homo sapien
aagcaaccagcagttttgttacatggtggctgaggatctaataatgtctccttgttttattttatttttatttagctggtctcaaattcctggcctcaagcaatccttctacctcagcctcccaaagtgctgggataggcatgagccgccacacccagctgtctccttgtttgtttgtttgtttgtttgtttgtttgtttgtttgttttgagacagggtcttgctctgttgcccagggtggagtgtagtgtacaggcccggctcactgtaatctccatctcctaagctccagtgatcctcctacctcagcctcctgagtagctgggactataggcgcacatcaccacaccggctatttttttaatttttagtagagatggagttttaccctgttgccaggctggtctcgaataccttggctcaagcaatccacccgctttgtcctcctaaaatgctaggattacaggcatgagccattgtgccctacttgtctccttgttttaattaggaacagtattctctgtgcccggaaaccatttgggtttatgataggaaaactgtctttttcccttcctctcccatcttcctctagatggaacccattgaggctgagagagtgtacagtgttggccctgcatacctaacttgccatcagaattgaatgtgttcatgcctccagatattccagtgctttttatgtgctaagtactgttttaggctcaaaggatatagcagtgagtaaaacaaagtgtctgcctttaaacagcttttattctaatgcagggagacagagtaaataaatgtatgatagtcagagatggggtgagcatgtcatcctgggccccatgctctctccccacctcacctcaatagccctggcatggcagtgggaggtgcacactcatactttcttctctgtttccatttcctggcatctgcagaaggactgaatgagctcttcctcttcagggtgttgccctgaatggctgacttaagccctccattgcacaacacagtaatgacttgttctgttgtcttgatttcagatgagacaccaattattgcggtgatggtggccctgtcctctctgctagtgatcgtgtttattatcatagttttgtacatgttaaggtgagcctactaacacttcacattctcttagattctgtttcaatatcccagtgtcccaatgaacccacacagtccagtagacagtaggatatacacaatgaataggatagagggggaatgacccatgatagtgctaaaattgaagttctacttagaaattatttaaaagctctacatagtcttccttaagtcctaagccctccctctttcttccatctgtccaagcccagtctcccaactccagtgcaagctaaagcccagaatggtagtttggaggttgaggtaagaaaccgcagtttgttattagtgacaggtgttacaggatctctaggtctagccctgctgaagcaacccctaaaagggccccagtaagattacatgctcaacaaaagcctactgtatttctggctggggctttgtccccagacccttctgggacccctggccctggcatgttgagttgagccatgtgagttgtgagttacaggatccctctttctaaccttctttcagggtcctctagacgttaccactcaagcagaagcaaggaaggggaacccaagggagagaagagggtggtgcatttattctcttcctgctaaagctactgccctgactaattggatttagccctgccttatctttggcctaaccaaagatgttctgtgctccctctgttcttctgcagggataaagagagaggaatcatgtgccccctataatttgtcatgtgtctctatcattctgcaggagacttgtggccaggactgtgtccacccaatccaaagctctgggcttctccctgggtctcccaggctacactgaggaaataccaagatttttgtttgatatatattgtctgtctcccccagctgtattccacccactcaccctctctctacctggtgtggctgtgctctgcagtgagccacatgagcctgaatatactgttggggttccctggttggattccagtgtgccaagggtaaacaggagtatcccgaggtactcggtcaccccagcatgctgctgcctcagggtgtgcatgacctgtctctaaaaaagcccgattatttttaaaggcgatttagaaaggctgaattgatgagcaggaatacagaggtgtgatttgcctctcccacctctgtgctccattcttcactgtgatc

SEQ ID NO: 26027 - DNA, 2300 bp, Homo sapien
tctgttgcagcgccggggcaggaaggacggggaccttctgtgccctgagcaccgtcctggagcgtgtgaaagcagaggggattttggatgtcttccagactgtcaagagcctgcggctacagaggccacacatggtccagacactggtatgctgcccacatatttgtccctgccaccacaccacctgcagcccttctctcagggaggaggctcttcagaggggcccacccagtagtcagaagactgtctaaacacagacctgcccttgccctcccaaggtgccccaaatacacaggaaacattgggaggcaggatggcagcaatgggagcatagcccctgttgccagaggttgggccaggttagaaggggtgtctgggtgccccacagggctcatctgtacttctctgtgggtcttgggtaaggaagatccatgaagagtacctgcctttgggcttgggctccctgttaagaggtctgactttaataagccgcacatccacagaggttttcctgaatcccatggagctagaaatgtttggggggtaaagaaaagtgaatgttaggaggtttgggagacgaggttctgagagccagggtgcatgctagcctggcagccatggtaagcgtgggccatgctcagctgcactgtctcccagcccagcacatgcctgtctgacctctgtggggcctgggtcagctctggtcagctctgcttgtagaaggtctgctgcattcagcccggaaggggaatgctgtcagaactctggcaggcagatcagagctcaggtgaaagttcaaaaacattcagttcctcttgattttccatcttcaacaaaaaaatgagtctgttaggaattacaggtactgtgtgttcttcagtaaccctgactttttccctacctttcactctccaggaacagtatgagttctgctacaaggtggtgcaggagtatattgatgcattctcagattatgccaacttcaagtaagcggcaacaagggtccgtggaccaggaggattgcctttaatattttgtaatattctgttttgttaatataccccaaattgtgtatatatcttataactgttttagaaattggtacataggcttctattacctattaggtggaaattttatatgtaaatgtgttagcactgatagtcctttttccaatgttttattggggaattaaatagtgtgatgtttggattgatatcgtgaaatcctcagccgagaaattgggctggattgtgctttggttaatacatctttccctaaagaagataaacacaaaatccattccaggtagctcggcaccaactaagaaaaaaagcacaaagttctcagagctctcgaggaaagtggttgtccccgtaccaccatgcactgtaaatatccctcccctctctccctggtcccctcccccatccccaccactgatatcatggggagtaataggaccagagcggtatctctggcaccacactagggactatcaggtaataaaagctttgactccctgaggaaatgtctctccctttgtctgggggtggggcagccatacaggctggggctctcctcggctgttcatggccctcctgttgctgttctctctgagttatctgagagaggccacagtcccccagctcctcctgtccaccaaacacagcccttccagttcttaggtgatctccaggaccctcctttcattcccagcacatctttggtttagtggtcctggccagcctccctccctaggaaggtggccaggtcctcactgagtctccttaaggacaggggcacaggggagactagagctggctcagctttgggctgaggccagtctgacctctccagtctgtggtgctttgctacaaaactgtctggattgtgtcaccctatctaggataaatctttatgtccacatatattgtgttgaattgttcccattttctttcatacgtgtcctcatttctgggacagtgtgaatgtttctcagatctagaagtcagatggtgggagtcttagatccgaacttggttttgagtgacatgttagacaaaagtgttgaacttttgtttcttaaagaagctggatgttcatttatgtctcccgtaacagtctgtgctgtccagagacccagtatccttaggatattattctcatcctcatggttgaagctgggtcactgccatgtccataatccaccctgaggaaagagcatggagagccagcagcttcatttctaaggacaggaagccaaatctgcacttttcacttccactcataatccaccc

SEQ ID NO: 26028 - DNA, 2300 bp, Homo sapien
ctcccaccccaggcctaagttcttccctctatgagagactacttgcagaaacctgtgttctcactcttcccccttcctcacttcattcccacacatttcttttccatccctgcgcaccaaggtcaccttggtgctaaacaccagggacccatggtctcttcccctttgtgtcacaggctgtcctctgcctcttatcctcaccctttagctgctcctccactgtctcctctctcagaggtcaggattctggatctgtctctgtggaccctcagctctcctccaatcccaagtcccccgcatcctggtcgcatgtcagggtggtccagagatgcctgcctcccactgcccacacccaggggcccgccctcctttcctctaaccttcccacatactctggccccatggatccacggcagttcctgctggcccttctccattttgttccttatgctgcacccctctgctgccactccctgcgtccgtgactccagctcactcgtctctgtccttcacccaggccgcctgctcagggtttgtgcctctctgtgctcctgcagcacctgagtgtttattcacctctgaacctctgctttcccacctgagtacacgcagctcctggctgcagtgacttcatatcctgaggactggagctccgtggtgaacagatggctttctatgttctaatgagagggatacaagagttccacagttctagtctggaaaggaccaaacatttcttaaaagctaagtatgttgccggaaaaaaaagggagcagagctttccccaggaagcttggctctggtttagatttttcaggaaaagccggaatcaaattacagaataaataaaggcaaccatcccccttttaaaggtacaccagccttggtgcatctttgaagaaagcattctgtaaaccccaaccagaactaaactagtacgtcgaactcagattcattttcactaaaccacaagcaaatgtttccctaaaaatcacccagttaacaaagtccgcatatttaagccaaaacaatttaactgaacaaatgggccacacgttgatttccggtccctgctaataagtcagtctggaagttcacaggtgtgcccatcctgccttggctgctgaagtccaggtgtctagggctgactgatgcccattatgcctcccctcccccatctttgtcacaggatttgacgcaccagctctccaaatgaccctggccctcccatttgctgttcagcccaagtgcggagattggctatgaaccctgtaaacaggcctctgacccccagaggctgatggctggccaaggaaagctgagctgctgacgcagactgggaagcaagagcccacttccagcagcccaggctagctgtgtccaaatccatgactggggaggggttagagccttgagggacaaaattattctacctacctagggagactgcactggcccaacagctgggccccatctcatgggcccgcttcttcgccaggagagaagccactccggggtaggtactgccccacccaaacccagccatctggagtgacccagccctggttcccaggtgtgtggatgtgaattgtcccacccaacccactctacagtgagcaaacggaagccctctgggagagtggtcacagcctcccctgtacctctgaacagcctgccaggctccctactcttaggcttccactgtccaccagggaaagccctgagctgggagttggggagcccccaggcattgcccctgcccaggacacaattctcttttgggatcagggaaggctgtgagggctttctaggtctcaagatcaggagcttgaagatgcagcctgggaagtgggaaggtgagaccaggacataggccagcctaaagcaagagtcctgggcctgaaggctcctgggaaggtggtggggagggagcatgtgtcggtggcctcagggcagcagctgcctggtgaatgttcatggactggatgctctgggaagcgggttgggtggtgagcttctctcttcccctctgaagacgtcactggagtctgggggtggagctgcctggtctataaatcctggggccatcaggctagggtcctgcagctgcctgaaggagccatctcatccacagctcttccttggtgagtggggagccttccctaagggctaggacacctggaccaagtttcatcctgggcgtatggtgtgctgctcctcttccccattcccaggtgcctccacccctgaaccatgccagagaagtccccttttcctctcctctccccaacagctctacc

SEQ ID NO: 26029 - DNA, 2300 bp, Homo sapien
gatacagcaggccacggagaaaagggcagaaggcctgcaactctggttccctagcactggtgctccaaacacgcctacattgagaactcccctgaccatccatctatcctcccatccattggcctgaattcaggtctctgttcccctccaactttcttccacttctggaaactccttgaaggaaagatggatggacctggacaagtgggagggccctcagagctggcaaggcaggtagcctctgtgccccaggctcagggagaaggctcgtcccctggagcatcatcccctgctgggccaggatcccccaggatctggacccctgtatgcttgggatgaggagcggtggcagagagggaagggcataaggagataccaaagctgcccctgagatgccagttttccaaagtggccctggaggaagtagggggatgtgggggtgaggtaagtctccttgaatgctgtaccctgtccattagagcagccatggccagctccaggcgaggcctcctgctcctgctgctgctgactgcccaccttggaccctcagaggctcagcactggtcccatggctggtaccctggaggaaagcgagccctcagctcagcccaggatccccagaatgcccttaggcccccaggtgggtgtctcccagcctcatggggaggaagaaagtgatggccgggggctcccccaccctcctggagcctgaggtcggggtagggaggacagcatcagttcccttctaaggaagggccctggacactgcagcaggcagcccagtccagactgcccatggcctcccaagtgatgccctggctcccctggacgacagcatgccctgggagggcaggaccacggcccagtggtcccttcacaggaagcgacacctggcacggacactgctggtgagtagggtgagaggtccccagcatcaagaccagccactggtcatcagaggccattgtggcttagggttgggtgctgggagggtggggagaatgaaacaccactgagatgccccctgccacagcacccccagccatttctcagtgcccctactgcacacagcagggtgctgtctgctatccttcctatttcccaggaggattctagacaatttacaaagcacttgggttaaagaccaaagtcactagtagactagaaggagataattgttctataagacagtggtggccatgggatcccacaggcatcctgacaagccaatgactgtcttgaggtggacagaccccaggccagtggaaagaggtgagggatgcaacctcactcaaacagacaacagggccaagaggaccaggtggtgactgacatgtgcactaggaacatctcagggactgcagagctccccaagaccatagcagaagacaggcgtggggaaatggtttgctactgttttgcaaatcaaacatttacagtgcatcaggagagcccggtaactaaagaagaaagtggttagttcctatgaggcaatgtcttaccgcctgatttgtgtgtatgtgctgaggtttctatgcgtcaggcttgtttagggtggacaagagggcatgcccaagggagctggagatccccacactagctggatcctcaggcttctacgggaggcggggggcgtcctgctgtgggaggccacatggggactgggggggacgagaggggagagaaccaggaagatggcagctcggcggttacgagaccagtgtcctgagacatgaccgccacctctccctccgcagaccgcagcccgagagccccgccccgccccgccatcctccaataaagtgtgaggttctccgaagctgttgcgtcgagttctgtccttcgtcccctccctgtcttccccgctgagacccttccctgcgtgggggctggagggacgcgggtccggccccgcgggcgggagtaactaagggatggccccgggccctggcgggaaggccgggccagagcctgggggcgggatgcggacgtccgcagggtcgccgcttcggttccagaggccacacggccgggcggggcgtgagggacagcccgaggactacaggtcccaaggttccccgcgccgcttccggggcacggtggcgtcccggcaccgcggccgcagtgaggagactcggccatgctacgcgcgctgagccgcctgggcgcggggaccccgtgcaggccccgggcccctctggtgctgccagcgcgcggccgcaagacccgccacgacccgctggccaaatccaagatcgagcgagtgaacatgccgcccgcggtggaccctgcggagttct

SEQ ID NO: 26030 - DNA, 2300 bp, Homo sapien
atggatgccaaaaccctgcacactagaaaattcacatataacgtttgacccccccaaaacttaattactaataattaagtgaaaggcctttacaatgaaaactataagacactgataaaaaaaaattgaagtccgggcgccgtggctcacacctgtaatcccagcactttgggaggctgaggcgggtggatcacaaggtcagaagttcgagaccagcctggccaagatggtgaaaccccatctctactaaaataaataaaaaattagccgggcgtggtggcaggcgcctgtagtcccagctactccggaggctgaggcaggagaattccttgaacctgggaggcggaggttgcagtgagccgagatcgtgccactgcactctagcctgggcgacagagcaagactccatctcaaaaaaaaaaaaaaaaagaaaaaaaattgaaaaggatacaaacaaatggaaaggcatcccatgctcatggattggaagagtattgttaaatgactgtactactcaaagcaatccacagattcagtgcaatccctatcaaaataccaatgacattcttcacagaaatagaaaaaacaatctgaaaatttgtatggaaccacaaaagatacttaatagccaaagcaataatgagcaaaaagaacaaagcttagaggtaccacaccacctgacttcaaaatttactacaaaggtgtagtaatcaaaacagcaggctattggtataaaaatagacacagaccaatagaacagactggagaatccagaaataaatccatgtgtttacagtcaactgatttttgacaaaggcatcatgaacaaacactggggaaagaacatcctctttaataaatgatgctgggaaaacaggatatccataggtagaagaataaaactagacccctatctctcacaatgtacaaaactcaactcaaaatggcttaaagacaaacataagacctgaaactataaatctactagaagaaaacatagggaaaacacttcaggacgttggtccaggtaaagattttatggctaagacttcaaaagcacagtcaacaacaacaacaacaacaaaatagacaaatgggaatacagtcaactaaaaagcttctgaacagcaaaggaagcaatcaacagaaacaacctgtagaacaggaggaaatctttacaaaccattcatctgacaaggggctaatattcagaatatacaaggaattcaaacaactcagcagcaaaaacataaacaatcccagtaaaaagtgggcaaagggctgggcgcggtggctcacgcctgtaatcccagcactttgggaggccgaggtgggcggatcataaggtcaggaatttgagaccagcctggccaatagggtgaaaccccgtctctactaaaaatacaaaaaattagccgggcctggtggtgtgcgcttgtaatcccagctactcgggaggctgaggcaggagaattgcttgaacctgggaggcagaggttgcagtgagccaagatcatgcctttgcactccagcctgggtgacaaagcgagactgtctcaaaaaaaaaaaaaaaaaaaaaaaagtggccaaaggatctgaatagatatctcaaaagaagacacgcatgcttgagcctagaagttggaggttatagtgagctatgatcgtgccactgtactccagcctgggcaacaaagtgagactctgtctctaaaaaataaaataaaaggccgggcacagtggctcacacctataatcccagcactttgggaggccaaggcgggcagatcacaagatcaggagatggagaccatcctggctaacacggtgaaaccccatctctactaaaaaatacaaaaaaaattagccagtcgtggtggcaggcgtctgtagtcccagctactcaggaggctggggcaggagaatggcgtgaacccgggaggcggagcttgcagtgagccaagattgggccactgcactccagcctgggtgacagagcgagactccatctcaaaaaataaataaataaataccctgcccggccgccgccccgtctgggaggtgtacccaacagctcattgagaacgggccatgatgacgatggcggttttgtcgaatagaaaagggggaaatgtggggaaaagaaagagagatcagattgttactgtgtctgtgtagaaagaagtagacataggagactccattttgttctgtactaagacaaattcttctgccttgggatgctgttaatctataaccttacccccaaccccgtgctctctgaaacatgtgctgtgtcc

SEQ ID NO: 26031 - DNA, 2300 bp, Homo sapien
ggagaactgctatgcagaccacagctgaccccatagggagctctggagccaaaatgctccttcagagttatcctgcatttgggccaaaatggaccagtcattggatgcgggccacctgggaagggtgtgaccctgagccaggcagctctctgcagctgaagcaggctctcgaggagctacccctgagggccacctgcagagggcactcccagcagctgggtggcaggtgctttcacaaagggagagttgagcagcgcctttcctttcttgttcatgatatctaccaatacctctcccactggggtaatccatcttttcttttaattattttccttttgagatatattaaaaatgcaaaaaaaaaaatttttatttttttgagacggagtctcgctctatcacctaggctggagtgcagtggcatgatcttggctcactgcaacctccgcctcctgggttcaactgattctcctgcctcagcctcctgaatagctgtgattacaggtgcctacctcacgcccagctaatttttgtatttttatatttttagtagagatggggtttcaccatgttggccaggttggtcaaccaccacgcccagccaaaaaaaattttaatgtcgaaaatgagagaaatagaattacaaaagaaaccaattacagggccaggcacagcagctcaagcctgtaatcctagcactttgggaggctgaggcgggtggatcacctgaggtcaggagttcgagaccagcctggtcaacatggtgaaacccccgtctttactgaaaatacacaaattagccaggcgtggtggtgcatgtctgtaatccaagctacttgggaggctgagacaggagaatcgcttgaaaccaggaggtggaggttgcagtgagccaagatggcgcccgccattgcactccagcctgggcgacagagcgagactccgtctcaagaaaaaaatatatatatttatattcagatatcaaaatgttaaaacactttttttttttttgagacagggtctcgctctcgctctgtcactctggctggagtgcagtggtacgatcacagctcactgcagtcttgaattcccaggcttaagcggtactcctgcctcagcctcccaagcagctgagactacaggagcacaccaacacgcccagctaatttttgtattttttgtagagttgggggttctcgctatgttgcctaggctggtcttgaacttctggtctcaagtgatctgcccacctcagactcccaaagtattgggattgcaggcgtgagccacagcgcccagccaaaacacattttgatggtgtcataaacgtgcttctttaaccattagatagcaagatctggtcgtggcccaataactgtgataattttgaagatataatgaatctaaacagtatatagaggcatttgtgacagctgtgataggaagttatcttctattttgatttgtgacaaagccacaggtattgctaattctgctgtggtttgttgcctaatttatagtgaaaggaaaggtggaatatcagttacagattagagacagatgtgatctcttcctatccaagtttcaggtgcagggaagtgggtgttgctgtgtggtgagggtgaagaggttttctggaaatttgggtttaggaagaggaaatgttcctaaaagaggggacaatgatccacatgcgtggtgggccaagagggtgggcggatcctgccagagcctcctcccacctggaggggtcccagcgtccaccttccctgccccagcccccctcctcgaggtactgggaggctggataaagtcttcggctgggccacaccccaccccaaattctccctgtcccaccctagtggcccaggccaccccggcctgctcccttccgcaaggcacctcaccttctgtgcccagaccattagccaacgcggtgaccttgaccccggcccaggccctgctaatgaagaggaaagcccgtacgcactcggcctgacccacggcgaccctctgtgaccaatcatactaccaacctcttaaacagagctccaccgacgcaatgcccaggcataaaaaggccaggccggagagaccgccaccagtcacggaccctggacccagcgcacccgcaccatggccggccccagcctcgcttgctgtctgctcggcctcctggcgctgacctccgcctgctacatccagaactgccccctgggaggcaagagggccgcgccggacctcgacgtgcgcaaggtgagtccccagccctggtcccgcggcgctccggggagggaggg

SEQ ID NO: 26032 - DNA, 2300 bp, Homo sapien
tgtaatcccagctacttgggaggccgaggcaagagaatcacttgaaccccggagttggaagctgcagtgagctgagatcacgccactgcactccagtctgggtgacagaacgggactctgtctcaaaaaaaaagtatttatttatttatttaaaattagagatggggccgagcacggtggctcatgcctgtaatcccagcactttgggaggccgaggcgggtggatcacttgaagccaggagttcaagaccagactggccaatatggtgaaaccccatttctactaaaaatacaaaaattaacctggcgtggtgacgcgtgcctgtaatcccagctacttgggaggctaaggcaggaggatcgcttgaacccgggaggtggaggttgtactgagccgagattgtgccactgcactccagcctgggttgacagagtgagactctgtctcaaaaaaaaaaaaaaaaaatagagatggggtcttgctatgttgccgagactggtctcaacctcctgtctgggtctcccaagtagctgggattacaggcataagctgccatgcctggctctaaagcttttgtataataaattatttatttctgtcctcacattgaccctaggaggtgggtaccatgattttccttacttcacactggcagaaagtaaggcacagagaagtccagtgagctgcccaagccatgaagtgtcgagcaacagaggccagaccctgagccaagctattgggagccagtgttcctgcaataacaactgcccagtgttgcctctcaaagggtccttgcagtccctgaggggtcattcctgaaaagaccgacgccatggcctgagtataggaggcccctcctgggttgctggccccctcactgcccttgctggagatggggctgctgtgtcccctggaatttcctcgcagcacctctatgcaccctggagaggaggccaagagcctgtgggaactgcgagagctggggactgcgcacagcttgagaggcagggggtaccgggcctgaaccccagaccagcggggcattctggtggcccagggagagaggccatgtcctctttagacctgccaccttgggattagggaccaaaagtggctttctcaggctgggtccatttaggtatggctcctcctgcaccttcccccaggcccagacaccccccacccccggctctcccaccccaggcctgagatgtacctgccctggttgccacatactaaggtcctggtgggggtaggaattgggacaaactgttgtcaggtttcctggggctccccccgcctttgaaccttacttggcatggagttctttctccccatagtagctctccacactcatgtttctacctgggagggggtgacgggtcatgtgccaatgtgtccccaaggcccccagtttcagggcctgagtccccatgccctgctctatgggggtgcgggggtgtcatgtcttgcactttccccagcaacctgccacccccctaccctgtgagaacaagcccctctcattctgtgtcccttgactccacgacggcggctgccttgtccacgaggcagggattctcatctctggtgcagcccctgtcctcaccactctgggcttgtgctgttcttggtcccttatcttgttgtcacagggctaaccctccccacacacctggctgtcccctgccccacagctcctaggccagggcctgtccctgcccctaacacgcagcccctcggttcctcttaccctcttcttggaccctacgccatttctgggtaatcagaaagctcagagatggtctccaggtgaccccccagtctgtccctctccctgaatccagagcgctgcagtcacagtagaggcaattgctgtcattccgcggcccatgacagcctggcggcccgtacccctcccctatgatcccctgcacagacaggcccacgtgtgtccccagatgcctgaatcactgctgacggctggggacctggcggccgtgggctcctggggagccactggggagggggtggcggccgcgtctcgcctccacgggaacacctgcggacataaataggcagccagcagaggcagcagcacagagccaccaagcagtgctgcatacggggtccacctgtgtgcaccaggatgcctgacaccatgctgcccgcctgcttcctcggcctactggccttctcctccgcgtgctacttccagaactgcccgaggggcggcaagagggccatgtccgacctggagctgagacaggtacttcccactgtgggccatctcagggct

SEQ ID NO: 26033 - DNA, 2300 bp, Homo sapien
cctgagtagctgggactacaggcgcccgccatcacacccggctaatttttttttttttttggatttttagtagagacggggtttcaccatgttagccaggatggtctagatctcctgacctcatgatccgcctgcctcggcctcccaaagtgctgggattacaggcatgagccaccgcacctggccacatgcaggcacttttctaaagctactttttcttttgaaacagtgtctcactctcacccaagctggagtgcagtggctcaggtatggctcactgcagcctgggctcaagcaattcttccacctcagcctcccgagtagctgggaccacaggcatgcaccaccacacctgcccaatttttaaattatctgtagtgataaggtctatgttgtccaggctggtctcgaactcctgggctcaagtgatccttctgcctttgcctctcaaagtgctgggattacaggtgtgagccaccgtgcccagccttaaagctgttgtttttttttttcaatttaaaatgtatttataggccgggcgcggcggctcacacttgtaatcccagcactttgggaggccaaggcaggaggatcacaaggtcaggttcaagaccagcctggccaacatggcaaaaccccatctttagtaaaaatacaaaaaaattagccaggcgtggtggtaggcgcctgtaatcccagctacttgggaggccgaggcaagagaatcacttgaaccccggagttggaagctgcagtgagctgagatcacgccactgcactccagtctgggtgacagaacgggactctgtctcaaaaaaaaagtatttatttatttatttaaaattagagatggggccgagcacggtggctcatgcctgtaatcccagcactttgggaggccgaggcgggtggatcacttgaagccaggagttcaagaccagactggccaatatggtgaaaccccatttctactaaaaatacaaaaattaacctggcgtggtgacgcgtgcctgtaatcccagctacttgggaggctaaggcaggaggatcgcttgaacccgggaggtggaggttgtactgagccgagattgtgccactgcactccagcctgggttgacagagtgagactctgtctcaaaaaaaaaaaaaaaaaatagagatggggtcttgctatgttgccgagactggtctcaacctcctgtctgggtctcccaagtagctgggattacaggcataagctgccatgcctggctctaaagcttttgtataataaattatttatttctgtcctcacattgaccctaggaggtgggtaccatgattttccttacttcacactggcagaaagtaaggcacagagaagtccagtgagctgcccaagccatgaagtgtcgagcaacagaggccagaccctgagccaagctattgggagccagtgttcctgcaataacaactgcccagtgttgcctctcaaagggtccttgcagtccctgaggggtcattcctgaaaagaccgacgccatggcctgagtataggaggcccctcctgggttgctggccccctcactgcccttgctggagatggggctgctgtgtcccctggaatttcctcgcagcacctctatgcaccctggagaggaggccaagagcctgtgggaactgcgagagctggggactgcgcacagcttgagaggcagggggtaccgggcctgaaccccagaccagcggggcattctggtggcccagggagagaggccatgtcctctttagacctgccaccttgggattagggaccaaaagtggctttctcaggctgggtccatttaggtatggctcctcctgcaccttcccccaggcccagacaccccccacccccggctctcccaccccaggcctgagatgtacctgccctggttgccacatactaaggtcctggtgggggtaggaattgggacaaactgttgtcaggtttcctggggctccccccgcctttgaaccttacttggcatggagttctttctccccatagtagctctccacactcatgtttctacctgggagggggtgacgggtcatgtgccaatgtgtccccaaggcccccagtttcagggcctgagtccccatgccctgctctatgggggtgcgggggtgtcatgtcttgcactttccccagcaacctgccacccccctaccctgtgagaacaagcccctctcattctgtgtcccttgactccacgacggcggctgccttgtccacgaggcagggattctcatctctggtgcagcccctgtcctcacca

SEQ ID NO: 26034 - DNA, 2300 bp, Homo sapien
gacgccggctaatttttgtatttttagtagagacggggtttcaccatgttggccaaggtggtctctaactcctgacctcaggtgatccgcccaccttggccacccaaagtgctgggattacaggcgtgagccaccgcatctggcctggattttgaattaggacagttttcctcactcccaggttgcgaaggagttctctcgttttccatttatctctagttcttccatggtttcattcgcccagtgactgcagcgccacctgtggaaaggtcagttttccaccattcctgccttgcagtacacaaaatttccatgtgtagttgggcctgcctatgggtttttcattctgttctgttcatctgcctgtgtattcgtgggttagttctccccacccacaaaccaaactgttctttttcagagttttcctggctaccttgacttattcttacaaatgagctttatttttatttttttttgagatggagttttgctcttgttgcccaggctggagtgcagtggtgcgatcctggctagtgagatcacttgaacctctgcctcccgggttcaagcgattctcctgcctcagcctcctgagtagctgggattacagacgtgcgccaccacacccggctaattttttgtctttttagtagagacagggtttcaccatgttggccaggtctcaaactctcgacctcaggtgatccacctacctcggcctcccaaagtgctgggattacaggcataaaccaccgtgcccggcctacaaatgagctttacaagaagagtatctaacgacaaaggcaaatgtccatgagatagtgttagaaatagcaggcaacagacccacacactatatacctagaaatatttttttctttacagaaaaacattgaaagggaaaacatcaagatgtttgtgtggtgctcacttgatagccgggttaagggtagcgttatcctattattggtgaaaacccggagggaataaacttgaccctcccaagtcttcctcctttgtcctcaccttagtcctgtgccactctggagatcttgtcacccctcttggcacagacagagccatttcaggcacctctctgcaagggagggagtgcattacagccaggtggagcctgggtgcaccgcttctgcccagcgggggaggaaggcaggtggggttcaagcctgtctgattttgtacaccattgttttgctctcctgcccccatgggggggggggctttcctcctctcccaggtgacagttcataagagggaagggcgacaagctcttattttggcccagcactgtccaggagaactttcggtgatggtggaaatggtctctatctgtgctgtccaatataggacccacctgtgctgatcataactcccaaaacaggatccccatcaccataatcctaaatgttgaaatcctgaaagatcaaaatccctgaagtctgaaatcctaaaaatcacaatctcaaaagtccaaatttaagaagacttaattgtacctaatttcaaatctgtcacttatggtttggggattcaattagacatcagggattttagacttcagggattttgatctttagggatttcaacattcggtgttatggcctttgggactgtgtcttttgggattatggccgaaacccagtagccactaaccccatgtgactatcaagcactttaaatgtaggtggtgtgagtaatgaaccgagtttaaaaattcatttacttttaattaaatagccactgtggctagtggctactctactggacagtgcggttttcactaattcacaacccagccctgccccttccaatccagaactggaaggaaagagcctgcactggcaaacacgctgagcagccaggtgaggtgacagcaggcctagccggggggggccagctctgaagccaggacctgctcaacgaaggcccacaggagtcctgggggagaaatcagcctgaagcagcttcccaccccagtggccatcacaatggcagccagcccagcctcacaatgtcacaataccacaggcaggaggccgggcaggcaaagtggtttcctccagggcaggactctttgtctgcagacctacttacagccaccgagcgtcagaaggcccatctcctggggaatggaaaagtgcccagccgctgggaggcctcaagctggagagctacgggggaagcagggcaggtgtggggctgggagaagctactaagccccacaccccaggtgctctggggcctcgcagcccagctgcagggagatggaacactgtgagcag

SEQ ID NO: 26035 - DNA, 2300 bp, Homo sapien
catcctcccactgttccatccttggcatgttgttccctccttaccacaaagtggctgccacagctccatgaagacattgaggcggccctactttatcatgaaaagtaaaagctttcccagagccctcccaggacccttccctttaagtcctgttggccagaactgagccacatgctcctcccacttcaagggagaatgggaatttgagtattacaaagagaaacaggattgtcatggctgcctaggaacaaacatggttcattccttgggggcaggctctctgctttctctgggttctactggcaaggacagagtcataacaatgaatagtgtttgccctggtctggcctgagggagagaaccctccctaagcagtggtgtctgtggtctggggctccagatattcaaacagcgctgtctccagagctcaggagttgggatgtcaggcttgcccctcctggcagggacgtgttcttcctacattgattttgtcttccctacaagataggccctggagggagcatgatttctcagctctccttcacaccccttagagccaaggcattgacaagatatgaagaccctgatcagcagatctcaagtgccctcaggaatggcagcctggggccaggactttctgataggtagaggtttagtagagtctctttcttgtctaggtacctatactgacagctgtgtcaatatatgtacccagtaggacccagccctccttcttagggtggtggagaatcaccctggctcatgctccatagctctggcctcgctaagccccagctccacatccatttctctcagcaggctcatctatccatcatgtcactagctcttttcctgagagcactttacagatacatctctattataaatgcattaaaaaaaaaaaaagatggagtctcactgttgccccggctggagtgcagtggtgcaatctcggctcactgcaacctctacctcctgcgttcaagtgattctcctgccttagcctcccaagtagctggggttacaggtgcacgccaccatgccccgctaatttttttttgtatttttagtagagacgaggtttcaccatgttggccaggccggtctccaacaccggggattacaggtgtgagccaccacacccgaccaatgcattgttaaaattagacaggtgtggtggtgcatgcctgtggtcttagctactcaggaggctgaggcaggaggatcacttgaacccaggaggttgaggctgcagtgagccatgattgcaccattgcaccccagcctgggcaatggggcaagactttgtctcaaaaaaaaaaaaaatgtattgtttttctcactgtacaggcttagagaatttatgtgggccgggtgcgatggctcatacctgtaatcccagtactttcggaggctgaggcggcagtattgcatgagcccaggagttcgagactagcctgggcaacataggaagacactgccatccccgtctctatgaaaataataataataatataacaagaatgaatttatgtgacttctccaaggccataaaaccctgagtggtggtcctcagatttgaacatgtgtctaagctacttacttttttttttttttttttttttttagatggagtctcgctctgtgtcccagagctggagtacaggggtgcccagactggagtacagtggcgagatatcggctcactgcaacctccgcctcccgggttcaagcgactctcctgcttccgcttcctgaatagctggattataggcgtgcgccaccacgcccggctaatttttgtatttttagtagagacgggggtttcaccacgttagccaggctggtctcgaactcctgaactcaggtgatccgcccgccttggcctcccaaagtactgggattacaggcgtgagccaccgcgccgggactaagctgcttaatgacttccagagcgatccatccaggaaggtgttttccctctgcaggtcctagactccccctgcctcctcaacaacgtcctccagtggaaaatgtccttgggaaacgctgacagagtcttttgagcctcggccgcatccgtcactcgcgcagcaggcggaagtagcgggcagttggccggaagtggggctgtgaggctcggagtcgccggaggagccagtatctgtgtcgccgccgcccgcggcgtccccggtttggtgttgcggcgcccaccttcgggaggatcaggtgagtggcggcggccggggaggaggtcgcggcggcctctttccgcgttcacgaccgtcctgggccttggc

SEQ ID NO: 26036 - DNA, 2300 bp, Homo sapien
accaccacacccagctaatttttttgtatttttagtagaggcagggtttcgccctgttggtcaggctggtctcgaactcctgatcttaggggatccacctgtcttggacctccctaagtgctaggattacaagcgtaagccaccgcgccaacctgttttttttttttttttttttgatgtagtctcgctctgtcttccaggctggagtgcagtggcatgatctcggcttactgcaacttctgcctcccgggttccagtgattctcccacctcagcctcctgagtaggggattacaggcgcgcaccaccacgcccagctaattttttgtatttttagtagagacggggtttcaccacgttggccaggctggtctcgaactcctgacctcaagtgatttgcctgccttggcctcccaaagtgctggcattacaggtgtgagccaccgcatccggcacttgtaccacttttctgaaaccattctgacatagacattggtgatgtctcgagaccagctcctaaatccgcagcacactctccaaccccagtgttacctggccctgttatttttaacactggaaactgtccccacattcttgaatccccccaatcttggccttcagggcccaccttctcctggccttcttcctgctcccagagtgccttccagacttctggggctttgctccctggctcagtgctggcctacacccccagcacccttgaaaactgatgatctcaatctctctccatctagtgctttttttttttttttttttttttttaaggaaagagtctcgctctgtcacccaggctggagtgcagtggtgcaattacagctcactgcaacctctgcctcctgggttcaagggggttctcgtgcctcagcctcccaagtagctgggattacaggaatgcataccgcacccagctaatttttgtatttttagtagagatggggttccaccaatttggccaggatggtcttgaactcttggcctcaagtaatctgcccaccttgacctcccaaagtgctgggattacaggcatgagccaccttgcttggcctccatttagtgcttgagaggtatcttcctctggtgtttcccaaagcaactattttccccaagcagtctccccctatcatgttaacagtgtcacacgcacgctggtgcccagtccagcattatcccttgtccccaccacctgacctcatctgtatgaaattttgccagttctttcccaaaccctgcccaggccttcctactggttccaagcctcaggcctttcaggcttcatcctcccagtccccagctgctccccacattgcacccagaggtggcaagagaagggtccatacttaaggtaggagggggttgcagggctgaggcatagggggctggagtatgctggggagtagaggcagagcagggactagagtgaggccagagagggacccaaggcacaaagggaaggaggctgtcaccctcagggctgtgtacttgctgtttgtgcccttcatttgtgccctacgtggctctctgtcctcatcctagtcctggcccttgcttatggggacagacgggtccaagggaggagggtggcgaagtgctcttctccacacctgtggggacagatgctgagaatggaattctacagagacagtggacaggcttggtagtgaactttccaacaacctagagctctcattcctggtgtgggggccagaagactcccgaaggacaacagttttgtcaggtgcccttggtctgggccagggactcagcattagaactgggcatctgggtagaagacggtctgtggggccatagggtgccacgtgggccccttaacttgatagggaaggagggctccctgcctggtttatgcagggtgtagtgggaaaaggcctgaagggcgccctctcccatttcccacacacttatttgagggtctaacccgaggcagacactgcctggtgctcctgcccggctgcattatgcagatctctggggcaggtgttcccaggtgcgaacttgagacaaaggaacgaggaagcacggcctccctgagcacaggtaacccgaggcctggctccccctgcgcttgtgggccggccttgggggagggggacgcgcacccacagaaggactcagagggcttcacggtaagctgagcagggtcaaggtccacagggagcgggagagggtagtaatccgggaagtcttcctggtggcagtgaattctttgcggggttcggcaggcgcaggatccttggggccgcgcaccctgcagcggcccct

SEQ ID NO: 26037 - DNA, 2300 bp, Homo sapien
agactacaaagagagattaagttgagatcaagacagaggtggaatggaaattggctgaaagaaaaataaaacaagcagaatcaaatgtcttattggagaaaataaacagtactcttggctctgaagaaaattaaatccgtaatggtgaagaaaaacttgatatagtctcccagggtgcagagaaaacaaacagatttatttgacattggtgatccaatgtgatagttttagaggagaggaaagaaaaaaacccaaatcttttcacagaatggacaggaagaaaacttttctaagctacaaagaagacctcttttgtttctggaaaattaatagataaggcccatattgatttatactggcaaaatgtttgacttttgagggtaaagaaaaacccttgcaagcaccaagcaaactgctgaccttaaacagacaaacccagctttgcattttcagtgccagaagacaatgaaataaagacaagagttttgagggggaaagcttgagactcaagaatcctataaacaggaaatcattataaaggcattctcacctaaggcaaaggcttaggaaatacaacattccagagtcctccctgaaatcaccagtcatgtgagagatgggtccaaatgaggaatagaaaaattagagcacaaaaaaccggcagtaacattgaaaccaattaaacagagttggcaaaagccaaaaacaaggattgaaaaagaatgttgtggcttaaaaaaaaagtgtaaacaaaagttaggtctgtcgtcctgattaagtggacaaatataagtagtgagggcggcaggtaggaggcagaaaagcacacaaaatttctcatgggggaatataaaaacgaattatttgtcactgactttactaatgtgtgaaatgtaaactattttcatttgataaatctaaaggcagccgcgagaagaattaaaaatactttctgccttgaaaatcacgatagaagataaaagcaaatgtgggaaaattcagaaaacaggaataaataaaaactatagaatacgaagtcgtaagaccaaacacaacacctataaacagcagagacgtaatgcgttaaatcccagccagagcagaggcgctgcagttcttagggcagaccctggtgcctccaggcttttgctagtgctaaactctcggctaggcttgcctccctaccctattcaaggctgaggcctcaattcaaggccgactccctcctcccggcagtcctcccgggccgccctaggctgagtgagcactccccacagtgaacgctgcccgcgcgggcgaggccggcgctccgggtccggtacgaagtcccacctcactccctctcaccccgggttacagcgtgtggtctggggccacgcgttacgccaggcgcggggcacagggtgaaagcgttcaatcctgctggagtgtaatgtgtattttttccccgtcgcaccttccagacggtgatccagtgtgagcagcaagtttcaaatcgtctccgtttggtcacgaacggagtttactgcccctcgacgcctcccgcacgacagcccgtggtcctcgcgcccgggcgggtcgttgctcggccgggcggatccacccgcgacggctcgtcccgacccctccctagcggacttgcaaggtctcagggcgtccgctgggaggccgcgtcccgaagagctggcgcgggagaggaatggggctcggggctccgagtcgggagccccttcccccaagcaagaggggctcctcctcctcttcctagacgtgggattcagggagggcgcggttccattggatttgttgcagaggaacgactgggcctgagcccaagcccaagggcctggggggtaacgagcgatgagcagaggggctcgcggcggacttgctgcgccctagagagggtgaggctgaggggtcccacgcgcgggcggggcgcagcgacgaaggggttaaggcgcctcaccccgccccagcccgggcattggctgccctggggggcgtggccggagggcgggctcgcgtttgccgcagccgctggtgggcggggctcgggcggggagcaggaggggcgcggagcggagccgggcccgcgcagcgcgccccgccgggcgtgcttcgggctgcgccagcaagcggggccggtggcgcccgtgtcggagaccccgcgccggaccctgaggcagcgagtaagtgaggcaggcccatcgtggcatccctcccggctccgacctgccgccgtgcctgctgcactgcgcggcatgtctgacctgacccggactgggtagggggcgcgt

SEQ ID NO: 26038 - DNA, 2300 bp, Homo sapien
tcccgggtccccaccattctcctgcctcagcctcccaagtagctgggactacaggcgcccaccaccacgcctggctaatttttttgtatttttagtagagacggggtttcaccgtgttagccaggatggttttgatctcctgacctcgtgatccgcctgcctcagcctcccgaagtgctgggattatgggcatgagccaccacacccggctaattttgtatttttagtagagatggggtttctccatgttggtcaggctggtctcaaattcccgacctcaggtgatccacccacctcgacctcccaaagtgttggttgggattgtaggcgtgagccacggtgcccagcttttttttttttttttttttttttgagactgagtctcactctgttgcccaggctggagtgcaatagtgtgatctcggctcactgcaacctctgcctcccggcttcgagagattctcctgcctcagcctcccaagtagctgggattacaggcacccaccaccacgccaagctaattttgtatttttagtagagacagggtttcactgtgtttgtcaggctggtctcaaactcctgagttcaggtgatccacccacctcagcctcccaaagtgctgggattacaggtgtgagccacctcgcccagcccatattttttctttttctttttctttctttctttcttttttttttttttttgagacagagtcttgctctgtcgctcaggctggtgtgcagtggtgcaatcttggctcactgcaacgtccgccccctgggttcaagtgattctcctgcctcagcctcccgagtagctgggattacaggcatgtgccaccacgccccactcattgtttgtatttttagtagagacaggatttcatcacgtcagctaggctggttttgaacacttgacctgaagtgatccgcccacctcggcctcccaaagtgctaggattacaggggagagccacctcatctggcccgtattttttcaaatccctttctcaccattgttcattggtcctgaatttatttttatttatttttattttctgagacagggtctcactctatcacccaggctggagtgcactggcatgatcatggctcactgcagcctcgacctccctgggctcaggtgatcttcccacctcatcttcccaagtacctggaatcacaggtgcatgccaccacacctggctaatttttgtattttgtagagacagggtttcatcatgttgcccaggctggtcttgaactcctaggctcacctctacctagacttcccaaagtattgggttaacagacgagcctctgtgcctggctcctgaaataaatctttacttctgttatcatgtatacaaaaagcttaataaattccagtactgccctcccctcccctccccttcccctcaaaagaaagaaagaaagaaagaaattcagtgtcacagatacagcaaaaccccaacccgcttccctcctcctagaggtaatcgctatcctgaagttggtgtgcatcagtcccaagcctcttttcgtactttttccacggttgtttccataaacactatgtgggattgtttagtgatttttaaaacatatatagtccgggcgcggtggctcacgcctgtaatcccagcactttgggaggccaaggtgggtggatcacaaggtcaggagttcgagaccagcctggccaacacggtgaaacccccatctctactaaaaatacaaaaattagccgggcgtggtggcgggcgcctgtaatcccagctactcgggagtctgaggcaggagaatcgcttgaacctgggaggtggaggttgcagtgagccgagatcgcaccaccgcactccagcctgtgcgacagagactccgtctcaaaaaaaaaaaacatacatagatgttttctactggacataccgtctgctataatttcctcttaacattgtgggtttctttacaccccccaaactcattttaatgtctgacattaaagcctctctgtgatgtgccgctgggcggggctccgagtagtgggcggagtctagattgggaaataggggcggggcctatgagatcccggcctcagggtggacgcagtggttctgcactgaggccctcgtcatggtggcgcctgtgtggtacttggtagcggcggctctgctagtcggctttatcctcttcctgactcgcagccggggccgggcggcatcaggtaggagatgccgctgcaccagggttggtggtaccgggttttctggccttctgagcctttgtggaccgtcgcgccgc

SEQ ID NO: 26039 - DNA, 2300 bp, Homo sapien
tgaactcctgggatcaagtgatccactgtgcccaagctagttatcttacattacagaacacctactatgtaccaggagctgggatttaagaatgagaggtgaggctgggcaccgtggctcaagcctgtaatctcagcactttgggaggctgaggtggagggatctcctgaggtcaggagtttgagaccagcctggtcaatatggtgaaaccccacctctactaaaagtacaaaaattcactgggtgtggtggtgcatgtctgtaatcccagctactcaggaggctgaggcaggagaatcccttgaacccgggagtcggaggttgaagtgagccgagatcgtgccactgcactcaagcctgggcgacaagagcaagactccatctcaaaacaacaacaacaacaacaacaaaacacagtggctgatgcctgtaatcccagcacttagggaggccgaggtgggcatatcacgacgtcaggagttcgagaccagcctggccaacatggtgaaaccccgtctctactaaaaatgcagaaattagctgggcgtcgtggggggtgcttgtagtcccagctactcaggaggctgaggcaggagaatcgcttcaacccaggagacagaggttgcagtgagccaagatcatgccattgcactccaggccaggtgactagagcaagactccgtctcaaaaaaaaaaaaaaaaaagaaaaagagaggtgagcaaaaacagatatggtttttaccattaggatttttagaagagaaaacagaatcacacaaatgaatatctatttgcagtgcagaggtcagtgctatgcaagcagatgaaagggagctcagggaaggttttcctgagctggggcttgagctggctaagatccaagaaaggcatccatgtaaggtgggctgtttttcttcttttcaggctcctcggggtaactgatgtcccccaagccctcctctgcccccaaatccccatggccactcctctagggactctgcataatggttagtgtttctacttcaataaaagaaaacaggtcaccacccaaagcagtggttcccacacattttttttctttttcagacgcagttttgctcttgttgcccaggctggagtccgatggcacgatctccgctcactgcaacccccacctcccgaattcaggcgattctcctgaatcctgaattctctgaactgggattacaggcatgcaccaccatgcccagctaattttgtactttttggtagagatggggtttctccatgttggtcaggctggtttcaaactcctgacctcgggtgatccactcgcctcagcctcccaaagtgctgggattacaggcgtgagccaccgggctttcccacactttgatgagcatcagaatggcctgaggagcttggtaagaactcagactccctccctttcttgtccatgggcagaagtggccattcaagaggtactgacacaggggtccaggcggggggcagagggctgagtctctggaggagggaggtcagatgacttgctgcaaagagagtatcagcagaggttcagcagacccacctttgagagggcacttcctactttctgttgtgtttggaatgcaaagatctggctgaaacggtggccacggagaaggggtgatagatttgagaggctggagggatgaggaagtgaggaactctacatactgagctctcaagcctaggagtgaaaacgggtgagaagtttgggcttgttttaggctatgccgagtttaagttcacagtcgagtggatcatagctggcgggtaaggctgaaggtgagatcaggatgagggtttggaagcccttgcctagaaggaggcagttttttgagacagcataggagagcgcaaacctccagggtcacagggctgcagtcttctcctttcggagaccccattgcagagaagagcgaaagcaggggcggggtgggggtgggagtggtctcttccggttcttgaagatagcgtcccttaggcaggaggggtgggtcactcagtctccaggctcgggaggcccccagcaaatcggacgctgtgggctaggccgccaccgcgagcccactcgcccgatacgcgccttggggtccgggtcggctttccccgggacccctggccggaaactgagccgttcacttccgccaccagccggaagttttctgtcactggacgccaaggagttttcggtggctcagctgggtaaccggggatcaccatggcggcctcattggtggggaagaagatcgtgtttgtaacggggaacgccaagaagc

SEQ ID NO: 26040 - DNA, 2300 bp, Homo sapien
ttaccaggaaatcttcctgtaggaagaggggtgtgctgctggccagctgcaggaattgaggaccaaggggagcaggctctcacctctggggtcccacatcccacaggtgccattacacaccctcactctccatgtgcccttacccagggcccccagaacatgaagaggagcacgatgggggcagggctgacatgaggccttggggtcctctcccctgtcagcccctggctctgtttccctggttttcctgctccctagaccttgtctgatacctgtcctgggtctctcagcctcgatgcttctccccacctgccctcctggggaggcggagctctaagaccctgtgcccacaaggcagcgtgtgtgtgtgtgtgtgtgtgtgtgtgtgtgtgtgtgtgtgtgtgagagagagagagagagagagagagagagacgtggatactgcagcttctctgccttccctgtgttccctactttgggagggcaggggccaggcagtctcatctgcattattgcactccgtgcctgccccaatgtgtctggagtggacatgtttttctcacgctgaagggtcaaagctgcgcagggtcctggtctcagcggctagggaatgctggagactcactttgtggcagctgccatgtcctgtgtggggctggggcaggactagaagctgccttcctcgcctatgggatggcctctcccaccacggcccgagagtgggacagtccaggggtccctgctccctgggcttggagcccctccttcctgtgtgtggcactttaacagccaggccctcttgctcttgggggtctctaggctactacaagtgtgacacagatgacaccttcgaagcccgagaggagatcctgggggatgaggccttcgacactgccaactcctccatcgtgtctggcgagagtatccgtttttttgtcaatgtcaaccttgagatgcaggccaccaacactggtatgggggctgcagcaggggcagactgggggaaggcacgggactgggcaggtgtgactcgccttactaagaaagacctgaggagagggtggcaccctgagccctccccgcttttctccggcagagaatgaagcgacttccggtggctgtgtgctcctgcacacctcccgaaaggtgaatggcctgtcctgcaggtggtcctggggcctctacctgggggctgaggtgatggcttccctgagaatcctcccgctgctcccctcttcccatgcctccaggagcagctcaacagggagctcgcaccagcccagggctgggggctgggggctgggggctggactgctgcggctggctgggagggagggaccaggcagtgacagcatctcatacatgggcccgtgtggttctgtccctggggtcccctcagtacctgaagttaaagaacttcaaggaagagatccgtgcgcaccgcgacctagatggcttcctggcgcaggccagcatcgtcctgaacgagacggccacctccctggataacgtgctgcggaccatgcttcgccgcttcgccagggaccctgacaacaatgagcccaactgcaacctggacctgctcatggccatgctcttcaccgatgccggggcacccatgcggggtaaaggtgaggccggtctcccggcccgggcgggggcgttgggaggggctgttgacccaccaccctccccctcactctttcctcagtccacctgctgtcagataccatccaaggggtcaccgccacagtgacaggggtgcggtaccagcagtcgtggctctgcatcatgtgagttgccaggccacttggccccccttcttgtcgcagtggaactgggtgtcccatgtcccctgtgccctgcagaggccagcccacctgtgagtcctggggctctggcggcccaaccaacttgggagaagagggctggagcactgccaaggaacgtcccatttgctcttcttttccctccctagcagaggtcgccaggggtcaaggtcgagggggttctgggtcggggagccccagctccctggggtgcaactgtgcactgtgtcctccccgcccctgccagctgtaccatgaaggccctacagaagcggcacgtgtgcatcagccgcctggttcgcccacagaactggggggagaattcctgtgaggttcggttcgtcatcctggtgctggccccacccaagatggtgagtgggtagtgccgtgtcctggggaagaaggagggccccgggttacccgccctctgcttggggtcccctcccacatgtcctggcctctgaaggcctg

SEQ ID NO: 26041 - DNA, 2300 bp, Homo sapien
cgaggctcgcagcgaaaacccaaagcagccgagctcggagagcgccgtctcagcgggcgagggcgtagcccggggaatgcacggaggtccgtctagtcagtcggggcgcgcttcctggaggaggaggagaaggacttgcggccggagctaccgggataaatgcaggaggcggggcagccagcgggcgtggccctgcggaggtccccggtcgaaaggaggagacaggggccggccgcgtacttaaagcggacgcgggggaagccctcccggggtctgcctcagtcgcacagctcggtgggctcgtggcgcagtcgaacgttttcccagaagctccccggccccgtccagcccctaaactcgcgacgctgggtctgctgggtccggcgcgcacaggctcgaaggagccgggtctactcggtttggcccagcagctgcgggcggcggggagcagcccagcccggctggagcagcctcccgcgggtgagggcgcggggcgggcggccgggtcccagccctcggcagctctgcctaccgcgcccgggcgcggcgtctgagcggcattaggacccaggcgcggcgtgggggtgtgtcgccggctcccgccgccggcccgcccgagtcgccgagtttggggtccagaagcgccggagcgccgcgtgaggagcccggccgtgagtgcgcgagtgtgccatggccgcggccaccaggcgcgtgttccatctgcagccgtgcggtgggtgcctgaacccgggggcgcggcgggaaggccgcccgggtctccgccaccgtctcccgtcggggaccccggggagaacgcggatgccgtctgcctgcgcgggccggggccggtgggcgagagggctgcgggattcccagccgcggggaggagggcgcgggtgcgggaggcccgggcgcggcttcgcggccaccgcgcgcttggtttcattagggctctgctgtcgccgtcttgaatttcttaccaggtttgaacagctgatgcagcgggtcgagggcggggagctcgaaagtgggcagggcggagctgtggggctcccagcgccccgagcgccgagcttttgggagcctggcgggccgccgcctcggaaggtctcattttaccttccgcccgggcatcttcccgtccggcgccgcggtgggagccccggaacccctggagttttgggagtcccgggacccctgaccgtgccctgcgcggccgcagcggtttctcccttgctctgacacgggagggccagccctgggtccccgccaggacccaggtttgtacgaccctttacctgcacgtgggccgccgggacggaagcggagtgtgcaccggcccaaccctcccagaccctcgtcgcccacggcctgggacgcgccccagcgcccccgccccccacttcaggatgcagccccggctcccgccccgcgcctgcattcacatcctgcgccccgacccccggggtctccgagtctggaggcgctttcctctcgtgcacgcggcccctcctgtcgcttccttcctccgacagcgaggcacaaacagccgggaccatccggggaccggcccagggagggcgcagcctcccccgacccatgtgtccctcagatactcctcccacccccaattgttctcccttttggaccaacggctctggcttccaggcggccgggacgcggtcccaggactggagaccgttgcctgtcggcccccgtgtgacccggggcgcgtgacgggggtcgggggaactgcgcctgcaatgggcgtttatggcccccaggaccggtctgagagtgagaagagggatgtgcagagagatcccccgccttggcatccgaggagagagggggagaggcccgctcgggcccggtcccttcctctcgctgcagcggggcagggttttctcaggaaaacctggattagcgaacatggtactggtactaactcggtgggaagacatccctggaacgtctctcctcctcgcctctggcccgcctgggcagcccctagcagatgggctaagcaattgaatttctgagattaaggctggcttcccctgctatggggccccctcccgagcactgtcccctgcttccctttctccctagggtggcgtgggttgcatccctcggaagagcgaaggaatgagccaggtcggggggcggggagacaggtgcacacaggaggtccagggcttggtccatggggctggtgacctttctgcttcccttgcagaaaactctcccaccatgtcgcagaatggatacttcgaggattcaagtgagtacctctcggg

SEQ ID NO: 26042 - DNA, 2300 bp, Homo sapien
ctgagaccccaagggagggaatgagagggaaagtgggtgcctgcgtctgggtccctcaacctgcctgcctatgtaaggacccagtggggcacaggacaggagatctggggcaccagtatttgccttcagcgtcagacgatctacacaggacaggaggcaggtgggaggactgaaggaaacagcctctgaaacggtcagtctggaggcagcaggcgtgtgggcctcaggggttccctccaggaaggccgagggaacagaaccgcaggggcagagcacaggtgtagcagagaagggctcagtgccagttcctttgagagacggtcagggagcggacagagggggcccatagccgactaggggcggcttggtcatgggctcctctttcctcagtgggctgaggggttaggtcctttgaggagcgctgaggagactgtggtaaggggaagcgccctccatcccagaggctttcctggaacaagtgggttggaaggaccaggtgtttgggagctgctgggagcaggtgcagaagccaaggcattcccagatgggggagactgggggtggcaaggtggcttttcagggatccagcctgcatgccacctatgcagccatgctccgggggcgacatccgcctgtgtccttcagctcttcctcagcctccacccgccacccgggagtcagtgcctggactggagctctagctggagggcgtctaggaaaggtcccaaggggtgcgcaggatgacctggtgtctctccagagtcacccctgctaaaatactatgtggccagccccaagtcagttgcaggtcatggtgttgggatcttccacaaggcctcctggagtcgcgctgggggagggtggggtactcagtctgtcgcagagccccaggccatccgtcgccaagaggagcactccagcgcttccctcctaatgcgttcttatcttgccgggaggagaactgggccagccttactcacccaatctatgcatgaggcttccccaacgcgccagaagcccttccttcgcagaggtgggcttgccccggcctgtccccgttcctctaccatggttagggcacagtggccgaggactccgtcccagcgcggctgagccggaaagcgatggcggccggaggggtcgggaggttggttagcgctttacggagctgcgtgttccgtttccaagggctgtagagccttctactgggagccaccgtggatcaggccaggggttcgtcagctgcatttgccggatcgcatcgcagcacgcgcacccacacgcgcacacgccctactcgcaggagactaagcgccccgaaaaggcgcgtccccgggcgggtcgcagccggtccaggaaaggggacagggcgcaagggccatttggggaaggaaaaagggggcgaaccatgaccttgacctcatagaaggccgaggacgtgaagaggctggcagataagttggcgaggctcgcagcgaaaacccaaagcagccgagctcggagagcgccgtctcagcgggcgagggcgtagcccggggaatgcacggaggtccgtctagtcagtcggggcgcgcttcctggaggaggaggagaaggacttgcggccggagctaccgggataaatgcaggaggcggggcagccagcgggcgtggccctgcggaggtccccggtcgaaaggaggagacaggggccggccgcgtacttaaagcggacgcgggggaagccctcccggggtctgcctcagtcgcacagctcggtgggctcgtggcgcagtcgaacgttttcccagaagctccccggccccgtccagcccctaaactcgcgacgctgggtctgctgggtccggcgcgcacaggctcgaaggagccgggtctactcggtttggcccagcagctgcgggcggcggggagcagcccagcccggctggagcagcctcccgcgggtgagggcgcggggcgggcggccgggtcccagccctcggcagctctgcctaccgcgcccgggcgcggcgtctgagcggcattaggacccaggcgcggcgtgggggtgtgtcgccggctcccgccgccggcccgcccgagtcgccgagtttggggtccagaagcgccggagcgccgcgtgaggagcccggccgtgagtgcgcgagtgtgccatggccgcggccaccaggcgcgtgttccatctgcagccgtgcggtgggtgcctgaacccgggggcgcggcgggaaggccgcccgggtctccgccaccgtctcccgtcggggaccccggggagaacgcggatgccgtctgcctgcgcg

SEQ ID NO: 26043 - DNA, 2300 bp, Homo sapien
aaaagtgggtagatcgcctgagaccaggaatttgagaccagccttgacaacatggcaaaacctacaaaaatacaaaaattagccgaacgtggtggcatgcacctatagtcccagctactcgggaggctgaggtgggaggatcacttgaacctaggagggcgaggctgcggtgagctgagattgcgccactgcatcccagcctgggcaacagagtgagaccctgattaaaaaaacaaaacaaaaaaacagaaaataaagcagggaaggttataggaagtgcagggctgggagtggggtttcagttttctgttttgtttttagagatggggtctctctctgtcacccaaactcgcgtacagtggcacgatcatagttcacctgtaacctcaaactcctgggttcaaattatcctcccacctgaccctcccaagtaggcaggactacaggtgtgcaccatcacacctaactaattttttaaaattatactttaagttttagaatacatgtgcacaacgtgcaggtttgttacacatgtatacatatgccatgttggtgtgctgcactaatttttaaaaaagcttttagaggtggggttttgctgtgttgtccaggctggtctcaaactcctgagctcaagtgatcctcccacctcattctacaaagtagctgagatacaggcacacgctactgtgcacccagcttagattccaattttaaattggatggtctgggaaaacttgactaaggaggtgatatttgagcagagactttaaggaataaaccatgtagctatctaggggagagcattgtagcagcaggtcaagcaaatgtagagggctgggagtgcatctggtcagcagggaaattcagggtcatgatggttataaaacttaggcctggtggatgtcatgatcctcccatgagcacaaggagactgcctgagttcagatgcagctggaacaggttggcccaggtgaaatcaggaaaatcattcatccttcacttccacctggctgtcagattaccaaacaacccttgcagattgaaccaggtgtttaatatccagtcagtctaccccaaggtaaggcatcctgcaggaggccgtaaagaaatttggaagcctgaaattgcatagagagtcggcagtttaggatgggatattgtggagaatggggaggcaaattacagagcaatgcttgggaaatacaggacctcatttattgagtactaaatgtctaaccagttcctcgtgtctagtgtttttgttctataaagattctgaattattcaccctgcccatttatttttatttttgagatggagtttcactcttgttgcccaggctggagtgcagtggtgcgatctcagctcactgcaacctctgcctcccggggtcaagcgattctcctgcctcagccccccaagtagctgggattacaggcatgcgccaccaagccctactgattttgtatttttagtagagatggaatttctctatgttggtcaggctggtcttgaacctcccgacttcaggtgatccgcccgcctcggcctcccaaagtgctgggattacaggcgtgagccacaatgcccagccaaccctgcccatttctgattcttagcaagagactaactgaagccatcttttgcatggtccttcagaaagtgactgcctggtcagaaggagtctttcttacctctgatgtctgttggtcaagtgcttacctgaccattttccctatggcaaggggtttcctatcaaaagccccagtgacagtggtttcaggatactgggcttccaacccatccagtgccctctgccttttttctgtgaggccaagatggctttctcctgaatggattcactgggcagaatggctttaggactcatggtcacatttgaatccatggctgaacctatggagctaggccatcaggtggcccccatgcagaggttaccttttacctttccagatggatggtgtatcgccaaatcatggacagctctgaatgttttcatgctgcacacttccagagatacctttccagtgccctagaggcccagcagaaccgctctgcgcgccagtcagcctacatccgcaagaagaccagactgctggtggtgttacaagggtgagcattggaagtctcctggaaacagtcgaatcagggtgatgaccttgccattactcttattttatgtgtaacaaacctggagcacagaacagactctacatgcatgagcagtgtctgcgctacagagaagccttaagcgagcaatgaccctattgccatcctat

SEQ ID NO: 26044 - DNA, 2300 bp, Homo sapien
aaaggtgctcgcccaggcggcatggctcatgcctgtaatcccagcactttgggaggtcgaggtaggtggatcacctgaggtcaggagttcgagaccagcctgaccaacaaggtgaaaccgcgcctctactaaaaatacaaaaattagccaggcattggtggcaggtgcctgtagtcccagctactcgggaggctgagacaggagaattgcgtgaacccgggaggcggaggttgtagtaagccaagatcgcaccactgtactccagcctgggcaatggagcgagactccatctcaaaaaaaaaaaaaaggtgctcttggattggccttaaagtaaaaacatgtctggctgtatgtacatgtgctgcgatttgaggggctgagacctgggcactgagaaataggaacgaagacagggaaggctggataggaggaggataaacatggagtactgcctgaggggtagaaaggggtacggtgtagaggccctggtcagagggaacaagagacagcttctgggtcctacaaaagaagagggatttacggccgtcttctctgtgctgatgtgggcagctcaagtgatgagtgcttccaggcttagctttagcataagttatttgtgactgggcctgtcccagtgagtcttgtgtattgtgaaataaaacttaacaggctgggctggtggctcacgcctgtaatcccagcactttgggaagctgaggcaggtggatcacgaggtcaagagattgagaccatcctggccaacatggtgaagccccgtctctactaaaaatacaaaaaattagccaggcatggtggtgggcacctgtagtcccagctactcgggaggctgaggcaggagaatcacttgaacctgggaggtggaggttgcagtgagccgagattgcaccactgcactccagcctggcgacggagcgagactccgtctcaaaaaaaaaaaaaaaaacaaaaaaacttacagaggcacttgccatgccaagtcatttacatagacctccctcggtgattgcagggttcctgtcctcacctgcctgatgcctcctttttcagtgaatttattaagttgctttggaatatctacctgaaaggggacctattttcctgtgggtgtataataaggttaggacagttcagcctggcccctcttctcttccagaatcacaagtgcttcacacgcacagtgagtaagacttagccctggtcggccaggtgcggtggctcacgcctgtaattccagcactttgggaggccaaggcgggtggatcacccaaggtcaggagttcgagaccagcctggccaacatggtgaaaccccgtgtctactaaaaatgaaaaaattagctgggtatggtggcatgtgcctgtaatcccagctacttgggaggctgaggcaggagaatctcttgaacccaggaggcggaggttgtagtgagctgagatcacaccacagcacttcagcctgggcgacagagtgagactccatctcaaaaaaaaaaaaaaaaaaagacttagccctgaccgtgtgacttggagggcacaggcaaccaggcagaagcatccccagcaccactctcctgtcttctgccctagtttactacaccagtgtagcctggggcatttttgtcccagacctcctttctgcccagtgttttcctaagaaatagttactactgggaaaaaaagtcataatatccctgaatgtctgctttacagaagagatctgtggtctcaagcaggtaggtcctttaatgcattgtattttaactaatctattcacaatatgctctaattagtgttactactctagtaaaaattaaactagtaacactacattttatatggtatttgctacatggcaagcactgttctaaacactttgcttatgttaacccagttaatcctcacacccactttacaatataggttctgtcattggcctaaggtcacagagttagtgagaggtcatactgaggttcacacccacaatgcttggcaccagaagtcagttctcttaacctcttcttacataatgcaatgcagttgaattgcaaacccatgactttttcttcatgtaggtaattatcagcattgtaaccggcctcccaggctgtcacgctagcgagctctgtgcttttctggtcactctgcataaggaatgtggcaggttagtatggctgatgcctttgctttggggaaagggattctaacttgggcctgcctaggcactggaaaaccttagacatgtactggccttggtgggactggtatcagcatggtagtcag

SEQ ID NO: 26045 - DNA, 2300 bp, Homo sapien
ggtaaaaatattagaactgatgatcacagcactgcactccagcctcagtgacacagtgagaccccgtatcaaaaaaaaaaaaaaaagagaaacattaaagatgaacaaagggtgtataacctaatttatgaagaactcttccaaaattaataagaaaagataagctacccaatagtaaaatgagcaaaaaaaatgaacaggcacttcacagacgtggaaaacaaaaaagagaggaggactatttataaatgaagatatgtaatctcactagtagtcaagaagaagcaacttgaaggctgggcgtggtggttcatgcctgtaatcccagcactttgggagcccaaggtgggcgaatcacttgaggtcaggagtttgagaccagcctggccaacatggtgaaaccccatctctactaaaaatacaaaaattagccgggcatggtggtgggtgcctgtaatcccaattactcgggaagctgaggcaggagaatcacttgaacctaggaggcggaggttgcattgagctgaggtcgcaccactgcactccagcctgggtgacagagtgagactctgtctcaaaaaaaagcaatttgaaacagtaattagatattatttttttacctgttaggttggcaaaatattctaaagatttattatattctaaggaatgaaaatattctaaagaatggtagaatgagcctgataattctctttgatctttaatatgtatacctatactaccttgataaaaattaaaaagtagtggtaaaatggactaattcccaaaagttttgtttcttggttttggggtttttttttttttttttttttgagacaaggtcttgctctgtcacccaggctggagtgtggtggcataatctcggttcactgcaacctccacctcctgggctcaagcgattttcccacctcagcctcccaagtagcagggaccacagatgcgccaccacacctggctaatttttcatattttttgtagagacggggttttgccatgttgcctgcaatcccaacactttgggaggctggggctggcagatcacctgaggtcaggaatttgagaccagcctagctagcatgacaaaattccatctctactaaaaatacaaaaattagcccggcatggtggcacgcatctgtaatcccagctattcgggaggatgagtcaagagagttgcttgaacttgctaggcagaggttgcagtgagccgagatggcgccactgcactccagcctgggtgacagaacaagattctgtctcaaaaaaaaaaaaaaaaaaaaaagaaccctagctcctgagaagggcatttagggtctggggcctgcaaggcaggctgagctggtagggaattaactggcatgtgtgtggtgttcctgcagatggcactgttaccacagaaaccagctccgtagtcctgactgctgctgtacccagattctgctcctggctggttagtgtcattcatcaggtggaagtggacctacgtgtggagaaatcagggtgaacacttgaggaagagcctctttgttgggcccctggtgggatgtcaggtcctgaactagctgttgttcaggaatggaatttttgatcccagccctttctctttatacaaatgaacatagttccgttaactctcataatcttagaaaagtttcaaaagaaaggaacaaagttacgtgggtcactgttaaattaggaaaggaagaaattaagagcctcattttacaaatgaggaaactgagcttaggagttgaacggcccggccaaggtcacacaaatcatgagaagtggatcccgtgacttgcttccctggtagagtggttgctacggagtttttactgcaacatctctctgctagtagaaaagtcccatcttccgcagtgggagggacttggtctgaaactggggccttggaatgtaaaaggtgtgacagcagttagtctgctaatgggctgagtcccttcttgagagtgctcacattctgcttctacagttcccacacagacagggaagaccgagagttatcctctaacctaaacgtgtttaaatctgaaaatattttaatacattatctttgcttcatccctaaaaacagttgtttttttctgaagtgaaatacaggtggagactaacacatcccctctgcttgtcataagctcattagctggacctcaggtcctagtgagagagcccaccaaggccttgggctctgagcccaggtgaccagcagacatctcaggtgtgtcagggcctgagagcactggacatggacatggtggaag

SEQ ID NO: 26046 - DNA, 2300 bp, Homo sapien
agccatgcttacttttaaaagccttgtttgcctgtagcttaaggtagtatttttaagagtagtgaaaagaaatgcaaataattctttacatggcgctcactgagggcaatttaggaagaagatagaggatagagtcatcaaatattcactgagaactacgacataccaatcaagagagattcatggtttaaaaaaaggaagcaaatatgattactgccctcataaagtttatagggtagtggagaaaaagacattaatcaaacatcttaacaaagaaatctgttattaccaactctgattggtgccatgaaggagaaaagagcatagtactttgaagcccatcacaggagagcccagccccctgcaggagagagctgaataatgaacagagataaatgggagtaggaggaagagcagagaccctgagacaagaacataagggacatcagagaaaattatcttggctggagtattgaagttggagttgagtggccttctatggagctgagaaagttcaccagatcatacaagttctctttagccatgttcaagattgtggcccttctccagaaaataacataaaggcagtaaattggcacgtttaaaagattatcacctgggaggccgaggtgggtggatcacgaggtcaggagatcaagaccatcctggctaacacggtgaaaccccatctccactaaaaatacaaaaaattagccaggcgtggtggcgggtgcctgcagtcccagctactcgggaggctgaggcaggagaatggcgtgaacctgggaggtggagcttgcagtgagccgagatcgcgccactgcactccagcctgggcgacagagcaagactccgtctcaaaaaaatatgtatatatattatcatcactgcaatgtagagaatccattataggagggcaagagtggaaacagggaaacagtgaggaagtgttgcagttgtccagggaagaaatcatggcagcatggactaaggttgtggccatgaagatggaagaaaatggttaaataggaaggcttttgagaaggttaattagatttgaaggcggaggaagcagaagtcaaggaggcctttcagatggctgggtacctgggtggattgtgatgccgtttatttcctgcaagaactggaaggggagcagacatagggaacatcatcacagaggagaggagggagcagcaagctgcaggtaaaccctgggactattcggagaccaggtggaagaggagggtgactgactggggagactgaggggagtgcagtcttgcactgcagttcttgcagtggagggtgggagggagtcaagtgcttctcagagaccaaggaaggaaggaagacctgaagactatctgttggatttgctgtatgctacatggaagtcacttggtgactttggcaagaactctctgggtgaaatgactgaggaggctgattagagtgggctgaggagtgagcagaaagtaggggagaggaaaagttcagccaagaggacagggaggaagggggtgggtacagagccaggtatgtgtggtattgagaaaatttgcaaccctcctgtgctccttccctattgaaagttactcaggaattggtgactgccctattgtctgtctagtccaagtatcataactgtcatcctttaagactcatatttctattaaaattctattttataataccggagttttgctctatcactgtatcatggacagcaagcttatggaacttattcctcaaaaagtgggacatgctgaaaatacaaacctagcttgagtttagttatgtccctaaatgttaactgatccctgtgggtcagtagggagacagctggcatccgtttccaaccagccaaggatattcggtcgactgtactgactgaccactttgctcaggccgcaagtgtccctcagaaaagcctgaggacttattaaggtcatggaaggttgccttggccaggaactcttttctaatcacatgtttttgacttccctctctagccctaaccggcagccatttgttctctttggtaatcactccacacgagaaaacctgaatgctggcaactttaacttcccttctgaaggacatctggtacgaagcactggtcccggcgggagctttgccaagcacatggtaagtggctggactgcctggtgcttgattagttttattatcaagttgtgggggtggggtgggtggggggagctagacaaaaagaaccttttccagttagtgtgttgatttaaccctgaatttgaagttgttctagagtgaaaagaagt

SEQ ID NO: 26047 - DNA, 2300 bp, Homo sapien
attcagcttcaccaggcttgaagaagatgcagtgaggacagtcaggacctgagtatgagagtgggacctgggtatgagtgtggaaatccatcttagaaccttaaaattccatactctgaggtaaagctgagaggctccacaggtctatgagggtttttctttgtttcccagggactgtaaggtgcccagattctgaggtaggtgccataggaatattcctcatagcacaagcattatgtcggacaatgttctgcttatctattactgagtaacaaacctctctaaaacttagaggcttaaaataacataaatcataatttatgaaaaattataaataattcatcacttaagggttaaatgataaatgagttatttcttaggattttggataagtcacagttaggaaagacctgttactgttgtaggtaacatggaacagcccagacggttggaataacccaacccagatagcttcttcactcaatgactgatcccttagctaggatggctccaccagctgagcggcccagctctccctctccaagtccaagtggtctctgcacatggtttctctccagcaaggtggctaacggggtgcagctcatgaccaccaacagctcaaaatcaaggctgccaggtctttttttttttttgagacagagtctcgctctgtcccccaggctggagtgcagtggcgcgatcacgactctctgcaacctctgcctcctggattcaagcgactctcctgagtagctgggattacaggtgtgtgccaccacgcccggctaatttttgtattttttgtagagacagggtttcaccacgtcgatcagggtggtctcgaacttctgacctcgtgatctgcccgcctcggcctcccaaggtgctgggattacagacgtgagccaccgtgcccggccaaggctgccaggtcttttttaagctcagagctagaaacaagacattgctactcctaccaacttcttctattggtgaaattgagtcatggtttctcatggtctcaatcatgacccagcccagattccagggtcaaggaccataaaaggctacattgatggaagacatgtctcattgagggacaccagagtaacaactaccagacaagaaggggcaggtctgtgtgagcgccatttcctaattctatattgcccactcttcagagaagatggttggagggcaaattgtggggagcaaggtaactccaaacttttacagaattaaaggtagggggtctggtcagctacagtccatctgttatcaagaggcctggctgtgtgtcttcattcagtttattaggcatttactgagcacagcctacatgccaggttcttcattttttgacacagggtcttgtgttgcccaggctggagtgcagtgctgcgactgcggctcactgcagccttgacctctccagactcaagcgatcctcctgcctcagcctctggagtagctggggatacaggcgcgcaccaccatgctcggctaatttttgtatttttagtagagacagtgtctcaccctgttggccaggctggtctcggatcccagagatcaagtgatccgcctgcctcagtttcccaaagtgctgggattacaggcgtaagcctccgcgcccggcctatgccaggttctacatgtgttctttcttgactcttgtgttacagaggctcgaatgaagcctggcttctacagtaccgcacccagcacctcgctgcgatgcagcctcctgtaccctttccgtccggcagctggagttagggcagagtgccgggtctctaggagggcaacactcaacgcagtcggctcctaggcatccagtggggctgcaaccccgccgccggggacgaaaggcgaagggggaaaactagagctttcgccggccgggacagcgcagccgggtttcagctcgttctacggtccacgtcagaagatcgcctccggcgccgcggacgccggagaccactgtctgcgcccccgcacgcacgcacccacgtactcgcgcacgcgcgcgccggccccgcccaccgccccgctgtggcccctttggaccgcacgagccaccgtccgcacagccccgccccgcacggccaggcgaagcggagccggccgtgcggtgtgtgtgtatgtgttcgcggggcgccgtctcagccccgggaagatggtggctgcagcggcggcaactgaggcaaggctgaggaggaggacggcggcgacggcagcgctcgcgggcaggagcggcgggccgcactgggactgggacgtgaccagggctgggaggc

SEQ ID NO: 26048 - DNA, 2300 bp, Homo sapien
tttcagaatctccattggtgactgtctctgttgtttctctttccatgtccaaatgtgggtctcttccagcattccatccttggctggcagctgacctttcccatagttattcactccctcagaaaatggatggcacccagctttgcttattaccctggtgtctctaacaatgactctcgagtccacagaagttaaaagggttcaaccaggtggccacagatatacttctggtaccctttctctcttccttaggttttctaactctaaacgtttctgggtattctaatctgctgtggccacgtttatgaaacagaaattcacagtcttaatgataagactgacagatgagagacaactgaagtgtaatgtccttccacagctatacctctagatgtagcccagttagtagagcccagatttttatggaaaaacaagaaaggacacctagcctaacccttaggacagaggctggctggtagaaagctggaaggaggtgacccctgcaggtgagaaggagtgaattaggatgtcgaagacggaagggctttctgtgatttaattagtgcccccatctgtgagatgtagagggagatgattaagggagtggctctttgagtgagctgcaggtaagtttgcatggttggctgcaggctggatgggaggggatttttatagttgagcctcaggaaggaaccaaggccagaccctgcgaggccatggctacaatagtaatggatttgaattgtatcgtgaaggcaaagaaattattgaagggcctttaaaaagtatttttaattgtctttctttcttttggatctgtttatttttaggtcttttagtaggcatgtgtattttttcctctcaaaaatggaaataggctgggtgtggtggctcctgcctgtaatcccagcattttgggaggccagtgagggaggattgcttgagcccaggagttcaagactagcctgggcaacacagggagacctcgtctctacaaaggaagtttttttaaagaattagccgggcatgatggtggcacatacttgtagttccggctacttgggaggctgaggcaagagggttgcttgagcccaggggtttgaggctgtagtgagccatgatcatgtccctgcactccagcatgggcaacagagcgagaccctgtctcaaaagaaagcaaagggagggaaatacagtatatcttttgttttataactaccaaaattaggaatacttaccatttcttggctaaactttatattttgatttttaaaacttgttaaaaattgcaatgagaaggaaatttcaggagagcagaagacagactgtcccaggtgtcactgtcctattattccctataaaatccagtgccaggatggatgaatggataaagcaaatgtggtataagttgaatatcccttatctaaaatgctttggacgaggagtgtttcgaattttagaatatttgcattatactaaccagttaagcatccctaatctggaaatccaaaatgctctagtgaacattttccttcagcatccatcatgttggcactcaaaaagttttagattttggagtgttttggatttcagattagggatactcagcctgtgtttgggggtagccatctcttcatatagacatttcagaacttaaatattgctttgctataatttctgtgaatttttgatatattatcttctctgagctacatttttatcctttataaaatggccatattgaagtgatgatctatcctaatctaccatggctgagtcaagggataaagaggttttcctatgtctgtggggtatacttaacttggtggtttttatctagaagcttgttttggtcaagatgttggttatattcaggccaggcatggtggctcatgcctataatctcaacattttgggaggccaaggtgggaggatcacttgagctcaggagtttgaaactagccagggcaacatggcaagactccatctccaaaatttaaattaaaaaaagatactatctgtattcatagttgtgtctcttttgcctttagtccaagctcaccttaaccccatgggtcggccttcggaagatcaatgtgtcctactggtgctgggaagatatgtccccatttacaaatagtttactacagtggatgccgtctgagcccagtgatgctggattctgtggaattttatcagaacccagtactcggggactgaaggctgcaacctgcatcaacccactcaatggtagtgtctgtgaaaggcctggtaagttcacaggtgaattaggtggtatt

SEQ ID NO: 26049 - DNA, 2300 bp, Homo sapien
cactgctacactcccaccagcgccatgacaggttacagatgccatggcagtatcaggaagttaccatatatggtctaaaaaggggagacatgaacaatccacccctgtttagcagatcatccagaaacaaccataaaaatgggcaaccagcagccctcagggctgcgctctctatggagtagccattcttttattcttttactttcctaataaatgtgctttcactttatggactcgtctcaaattctttcttgcacgagatccaagaaccctctcctggggtctgaatctggacccctttccggtaacagatgtcgtagagtgaagcacaaccactgcaggggcatcttggtttacattttgcttcagcggccatggttagcacagcggaaagcacatcacagtcttctgattcattaaaaaaattaggaaatggaccaccacaaaccacagacagatgtactgagacaggataggtagtcaagaaagtgaccatgttctaggcgcgcagcagcaactgtggtgaccgtacagtcaacaagcctcagcactggcattgcaattgagctcattcaagcaaagctatcttcagcagggacttctccctctaggcagcaagcgcatttttattttacctgtcctcaaactgatcctttgctccttataatagtaaggaacacacccctgtgtggagatttaagatgctaatgaggccaagcgcagttgctcacgtctgtaattccagcactttgggaggcagaggtgggcgggtcacttgaggttagaagttcgagaccagcctggccaacatggtgaaaccttgtctctactaaaaatacaaaaattagccgggcatggtggcgggcgtctgtaatcccagctacctgggaggctgaggcagaagaatcgcttgaacctgggaggcggaggttgcagtgagccaagatcgtgccactgcactccagcctgagggagagagagagcaagacatcgtttttgtttgtttgtttgtttgtttgtttgttttttaaaaaaaagtcaagacaaatcatagtgggggcttttctggtcactttttaaatcttagtgttgagactttatttgagacagggccttactctgttgcccaggttggatgagatttttaacctcaatatttacttatagaataactttttggttagtcaaaacaatgctgtgtctcattctgatcagaataaaacatcagacaactcaagagaaacattctgcaaaataactggccaggattcttcaaaagtgtcaagggtaaagataaggaaagatgaaggaactcccagattgaggagaataaggagacaactgtgatgtgggatcctagaatggatcttggaacagaaaaaggacattagtggaaaaatgagaaatgcaaaacagtctacagtttcgttaacaggattgtaccaaggttagtttcctagctgtaatgattggactatgattaagtaagatggaccatcaggggaagctgggtgaagggtgtaaggaaaatgcttacattttccaacttttctgcaagtctaaaattagtcaacaataagaagtttaaaataggccaggcatggtggctcacacctgtcatcctagcactttgagaggccgaggtgggaggatggtttgagcccaggagttcaagaccagcctgcgcaatagagcgagaccccaactctattcaaaaaaatttttttaagtttaaaatagaattatataaaaaaggaaaagaaaaatgctgtttcatagcgttcctagtttagcatgggagagaccaggtctccctgggtggttgtctgtgtgttgctgggtgtgcgtggcagggctagtgtgttggggtccgtctaggcacattcaggcgccgaatcccgtggctcccaggtttacctgacggtgcagcctggggtggagacttaatgagggcggggagttgctgcagcaaaggctcctcccaggggtatcagcgcagacagctgggttttcactgtgctcctgctccagaggcactaggaagggggcgcctatcagactagggctctgccagccatccttctctgttgaaggtccagcatggtccgctgcctggggcctgcgctgctgctgctgctgttactgggtgagcgcccctctcttcccctggaccccgaaccctggcctctctgtccctgctcctcagtgacaaggtgggagggcaagatattccaggaaaagctgaaccacaggaagggttgccagtgagaggcctgtgcgcacggcttggggacccctgg

SEQ ID NO: 26050 - DNA, 2300 bp, Homo sapien
gccaggttaagtcggctcgcccggcccccacttgccctctccgctcaggtctggggcgctgcgccctcacctgggcccttcttgcctttctggtcccaggagtgccgcgacctctgctgctttgctcacaactgctcgctgcgcccgggggcccagtgcgcccacggggactgctgcgtgcgctgcctggtgagggcatggaaggttcagggtgagggtttcggggagcttgggagccggcctgttggccttagttaattggtgccctcaggttcccccgttgggtgctgggcttgggtaggcctggctcccccagctccgagccgcgctctcggcatggacctctcactgcacgtggcctctctctgccttccccaccacccgtcacctgcgcagctgaagccggctggagcgctgtgccgccaggccatgggtgactgtgacctccctgagttttgcacgggcacctcctcccactgtcccccagacgtttacctactggacggctcaccctgtgccaggggcagtggctactgctgggatggcgcatgtcccacgctggagcagcagtgccagcagctctgggggcctggtgagaggacacgagcacccttgcaccctgccccccatcctctggtggggccagttttctactgtggggaagatgggcaggggaaactgaggcccgctgagcgcagcccctctccgagctgcccccagcctggcccatgcttcctcaggctcccacccagctcccgaggcctgtttccaggtggtgaactctgcgggagatgctcatggaaactgcggccaggacagcgagggccacttcctgccctgtgcagggaggtagggagtggagctgagtggagggagcagaagctatggagtgggtttggggaaggggggtactgcagctgttgacccccctctacttcctccccagggatgccctgtgtgggaagctgcagtgccagggtggaaagcccagcctgctcgcaccgcacatggtgccagtggactctaccgttcacctagatggccaggaagtgacttgtcggggagccttggcactccccagtgcccagctggacctgcttggcctgggcctggtagagccaggcacccagtgtggacctagaatggtgagctctgcccacccgacccctccttgccgtttgaatcccgcaggccagtgtccccctcactgcctggtgcactgcccgtaggtgtgccagagcaggcgctgcaggaagaatgccttccaggagcttcagcgctgcctgactgcctgccacagccacggggtgagagcccgaggagtgggggtgaccttggggttcctaatcctacgtgaccctcctcttctcttctctgcaggtttgcaatagcaaccataactgccactgtgctccaggctgggctccacccttctgtgacaagccaggctttggtggcagcatggacagtggccctgtgcaggctgaaagtatgccagtggggggcatgtgggcaggagctggggtggtgcacctgctcaggactcagcgccccttcccccaatccccgcagaccatgacaccttcctgctggccatgctcctcagcgtcctgctgcctctgctcccaggggccggcctggcctggtgttgctaccgactcccaggagcccatctgcagcgatgcagctggggctgcagaagggaccctgcgtgcagtgggtaggctccgagcgcctgcttcctgagcctactcctgcggttcccctcctcagagctctgctggggctgtgggagctggggcaggccctcagccttgcccccaggtgcagagagcagccccagaggccatggaaagaagtagctttgaacaggaggttccagtggcctcccagtcaagcgagggggtggatccctgccccaccaccagcaccgcaaggcatggccctctacctcccagtacagctcctcttgtccactctcctgcttctcccaccagctggctgcctcacccttgacttcgccctgtttttccctggctcagattgcagtccctgtaccatgctgcccccggaggcctgtccagcctctgtctcaccagttttcggccctttgccacttcctctgcacaaatcacctctgtcacccccttgaagttcccaaatgctgggcccagcacatcttttcactccataccactggtcagctgcggtgctggctgcccctgtgccagggccctgccttaacccagttctctgtgacctgggtggtggcggagtggggagtcacataatactaagca

SEQ ID NO: 26051 - DNA, 2300 bp, Homo sapien
aacctgtggccacagggatcctgggaacaaagcgggcatgaccagccttcctggtggtccccagagcagggtcaggggcatcgatcggatgggagtgggaatgctgtatctatagccctccaaatcagaagagacgggaattcacaggcctcgagtcccagtatttttattgaagtctgaagaaacaagttccagaaaacatgttaaacttccttctgggagctgggattggtggtcagggctcaagcccagcagcttccactcagggtccccatttgcacctccgcagggcaggcgagaagcgcgcaggacccggaagtacctggaactgtacattgtggcagaccacaccctggtgaggagagaccccaggggttggcggggtcagggatggggccagctcagcccctcaagccaccgggatttctgccttcccagttcttgactcggcaccgaaacttgaaccacaccaaacagcgtctcctggaagtcgccaactacgtggaccaggttgggggcggcggggagagagcggtgatgggggtggcggcggcaggacaggcaggtgctggtggggtttggggaagaggaagggcgccccacgaaggaccaccggcgcgatggggcgccctgtcccggcttcagccccgcctcgccctcagcttctcaggactctggacattcaggtggcgctgaccggcctggaggtgtggaccgagcgggaccgcagccgcgtcacgcaggacgccaacgccacgctctgggccttcctgcagtggcgccgggggctgtgggcgcagcggccccacgactccgcgcagctgctcacgtgggtgcctctgacccggacgcgggtcccgggtggggcggcctcacctcccggccccgcctggtcacgccgcgctccgcccccaggggccgcgccttccagggcgccacagtgggcctggcgcccgtcgagggcatgtgccgcgccgagagctcgggaggcgtgagcacggtgagccccgcgggcgggggcgagggagagacaggaggctctacggccgcagtgaccgccctcccacggccccccaggaccactcggagctccccatcggcgccgcagccaccatggcccatgagatcggccacagcctcggcctcagccacgaccccgacggctgctgcgtggaggctgcggccgagtccggaggctgcgtcatggctgcggccaccgggtacgcgggtggggggtcggggctgcggcggggcggctagtcctggggacttcctccgctgcgtttctttggtcgtccctcagtttcctcttctgtaaaatggggataatgatcatagtgtccgcttcagggtggtttatgaggcttaaagggaagaagctcaggcaaagtggattctcaacggtatgaagattattttccgagtaacctggcgaggttactcctacaccgggaggagcaccgtcgggtcgcgattccaccttgggtcccgggctgctcactattggggccgcatcgtcccctgtcccgcttgttgtgtgactttgcgcgggttacttcccctctctgggctctgcgcgtctggcggctgtagccaagcccaggggtggggatcagagaagcgcgggggttgggggactgtccctccatgcccaatgccctccccgtgccggtaggcacccgtttccgcgcgtgttcagcgcctgcagccgccgccagctgcgcgccttcttccgcaaggggggcggcgcttgcctctccaatgccccggaccccggactcccggtgccgccggcgctctgcgggaacggcttcgtggaagcgggcgaggagtgtgactgcggccctggccaggttaagtcggctcgcccggcccccacttgccctctccgctcaggtctggggcgctgcgccctcacctgggcccttcttgcctttctggtcccaggagtgccgcgacctctgctgctttgctcacaactgctcgctgcgcccgggggcccagtgcgcccacggggactgctgcgtgcgctgcctggtgagggcatggaaggttcagggtgagggtttcggggagcttgggagccggcctgttggccttagttaattggtgccctcaggttcccccgttgggtgctgggcttgggtaggcctggctcccccagctccgagccgcgctctcggcatggacctctcactgcacgtggcctctctctgccttccccaccacccgtcacctgcgcagctgaagccggctggagcgctgtgccgccaggccatgggtgactgtgacctccctga

SEQ ID NO: 26052 - DNA, 2300 bp, Homo sapien
gcctcagcctcccaagtagctggaactacaggcactcaccaccatgcccggctaatttttgtatttttagtagagatggggtttcaccatgttggccagactggtcttgaactcctgacctccagtgatctgcccgcctcggcctcccaaagtgctgggattacaggcatgagacactgcgcctggccaagaccaggagtttgagaccagcctgggaaacaaagtgagacccccctgtctacagaaaaattaaaaattttagctgggcctggtgccgtgtgcctgtagttccagctactcaggaggctgaggtgggaggataccttgagcccaggatttcaaggctgcaatgaggcatgatcaggccactgtcctctagcgtgggtgacagagtgagaccctgtctctaaataataatcataagaacaacaaggaccctctaaacgcactgatatctaaggtgtattaagcgaccaaaaaaaaaaaaaagaaaatcaaagtgcagaaaaacgttaataagagaaaaaaatatgtctgtattgtcttgagtgtgaaaaaataatctaaaagcctatgaaagaaactaatcatattggtttcctgttggtgaggagggctaagagcacggagacttttccctatgctttctgtactttttgattttgagatatgtgaatgtaggtttctctcactgctcgaactttcactaaccaaattactacattccaaattctcaaaaacaaatagatttacttaaaagtaggctgggtgcggtgtctcacgcctgtaattccagcgctttgggaggccgaggcgggcagatcacctgaggtcgggagttcgagaccagcctgaccaacatggagaaaccccatctctactaaaaatacaaaattagccaggcgtggtggcgaatgcctgtaatcccagctactcgggaggctgaggcagaagaatcacttgaatctgggaggcagaggttgcagtgagcccagatcatgccattgcactccagtctgggtaacaagagagaaactctgtctcaaaaaaaaaaaaaaaaaaaaaagatttgcttaaaagttaacatctccggccgggcgcggtggctcatgcctgtaatcccagcgctttgagaggccgaggcgggtggatcacgagatcaggagattgagaccatcctggccaaaatggtgaaacctcgtctctgctaaaaatacaaaagttagctgggggtggtagcgcgcgcctgtagtcccagctactcgggaggctgaggcaggagaatcgcttgaaccagggagtcggaggttgcagtgagccaagatcgcgccgctgcactccagcctggcgacagagggagactccatctcaaaaaaaaaaaaaaaaaaaaagttaacatctcatccaaatttgcaccgagtaggaaaacaaaagtttaaaacatgaaacagatgttactgaggccgaaagggtctcccaggcctgggagtctgcagcttttatgcaattctgccctctggccaccgccagggaagaaaggttgtctccgtctgctgcatcgcctttgcccagcaatgaagcccccaagacagcggcagccggttgcctgaaccttcctatccttgggggcacccagtgcaggtggatgacccgactcaacctccgccagggcaccctcggggcaggacgggtagcaaggaggggacagagatcggccccaggagaccacggaagatcgcgctcctggggccaacttcagcagcgagaggcggcctttgcccaccgcctcatcccaccacgccgcggtcctccaagaaccttcccagcggttctctcctcctctcaggagtagaggccctctgagaccgacggggagggacggctcgggccggtcatccgaggggccgcacggattccctcctccgcccagctccaccccctcgaggggcggcggtccgggagtggcgacccggctcccccatggcgcgcgccgtcggggcccctggccaggctccgagcggggttggcggggaggggaggcgggagcgagggcgggcggtgggaggtgggggcgggaaggtccgaaggcggcggcctgaggctgcaccgggcacgggtcggccgcaatccagcctgggcggagccggagttgcgagccgctgcctagaggccgaggagctcacagctatgggctggaggccccggagagctcgggggaccccgttgctgctgctgctactactgctgctgctctggccagtgccaggcgccggggtgcttcaaggtgaggacgcgggcgg

SEQ ID NO: 26053 - DNA, 2300 bp, Homo sapien
agcaatacgaaggaacaaactattgatatgcaaaatagtgtaaatgaatctcaaaaacatcggaaagagggaaggaagccagacacagaagagtgcatgccgcatgattccatttatatgaaattctagaacaggcaaaacttatctatagacagagaacaacagatcagtggctgtctggggttgggagtgggcaagtttggctggaagggcacagggctctttctgtgagtgagggaatgtgtctgcattatagtgatgcttatgtagttatatacacttatcgaaactcatcttactggccacttaaaataagtgcattttattgtgtgtaaattataccttaatgaagttgatttgaaaatccaaagtagtaataataagtaataatctcgtagctggacagctgtggtgactcactcctgtaattccagcgatttgagaagctgaggcaggaggatcacttaagatcaggagttctttttatttttatttttattttttgagacggagtttcgctcttgttgcccaggctggagtgcaatggcatgatctcggctcgctgcaacctccaccttctgagttcaagcgattttcctgcctcagcctcccaagtagctggaactacaggcactcaccaccatgcccggctaatttttgtatttttagtagagatggggtttcaccatgttggccagactggtcttgaactcctgacctccagtgatctgcccgcctcggcctcccaaagtgctgggattacaggcatgagacactgcgcctggccaagaccaggagtttgagaccagcctgggaaacaaagtgagacccccctgtctacagaaaaattaaaaattttagctgggcctggtgccgtgtgcctgtagttccagctactcaggaggctgaggtgggaggataccttgagcccaggatttcaaggctgcaatgaggcatgatcaggccactgtcctctagcgtgggtgacagagtgagaccctgtctctaaataataatcataagaacaacaaggaccctctaaacgcactgatatctaaggtgtattaagcgaccaaaaaaaaaaaaaagaaaatcaaagtgcagaaaaacgttaataagagaaaaaaatatgtctgtattgtcttgagtgtgaaaaaataatctaaaagcctatgaaagaaactaatcatattggtttcctgttggtgaggagggctaagagcacggagacttttccctatgctttctgtactttttgattttgagatatgtgaatgtaggtttctctcactgctcgaactttcactaaccaaattactacattccaaattctcaaaaacaaatagatttacttaaaagtaggctgggtgcggtgtctcacgcctgtaattccagcgctttgggaggccgaggcgggcagatcacctgaggtcgggagttcgagaccagcctgaccaacatggagaaaccccatctctactaaaaatacaaaattagccaggcgtggtggcgaatgcctgtaatcccagctactcgggaggctgaggcagaagaatcacttgaatctgggaggcagaggttgcagtgagcccagatcatgccattgcactccagtctgggtaacaagagagaaactctgtctcaaaaaaaaaaaaaaaaaaaaaagatttgcttaaaagttaacatctccggccgggcgcggtggctcatgcctgtaatcccagcgctttgagaggccgaggcgggtggatcacgagatcaggagattgagaccatcctggccaaaatggtgaaacctcgtctctgctaaaaatacaaaagttagctgggggtggtagcgcgcgcctgtagtcccagctactcgggaggctgaggcaggagaatcgcttgaaccagggagtcggaggttgcagtgagccaagatcgcgccgctgcactccagcctggcgacagagggagactccatctcaaaaaaaaaaaaaaaaaaaaagttaacatctcatccaaatttgcaccgagtaggaaaacaaaagtttaaaacatgaaacagatgttactgaggccgaaagggtctcccaggcctgggagtctgcagcttttatgcaattctgccctctggccaccgccagggaagaaaggttgtctccgtctgctgcatcgcctttgcccagcaatgaagcccccaagacagcggcagccggttgcctgaaccttcctatccttgggggcacccagtgcaggtggatgacccgactcaacctccgccagggcaccctcggggcaggacgggtagcaaggag

SEQ ID NO: 26054 - DNA, 2300 bp, Homo sapien
caggactcctgggaaggtgtcacttctaggaagtggccattggtccagaggcctcagcctgaccaaccccaggcagctaggcaatgagcagtacagggtgcctaagcaaggtccccatctgtgccctgcctgcccacagatgcccctcaggacgctgtcctgtcctccttccgggactccagggccagatccatggctgtgatacagtgcactgtggacagtgagccacctgctgagctggccctatctcatgatggcaaggtgctggccacgagcagcggggtccacagcttggcatcagggacaggccatgtccaggtggcccgaaacgccctacggctgcaggtgcaagatgtgcctgcaggtgatgacacctatgtttgcacagcccaaaacttgctgggctcaatcagcaccatcgggcggttgcaggtagaaggtgagtggaagagaggggaggaggaggggctctgatgctctcaggtccaagtccacgagaggggctggagctcccactagagcgggctgtctggtctgagaaagctctgccttgagaagcctaatctggtggagggggcacagctcccactggagggggcatggttccaccttggaaagccctataccaagtcagactgagaccttcccacaatgtgcagaggcccctcagaggtcccacccagaggctccagcccccaaggcctacagatccccaatcatctctctatcctccgcccgcaggtgcacgcgtggtggcagagcctggcctggacgtgcctgagggcgctgccctgaacctcagctgccgcctcctgggtggccctgggcctgtgggcaactccacctttgcatggttctggaatgaccggcggctgcacgcggagcctgtgcccactctcgccttcacccacgtggctcgtgctcaagctgggatgtaccactgcctggctgagctccccactggggctgctgcctctgctccagtcatgctccgtgtgctctgtgagtgtgaaccccctcctccgccttagtctccccacatctcacacgcccacctcagttcttcctcctcttctgtctgccaagagtgaaggcttcacggatattgagtcctgggttggaatcctggctctcccgctgtctggttgggtgaccttgtaaaatggggaatacatcattcgcctcatcctgcaagttgtataagaaataaatggctggtgcaggggcttatgcctgtaatcccagcactttgagaggctgaggtgggcggatcacttgaggtcaggagttcaagactagcctggtcaatatggcgaaactccgtctctactaaaaatacaagaattagcacggcatgaaggcacacacctgtaatcccagctattcaggaggctgaggcaggagactcacttgagcctgggaggtggaggttgcagtgagccaagatcaccacaacgcactccagcctgggtgacagactgagactctgtctcaagaaaaaaaaaaaaaaaagaaaagaaaagaagagaaaaaaccaaaagaaataaagcgtgctgagtgtgtctggcacacgataagccctcatcagtcttggtctcccactccagccttcaccaaggcctacactgtatcagtcagctattgctattgaccacaacaaaacttactgcttcaaacaaaagtcatgttatctgctcaattctgtgggctgggctcagctggggagttcttctgttgttcacacctcatgtggctgcagttgcccagtggtctcagatgactgcacgctcctggctgccagttgggccacatgtgcccagcaggctggcctgggcttcccacattgttgtgttccaacaagtagagcagaagctacaaggcctcttgaggtctggctctgaagttgcacaacatcacttctttcttcaattggtcaaactgagtcacagattcaaggagtgaggaaataggttctgcctcttaatgggaggagcagcaaagtcactgtgcatgggtacagggagggagaaatttgtggtcattgtctgcaatcaccacactcccttcctccccacagaccctcccaagacgcccaccatgatggtcttcgtggagcctgagggtggcctccggggcatcctggattgccgagtggacagcgagccgctcgccagcctgactctccaccttggcagtcgactggtggcctccagtcagccccagggtgctcctgcagagccacacatccatgtcctggcttcccccaatgccctgagggtggacatcgaggcgctgaggcc

SEQ ID NO: 26055 - DNA, 2300 bp, Homo sapien
ggcgagatatgactgacacagtaaaaccatcccaccaggtggtgggaggtaaatgccaggatggagcctgtgcaggagagtggggagcaggaggggccaaggcatagggctgagtgggccctggcggtggtctggaaggggctgcggctccagcacatggggttgggttgtgtagtcctaggtggacacgcacatggtcccagactgtgagaggtgtggtggagagccctcacctgctcttggttttcccctgcaggagcctgggtccaggtgtcaccatcacctgagctccaagagggccaggctgtggtcctgagctgccaggtacacacaggagtcccagaggggacctcatatcgttggtatcgggatggccagcccctccaggagtcgacctcggccacgctccgctttgcagccataactttgacacaagctggggcctatcattgccaagcccaggccccaggctcagccaccacgagcctagctgcacccatcagcctccacgtgtcctgtaaggacttttgtcccatccaggtgtgggggaaggaatgcagtcccccagtcctgggctgtgtcacatgacagagccctggatgagggacccccctggctgggtcctgaccactccccaccctgtgtagatgccccacgccacgtcacactcactaccctgatggacacaggccctggacgactgggcctcctcctgtgccgtgtggacagtgaccctccggcccagctgcggctgctccacggggatcgccttgtggcctccaccctacaaggtgtggggggacccgaaggcagctctcccaggctgcatgtggctgtggcccccaacacactgcgtctggagatccacggggctatgctggaggatgagggtgtctatatctgtgaggcctccaacaccctgggccaggcctcggcctcagctgacttcgacgctcaaggtcagtgtgtgtgtgtgtgtgtgtgtgtgtgtgtgtgtgtgtgtgtcctttaaaagaggagaggaggtgggacagggttctagaagcctgggggcacgggaatagtccccattcccacccttcctaacgatggtggactccagacttgagtttcttaggagaaccttttataaacaccaaattttacaagtatgcccagtggataaaactaaacagggaatttcaggagaaagtgcagcaggggaggggaggtctgtggtctccccatttgcccccagccagggtcagggaggggctcagggctttccaggactctgtggaactctacttgggaccactcaggagccagtgggctattcccaagcttgacttctaagccacatttataggtgggccacccaaggctcccaaaggccaaggggctccccagcagtaggagtagctcacccacatggagacaggtggcctgctgtacacagcctcaagaccctcactggtgtcctgtgccctccctctccccagctgtgaatgtgcaggtgtggcccggggctaccgtgcgggaggggcagctggtgaacctgacctgccttgtgtggaccactcacccggcccagctcacctacacatggtaccaggatgggcagcagcgcctggatgcccactccatccccctgcccaacgtcacagtcagggatgccacctcctaccgctgcggtgtgggcccccctggtcgggcaccccgcctctccagacctatcaccttggacgtcctctgtgagtctggctggatgcagggtgggactcacaggaatgacagaagcccacagggatcacggcatggccggaacccgacaggtgtccagtggggaactcggtacccagtagctagtggagcactgggcaaggagcattaagagtagggggcgctggggtgagtcctgtctgggcagaggagcagtgcctcagactgggtggttgggagccataggggtggggagccagggccctcctgagtttgaatgccacctgcaaactggcctcctgcaggctgctgcctgtgactccgtgtaagcctctcatgccctgcagacgcgccccgcaacctgcgcctgacctacctcctggagagccatggcgggcagctggccctggtactgtgcactgtggacagccgcccgcccgcccagctggccctcagccacgccggtcgcctcttggcctcctcgacagcagcctctgtccccaacaccctgcgcctggagctgcgagggccacagcccagggatgagggtttctacagctgctctgcccgcagccctctgggccaggccaacacgtccc

SEQ ID NO: 26056 - DNA, 2300 bp, Homo sapien
tgcccgcttctcctggtacctgaatggagccctgcttcacgagggtcccggcagcagcctcctgctccccgcggcctccagcactgacgccggctcataccactgccgggcccgggacggccacagtgccagtggcccctcttcgccagctgttctcactgtgctctgtgagcagccaccacctgttgcagcctcctgccgggacccaccagccaccccacctcctctaggccccccagccctgtcctgccctgccccacggtctatatcgggagggctgggtcacagacctggccacagtgggtctttccatgtggggctgaagtttaggaaatgaggctggggccttctctacctccccatgtctttaccctccaatgccagccctgtgggctcctctgtcccagcctcaagctcagcatgggcaccacatccatgctttgtcctcatgggtgagccctgggacaccacactcctctatttgtgcacatgccccacaggctgtgctgggctcccatagacaccaaggcaaagcccctcagcacagggacagacagcccctctgcatccgccaagcggggaggctccgtgtaagaccaagggcctgattccagaggcttcccctgacacatgtgtgccggagccacgtcccggaactgtcagagggcagctgcctctgcaaagttttctggtgtctgagtgagatcacatgggggccttggctgattgctctcttttggccaactgtctccagaagccttcaggaagaggccattctatgcattcgctagtatcacaggagctggcttggagatcacagataagctgcagggcagatcttgaggggaggctccgtggtaaggcattgggtgcagggtgggagcagacagcatgacccccagggattgctaggtgggcaccctgctcagcagcagatgggacttatgcaaggtggcagccagcccatacagcacctttgtctgagctagaaaatggtgctccttcttctgggaagactcagtaggcatcagggcacagcttagcttgaggagcatgagcctagcttgagttccacccaccctggtctggctgcccttgtgcagtgcacagtctgcacagctgcttggggcagccttcgggatctgcctttgtccagtgtattctgggagcctagccaggcttgtggggccctggagcatccgtgggatgagtgcccatgttcttcctccctgcagacccccctcgacaaccaacattcaccaccaggctggaccttgatgccgctggggccggggctggacggcgaggcctccttttgtgccgtgtggacagcgacccccccgccaggctgcagctgctccacaaggaccgtgttgtggccacttccctgccatcagggggtggctgcagcacctgtgggggctgttccccacgcatgaaggtcaccaaagcccccaacttgctgcgtgtggagattcacaaccctttgctggaagaggagggcttgtacctctgtgaggccagcaatgccctgggcaacgcctccacctcagccaccttcaatggccagggtgagtcaggcagggaatgggtggcctgggggcaggggctggagctctggactgttctgctccgaggaggatctaatcaggcaaaaccactctgtgcagcagtgggggcccttcgctgccctcctccacattcaggaagagcggagctgctccttcccatgatctctgttcaggccggggataggcaacacagctggtctctgaggaaggactccccagctgggacagttgggctgccttgtcctccttccctgtactgcaaccctctctgcccagggcccccacagtccccagggcccacttctcctaggctgccctgtgagctagcttgcttttctccccaaccctgtgggcaccccagggggcctccttcctgctccttccaggctgggcggctggacccctggctcctgggggccgggggtggtcagtaagctgtgccgcctgctctccagccactgtcctggccattgcaccatcacacacacttcaggagggcacagaagccaacttgacttgcaacgtgagccgggaagctgctggcagccctgctaacttctcctggttccgaaatggggtgctgtgggcccagggtcccctggagaccgtgacactgctgcccgtggccagaactgatgctgccctttacgcctgccgcatcctgactgaggctggtgcccagctctccactcccgtgctcctgagtgtactctgtgggtgactggcatg

SEQ ID NO: 26057 - DNA, 2300 bp, Homo sapien
aaaaaaaagaaaaagaaaaaagaaaagtacggtcttccaactttcggtatgtgcactgtccttccctcctcctgagggcatggtagctaattgatcaagccaggtttttctttttgttttttgagatagggtgttgctctgttgcccaggccggagtgcaatggtatgttcatggctcactgcagcctcaaactcctgggctcaagccatcctcccatctcagcctcccaaatagctgagactacggcccatgtcaccacacccagctaattaaaaaaaaaaaattgtggccaggcatggtggctcatgcctgtaattccagcactttgggaggccgaggcaggcagatcacctgaggtcaggagcttgagatcagcctggccaacgtggtgaaaccccgtctccactaaaaatacaaaaattagccgggtgtggtggcgcacacctgtggtcccagctactagggaggctgaggcaggataattgcttgaacctgggaggcagaggttgtagcgagctgagattgcgccactgcactccagcctggctgacggagcaagactccgtctcaaaaaaaaaaaaaaaaaaaaaaaaaaaaagctggccacagtggctcacacctgtaatcccagcactttgggaggctgaggcgggtggatcaccagaggtcgggagttcgagatctgcctggctaacatggtgaaaccctatctctactacatgtataacattagctgggtgtggtggcacacctgtaatcccagctacttgggaggctgaggcaggagaatcgcttgaacctgggaggcagaggttgcagtgagccaggatcacaccactgcactccagcctgggagacagagtgagactcagtctcaaaaaaaaaaaattgtttgagatggagtctcactatgttgcctaggctggtctggaactcctggcctcaaacgatccttctgcctcagtctcccaaagtgctaagattacaggcatgagctaccatgcccagccaagccaggtgttggacataagcctgggctctggctctgaatcttcaaccatgctgcagccatctactaccaatagatctgatttggcattaaagggcaaaccctcctgatgcaccacaaagcccagagctacctacagtagtgtggggaaaggagaaccctggaaggctttctatatagggcagcatgtggggttgagaggagggacccttcccagcctcttcctctccccgcagccgcccgtctcctcatcagcccggcagccgaggtggtggaaggacaggcagtgacactgagctgcagaagcggcctaagccccacacctgatgcccgcttctcctggtacctgaatggagccctgcttcacgagggtcccggcagcagcctcctgctccccgcggcctccagcactgacgccggctcataccactgccgggcccgggacggccacagtgccagtggcccctcttcgccagctgttctcactgtgctctgtgagcagccaccacctgttgcagcctcctgccgggacccaccagccaccccacctcctctaggccccccagccctgtcctgccctgccccacggtctatatcgggagggctgggtcacagacctggccacagtgggtctttccatgtggggctgaagtttaggaaatgaggctggggccttctctacctccccatgtctttaccctccaatgccagccctgtgggctcctctgtcccagcctcaagctcagcatgggcaccacatccatgctttgtcctcatgggtgagccctgggacaccacactcctctatttgtgcacatgccccacaggctgtgctgggctcccatagacaccaaggcaaagcccctcagcacagggacagacagcccctctgcatccgccaagcggggaggctccgtgtaagaccaagggcctgattccagaggcttcccctgacacatgtgtgccggagccacgtcccggaactgtcagagggcagctgcctctgcaaagttttctggtgtctgagtgagatcacatgggggccttggctgattgctctcttttggccaactgtctccagaagccttcaggaagaggccattctatgcattcgctagtatcacaggagctggcttggagatcacagataagctgcagggcagatcttgaggggaggctccgtggtaaggcattgggtgcagggtgggagcagacagcatgacccccagggattgctaggtgggcaccctgctcagcagcagatgggacttatgcaaggtggcagccagc

SEQ ID NO: 26058 - DNA, 2300 bp, Homo sapien
tcatggtttttttggtggttgttgttgttcattgtaggaattctttatatattctggatattagtcctttatcagataaatgatttacaaatattttctcccattctgtgggttgtcctccttttattcactctctggatagtgtcctttgattcatatcctttttttttttttttttttttgagacagaagagtctcactctgtcaccaggctggagtacagtggcgtgatcctggctcaccgtgacctccgcctcctgggttcaggtgattctcctgcctcagcctcccgagtagctaggactagaggtgcacaccaccacacccagctaattttgtatttttagtagagacggggtttcaccatgttggccaggatggtctcaatctcttgaccttgtgatctgcatgcctcagcctcccaaagtgctgggattacaggcgtgagccaccgcacccagctgttgtttgttcttttcagacagggtcttgctctgtcacccaggctggagtgcagtggtgcaatcatggctcactgcagcctcgacccctcccctgggctcaagcgatcttcccacctcagcctccagagtagctgggaccacaggcctgttttttaatttttcgtagagacagagtcttgcagtattgcccaggctcgtcttgaactcctgggctaaagtgatcctcctgcctcagcctcccaaagtgttgggttcacaggcatgagccactgtgtctggccaagttttaaattttgatgaagtccaacttacctatttttttttttcgtgcttttaatttcatacttaagaaagcattgcctaatccaaggtcatgaagattttcacctgttttcttctaagagttttatagtttcacttatatgtgtttctggcatctcttccttttgggctcaggtctatggtaccccttagacactccctgaccaggggcactccatggttgagggcctgcctttttggatatggtacactccgcacacattgagctcatatttgtggggtatgtgttccacagcgctctcatgctacctttcaaacctagacttgccttgccacctccccactccaactctgaacctcagctctgaacccctaaagacctcacccctctcttagtcactaaggggtttgctgaatgcctggtaggctccgcactgctatggggcacatatcttcagttctaggtcctgagaaatgggctctcacaagctgtaaaaaacaaggcaaggaaaatagagatagctctggggtagctacaggaacctcaaaggagaagttccagctggaagccaaattcatgctgctccttgaaggttgaataaggtttcagcaggcaaagattatctgtggtggagatagagctgggcagctagggagcccttgagcagacagaactgcccccagagtgggtctgcggagagcagggaatggggacagagctgggggcaggaaatgaggacttttcacatctcacgggcaatggggagccacagaaggtttttgagcaggggagtgactgttaaaggcagcacttcggcaagttcagtaaagccccattatggtctatagttagtaaggcaggtggtaggagacaagcctcaggaagaaaccatcattctagctgggtgtcttggagtgagtaactgggcatctctgggctccagttcctgttggtttgggtggtggggagggggcagggaagtggggaagagggagaaacagctgttcatctgccttagggtggtatccttgaggggctgggaaagcagaacttgggatagggccaagggacacacaggcttttctgaggcaggccaccaagtgagggcattcctgggcacagcctgagctgggaacgtggcctcctggctctctgctggtgtctgactcagaggtctttaagagccctgccctcttattgggttggccagcagaggaggtggggacacaggctcggacttctagcaggtgctggggctaaagtgcccagaggtgtccctggaggcccctgtgagcccagccagcgcagtgcgcaccaccctcttaggcaacaggagcagcacaagaacctgctatgggcttcttgcccaagcttctcctcctggcctcattcttcccagcaggtaagctttgcgggcctagtgcctgtcttccagggtccagccttcataagtccagcccttggcagattagactatgcctgggtcacatgtttggttgctgaggtcaagggagggcccaatcgggcagtggccaggagctgggcaggaagct

SEQ ID NO: 26059 - DNA, 2300 bp, Homo sapien
ggaaggagggagcttccaaacaggaaggtttggagggcgctggcactgaggacaggggatacgccccccatgagtcttcacccctgctcagagcctgctgccgtggccctcagagacgagcccatctttggagctggagttggggacagggaaaccaggtggaagggaaaaagaaaaaaggggcaggcatgagtgtgaggggccagaccctgcagaccccaggacatgcacagcagacacacactccaatccctcctggctctgctcagcctcaaacgaggtgcaggcctgcaggccccaaccaaggacccctgttacacacagacacaaagacacaagatgcagcaacacacacacgtaatacagaaacacagtcacacactagcgcacacacagacacagtcagacaatccaagaaacacactcacacatgaacagacatataagcaaagtcttacacatacaaagacacacttaagcacagacacaaacacaccaacagatgcacagacggacacacatagacgcacactgggaggcggcctgtggagactgctgattggataccatgttggcttggtatccagaattgttggtgcagcgcactcaccatgcctgacctcattaaggaggccctctggggcagtggctctgagaagaaaggcagcaagcctagggaggtgacactgtagctggggagcattttggctgggcagagaggaggaaggagagcatttcagggagggaaaatagcccttgcaaaggtttggagtggaagagcaaaagggatgtcccaagaactgtgcctcatttgatggggctgtggggcccttctctgacgggcagccttcccaggcacaaagggaggtggactgagaagcatctggaacttctgtgggggcacatggggcagaggggaaggggaacaggcagaacgagtcagctgcctttgaaagctccacgagggacctagcagaaattcattcattcatccgttcattcatttatttatgacaggttctctctctgtcacccaagctggagtgcggtggtgtgatcacacttactgcagcctcaaactcttgggctcaagcaatcctccaccccagcctcctgagtacctaggactacagacgtgagctactacacctggctaatttttaaaactttttagagacagggtctccctttgttgcccaggctggtctttgttgcccagccagcttcaagccatcctcccacctcagactcccaaagcgctggattacaggcatgagccacgggttcccagcccagaaagagaccttcaccccacaaaccccctgtctggaggccaagtcccagcatccccagaagggccccggttaggacaagaaaaaggctgtgtgcctcggaggagaggctgggtgccccctggtgcggagtggtccccttgccgggcatggggcctcagtctgtgagactccgcgcctccgtcgtctgaacttgagcaaagacagagctaggcctagcctggggacccgagggcctgccctcatccgcaattctgcctcttttctggccactgaggaccgggctagggaagctgtaggggcagtaggggtgggaggagagagggttccgggtcaagggactggaggggtctggggcagggaagtggaggggtctagggcgggcccttccccctccgctgttgggccctcgctgaaggggccgaggctgagccccaaggtgggcctgtgggggcggggcgggggagcccctcagcagctggaccgcaggaggccgaccagggtctggaactcctcttcccctccctccgccgccccctctcccttctcccaccccctgggctgctaggggagcgggggaggcgcaggaggggctcagggaggggccctggacgcgggaccaggctgggcccctcggcggaggcccgcgcaggcaggccccgccccggcctcgcacatctgggccgggagcgcgggccgacccggcggcgcaggcggcgcggccatccggcctgggggagggggcggcgggcggggtgggcggcgcgaggaggcgggaggcctcagggccgggcgcacgtcgagggctgcggccgccgcagcgggcacggccaacgagctgcgggcccgggatcgcggcggctggacggggctggagctgtcgggagggcggaggtgagttctggggcgggggctgccgggcgccccgagtggagaaaggcgaggaggtttgccgtcccgggctgtcggctgagaccccaccaaaaacctccagactttgtctggtgg

SEQ ID NO: 26060 - DNA, 2300 bp, Homo sapien
atcctgccttctgggctcgtctcattgctttctcatggagtcattaaatttgttcccctctcctctgtgtttttagcaaatgagaagttgaagttagaggctggtttagattccaggttaaacctttttggcaggaatcccttgtcagtgatgctgtgactttgggctgccttacttcaggaggcatcagtgtgacaggctgtcctgcagagagtagagagatagaccagtgtgtgactgggagaagtcacatacctccattgcaaacttgtgccattcctcttaaacaccaggtcctcggccaggcatggtggctcacacctgtaatcccaacactttgggaggccgaagtgagcggattgcttgaggtcaggagttcgagaccagcctggccaacatggtgaaaccctgtctctactaaaaatacaaaaattagctaggcgtggtggcgggcgcctgtagtcccagctactcgggatgctgaggtgggagagtcgctcgaacccaggaggcagatgttgcagttagccgagatcgtgccattgcatcccagcctgggtgacaagagtgaaactccgtctcagaaaaaaaaaaaaaacaaaaaccataccaggtcctctgtcagtgacgcttgggcgcctgtgagtatctgcttcctgtcaaccttcccctctggtttagcatccactggttcttgttgcctccagcatttgttcctttaggggttgcagaatgacttagcatttggtcatttctttgttatttattagcaagaattctttccgaaagaagagctttccatcaaccaccagggcaatttggttacaagaaaggccaagagacaggctgaattcttcctctttaatcctcagctttcagagtaaagagggcactgctaccgtcagtggtgacaaatgagggcttttgagggcttgggtttgtttgttttgctttctctcttcttttctaataatctctgtgaatgcactgcttttatgtgttccatctgtttccatcagttgcactcattattctttttgatgctcagatggtcccagctcggcccattggaggcttcctggggcgcctctcactgcccctgtgctgaggctgccgttggggagctgaggcggaggcaggcctgagactcagggcagggtctgaatggggttcaggtgggggcacaccccctccacaggcatctgttttgcatatggccctgaccgatcaccaggagggaaagctctaagggcacgcttactttatgtggtcccctgttcttgcccaccatcgagcaccctgttgcctctgaccgcacccagctgcattgcttgtgtgacctgaataaggtagctccaggcccagcctttggggtcagcagcaccagaactggtccctggaaaataccaataaagtcctcctttccaggctgcccctcctgccagtctctgggggtgctggggataggagtcctatgctgttgctttggcacctagaagctgcagctcagcacatgctggcaggaccctgagtcactggggtatcaggaaggggtgagggctcttggtgaatgtgggcagtcggtagagggtgggcagaagcccccgtgctagagagtacaggcaccacttgggctgctgagagcggtaggggtttgagtccttcctaaagggagctcctctggtgtccctgagccatgggtccatgagtggccctgacccctgccctccccactccctatccttcaggctcccgctggtgtccctggagcatgggaggctgctgagcgtgagtggcggtgtctggcaggagctgcgtggcagggagggcgtccatggctgcagccaacaagggtaagtgccttcctggcgtggtaggacttgcacaagctcttccggtgggccctggtaggagggccattgctgcaggtagggcccgcaccacctgtgtgtgtgtgtgtgcatgtgtgagtgcgtgtgtgctggtgtgcgaatgtgattgggactatgtcagtgtttgtgccaggttctggggctcacgcaagccctagcaggacccctgcagagccctgctgactccttaggctggtctgtggaggtgtgtgctcttgtgtccctgccgttccactgtgggggttgggggagccgaggggcttatggtgagcactgagactggtgatgtgggagggccacagcaggctgtggaagggagtttgggtttctttcagagtccagaagggataagggagggttttaggccagggtgatctggtgagatttgagggttctgtggggctcacc

SEQ ID NO: 26061 - DNA, 2300 bp, Homo sapien
aaccccgggctgtgcagttagcagccagtttgtgtttgagagagcccacaccagagatggttttgagaagttggctagaaagacttttgaaaaaggcaggcttgggccaggcgcggtggctcatgcctgtaatcccagcactttgggaggctgaggcaggcagatcacttgaggctaggagtttgagacccacctgaccaacatggtgaaaccctgtctccactaaaaatacaaaaattagccctgggtgtggtggcgcgcacctagaatcccagctacttgggaggctgaggcaggagaatggcttgaacccggcgggggagggggtggaggctgtagtcagccgagatggcaccactgaactcaagcctgggcgacagagtgagactctgtctcaaaaataaataaataaataaataggcaaaacttatcttggttgaagagggcttgaattttggctatgagaagagagcggggagggccttccaggttggaaggtgggataatgagggggaggggatcacaaatgtctgcacagacccagaaggtaactaaccgtgagaaacagggattagcggggactatggtaaatttatgtgctcttaaaggggcttgtaatgccaggctggaaagtgagcccatgttgtcagatcttctgatatttcaaaagccacgaaaccagattcctgattccagaaagaggcggaggaggcaggagggggaaggacttcttttaaaaagccccatgtgagctaaacaaaatacacctacgggccactttgggcccaccgtctgccaactttagactttcaagacaaggtctaaaggtagtgtggtgggagtgggtagagtgggcaggagtggatgggctgagatcagaatgtgaaaagctctcaatgtaagcgctgtctctcaaacgcgagggcacatgagtcacccaaagtgctgctgaagtttgtgaagcgctactggaggcagtcccagagggctttggagcaggagagggacgcgatgaaaacaagagctcagaaagattaatttgccaacagtgtgcagactggagatcagcagacaggttatgggccacagggtggcagacttgagggctcctttaaggcagcgaccccggccctgctgaagggaggctggccttcggccgcccaggccgtctctctagttccgttggaagcaaggcgctgcgtgctccggacggcttactgagggcactttggggaatccgtccccacgggcgaagtataggtggggtgttcgcgaaccggcgggcggagagcaccggcaagaacccccgcagaccggagggccacgcctctcgctcctcggctcattgcaggcgcccacatcccaccccgcggtgctgagcgaggcgcatctcgctgccatggcgaccgcctccatggagaccgggagcagaggctgcggtccccgggggcgcgtcacaggctctcccagcccccagcccgcgtgccttctttgttctgatgcttctccaggccgggccaggcacccgggacgcgtctcgggcccgcacgggggttgcttctttcgagacaggggatggggtggaaggggaagaggtccaaaccctggggtcgaaacaggagtgatggagggttcctcagctcctgaacgagaccaacacggcccgtatcgatggccgaagccggcgtggaagcccagggagaaaggccaccttcgggagctccacccagccccgagacgcgcccgacagccctcccgagagcgaagggcccaagggaggtgcgtcctaagcaaggttcaaggctagaggcgctatcccccaggcggaagaaggagcgggggcggggcctatccgaggccctccttctccctcttcgagtggtcggttctggcccctggcctagttgggccgcctgcccgtcttcctcgcgagagctcgcccggcaggcgcggactagcagggcgctgcctcggcgaccctggcacgtgacgtaggcggccctcgccagttggccgttctttggagcccgctcattggtccggagcgtccctcgccccaccctcccagatcaaccaatgggcggaggcgggggcgtgccgacgggagggcggccgcggcgcggggctcccttcctcgtgctcggcgttgagctcctgcagccgccgccgctgcagtggtcgtccctgccctccccggccccggggtgcaccccgcaaggtgaggccacccctctgctccctgcctcccggttccttcccgttcgccgaggtcccctcccggtcccggccctgtcctgagc

SEQ ID NO: 26062 - DNA, 2300 bp, Homo sapien
tccgcccatctcagcctcccaaagtgctgggattacaggcgtgagccaccacgcccggccgtgagtggatgttttatacgtgctccatctgttctcctaacctggagttgttcctgattcttcttgtcctgcctctgtctccagggggcctggtaggggcctgtggtttcccttgcagagccatctatctttggtaaggccctccgcacaggaagccccagagcctgggcactactcgtgtggtaacacagacacattgggcagtgatggggcagccaggtaactcctgccctgacttcctcctgacacaaagagtctaattttctcctggaggctttccagaaccatctttggccttccctgagagcatgtagtatccctaggcatgggcagctctgtatttcagctcctcccagtgggccagactgcccgatgcctgggagtgtgaggaacatttggcaaggacaggagaccacagttctttgtgtgtggtgtccctcctacactaaactgtgagtgccttccactccacagagcctagcacaataacttactcatcagatacattcagtaaatgtttgctgaaaggagttgacaattcggaaataaccccgggctgtgcagttagcagccagtttgtgtttgagagagcccacaccagagatggttttgagaagttggctagaaagacttttgaaaaaggcaggcttgggccaggcgcggtggctcatgcctgtaatcccagcactttgggaggctgaggcaggcagatcacttgaggctaggagtttgagacccacctgaccaacatggtgaaaccctgtctccactaaaaatacaaaaattagccctgggtgtggtggcgcgcacctagaatcccagctacttgggaggctgaggcaggagaatggcttgaacccggcgggggagggggtggaggctgtagtcagccgagatggcaccactgaactcaagcctgggcgacagagtgagactctgtctcaaaaataaataaataaataaataggcaaaacttatcttggttgaagagggcttgaattttggctatgagaagagagcggggagggccttccaggttggaaggtgggataatgagggggaggggatcacaaatgtctgcacagacccagaaggtaactaaccgtgagaaacagggattagcggggactatggtaaatttatgtgctcttaaaggggcttgtaatgccaggctggaaagtgagcccatgttgtcagatcttctgatatttcaaaagccacgaaaccagattcctgattccagaaagaggcggaggaggcaggagggggaaggacttcttttaaaaagccccatgtgagctaaacaaaatacacctacgggccactttgggcccaccgtctgccaactttagactttcaagacaaggtctaaaggtagtgtggtgggagtgggtagagtgggcaggagtggatgggctgagatcagaatgtgaaaagctctcaatgtaagcgctgtctctcaaacgcgagggcacatgagtcacccaaagtgctgctgaagtttgtgaagcgctactggaggcagtcccagagggctttggagcaggagagggacgcgatgaaaacaagagctcagaaagattaatttgccaacagtgtgcagactggagatcagcagacaggttatgggccacagggtggcagacttgagggctcctttaaggcagcgaccccggccctgctgaagggaggctggccttcggccgcccaggccgtctctctagttccgttggaagcaaggcgctgcgtgctccggacggcttactgagggcactttggggaatccgtccccacgggcgaagtataggtggggtgttcgcgaaccggcgggcggagagcaccggcaagaacccccgcagaccggagggccacgcctctcgctcctcggctcattgcaggcgcccacatcccaccccgcggtgctgagcgaggcgcatctcgctgccatggcgaccgcctccatggagaccgggagcagaggctgcggtccccgggggcgcgtcacaggctctcccagcccccagcccgcgtgccttctttgttctgatgcttctccaggccgggccaggcacccgggacgcgtctcgggcccgcacgggggttgcttctttcgagacaggggatggggtggaaggggaagaggtccaaaccctggggtcgaaacaggagtgatggagggttcctcagctcctgaacgagaccaacacggcccgtatcgatggccgaagccggcgtggaag

SEQ ID NO: 26063 - DNA, 2300 bp, Homo sapien
ggaggggcatataggtcaccctttggtttacctttggtgccttaagagggagccctttaggcctttcagtgattggcatatccaagcctggtggccacctctaggcacagtggcaggaggaaggtgaaattgctaggaacaggttgcacccccaagaggcagaggatggttggtaactccctgtgcagtgccttccagggggcccccagtacaaaggtgaggtcaggtccctttgctgatcctaccctttttcctttcagagccagcccctccctccctacccctcctcactgaggccctcaggccccagcagttccaaccaagggagggcctgggcttgagcatggctggcagctctgggccccaaaccggttttcccacctcacctgaggctggcacatcacttctgtgtttccttcccatccccggcccacctttaccaccaagtttctcctctccaacactgggaatgttaatgggggagtatccagttcatctcttgtccctggcctgccctggttatggccccttatggaaaatcaagaccactatatatgactttaaaacaagaaatgggggtgacttccactcttggcctctacttctggcattcaggaatcccctccaggccttgagggctttgaagtgacaacaaaaagtagttgggatcccccttgccaccaccttccctcccgaaatccgagccctggagttggagaccagaaggccacaaggaagccccacctgctctcgagtgagcaggaggagcattgcctgcttgcccaggtgctcctgtttaacccagctacctcaccgcaggttccaacaagacgaattacttccatttgtctcctgcgaaaaagaacagttcttgctggaactgagactgtctcattaatgatagtaccagctgatactaatagggcccctgctctgtgctaaatgctttagatgctcacaaagcccctataaggtaggtaaagccatgagaaaccaggcagcggtccggtcaggtgcccaaggccatgccgttagtcaaactctcttctcatcctgactctagaagtacctcttcactaaggagggacccatattcctaacccccttatgggtactgcaatgaatttgtttctttcttttcttttctttcttttttttttttttttgagatggagtcccgctctgtcgcctaggctggagtgcaatagcatgatcttggctcaccaacctttgactcccgggttcaagcgattctcttgcctcagcctcctcagtggctgggattacaggcatccaccaccacacatggctaacttttttttgtattttcagtagagacggggcgaaagccatgttggccaggctggtctcgaactcctgacctcaggtgatctgcccgcctcggcctcccaaagtgctgggattacaggcatgagccactgtgccctgcctgaaatgaatttctaatccatggaagaatagctcattgacgggtgatgaggggtttgggacaaataagtgagaaccatcgtcatttcacaaaggaggaaatagagttaagaagttaaatgacctgccaaggtactggccttgaactctggtgttctccctgggagtctgggttacctattaaataccccactagaacactgctgggaagggcgagtggcaatggccccatgagcatagagtttttggagagggacgaagcaggaagcagttgtatcacgcaatccatttgggtggcagattatcaacaacgcacccccaaataaagctgaccaacactggagtgctcccttcacttgggactaaagggctgaagggccaagaagggggatccccaccctaggggtgcagatgcaggaattctggggtcctggttggctttggctggtcccaaaatggatgagtggctggtcactaggtggcgtgggcacagaagtgatgctttcttgggaagaagacaagggcagctaaccgccttttcaaagctcgggcctgagaggaggtagcggggaggggataaaactacaactcccagaagtctttgtacccaggagagtcgggaatggtttccatggtttcagaaaacaatatggccgctcccagctgggacgtgagtctctggattaggcaggcagaggcagttatgggcttctgcagtggcgagaaaggaagcgcctgaagggtcgtgaggctggggcgggacccggcaccgctggggcggccaggccgtgaggacgccaatggcgagcagcgtggacgaggaggcgctgcaccagctgtacctgtgggta

SEQ ID NO: 26064 - DNA, 2300 bp, Homo sapien
aaagagagaaagagaaagaaagaagggaaggaaggaaggaaagaaacaaggaaaaggatgaaagagaggaaagaaagaaaagatgcatggcaaggagttctcatccaggtaatcttagattcatttttgcccagtgaccacacactcctcttgggccaagcagtgctctggaaaagtctcccacgtgttcttttggaccttgagattaaaagaatatcttttatatctcagggatagggaagtcctctctaagtaagacacaaaaccccgaagcaataaggaaaaaattgacaggttgaagattaaaaacttctcatatccaaaagattccctaaactaacttagacaagtggcagacagggagaaaacatttgcaacatacttaacaagatcttttcttcagagcatgtaaagagctcctaaaagtcaagaaaaagacaaacacatggtcaaaggatatgactagaaaattcacaggattcaaatggccaagaaacatacgaaaacagaaatttgcactaaaacagcagtgagttacactttcttcctttggcttccagaatgccacagtagcctggtttttctcctgcttcaggggctcctccacttcaagagtctctatttggttctttctttctttctttctttttttttgagatggagtctcactcttttgcccaggctggagtgcagtggcatgatcttggctccctgcaacctctgcctcccaggctcaagcgattctcctgcctcagcctcccgaatagctgggactacaggtgagtgccaccacacttggctaattttttgtatttttagtagagacggagtttcactatattggccaggctggtcttgaactcctgatctcaagtggtcccgcctgcttcggcctcctaaagtgctgggattacagacgtgagccactgcacctggcctctttcttgagcccttaaccttggaggacccagggcactgtccttggtcctcttttcttctttgtctacactcacccacagcttcatccagccccaggtcctcagcctgtccccctgggtcacagccttcccctctgccaatgctggagttccccttagtgctgccctaagagatttttaaaaacacagctatacattcattgttttaagagcttggcattttaatgttttgctgcaggagagggaggcttcagggattcacacttatgtatatacatgatgttatttctgtaagtgcaaacacatacatttatggctatatgcatggaaaagcccagaaagtgacacaccaagatgttatgagtgtttatctatgggttgtgggattactagaactttaaaaatgtcattagcaccatcaaatagatttacaactgtaatgctgattttaaaaataacttaagtgtgtaacaataggttacatacgctagtgttcattcatagctggaatgctacacaatcattaaaaagcgtgttggcaatgatacttaccgatatggcaaaattctcactacttgatgccaggtaaaacagcaggagatgccagatatacagtctatacagtctgatgccagttttatataataaatttttaaaaagaaaacgacatgcatctagagaaaagactggaaggaaatgtatcaaaatgttacctgtgcatctctccaggtgacgtgaaaagcgtttttcaacttcttgaatttttcaggttccgcaaaaaaaaaagtgcgttatttttaccttaattaaaaaaaaaaaaaacaaacaaaaaccctggttcttattctttttgagcagcaagtcgctgtccgccgggcgcagtagcgatgcaccgcgtccccgcccgcgtcgctgccgggtcgccggaggccgcagcacgggcaggtccagcaggccgcagcgcccccccgcggtatgtcccggcggcgggaagggggtgggcgcggagggcggggaggaggcgccgggcgtccccgcgcttcccgcgagatcccgctccgcccgctccgccccgctcgccgcgctcccagctccccgcgccgcggcacttcctgccttccgcgcccgcgccgcccgccctcgtctgcgcccgtcgcctgccgcccgccgcccggcgacgcgcccgccggcgtccccggaggtgcccccggcccggccgggtcgtcgccccgccgccgcgcccgcgagccgctttgtctcgggcggggcgcgcgggagaggccgccaggtgccccccgccacgggcccgggccccccgccccggggcggcggcggcggcgccgggccccggggcggggggcg

SEQ ID NO: 26065 - DNA, 2300 bp, Homo sapien
tgcacaatgtgcaggttagttacatatgtatacatgtgccatgctggtgtgctacacccattaactcgtcatttagcattaggtatatctcctaatgctatccctcccccctccccccaccccacaacagtccccagagtgtgatgttccccttcctgtgtccatgtgttctcattgttcaattcccacctatgagtagaatatgcggtgtttggttttttgttcttgcgatagtttactgagaatgattatttccaatttcatccatgtccctacaaaggacatgaactcatcattttttatggctgcatagtattccatggtgtatatgtgccacattttcttaatccagtctatcattgttggacatttgggttggttccaagtctttgctattgtgaatagtgccgcaataaacatacatgtgcatgtgtctttatagcagcatgatttataatcctttgggtatatacccagtaatgggatggctgggtcaaatggtatttctagttctagatccctgaggaatcgccacactgacttccacaagggttgaactagtttacagtcccaccagcggtgtaaaagtgttcctatttctccacatcctctccagcacctgttgtttcctgactttttaatgattgccattctaactggtgtgagatggtatctcattgtggttttgatttgcatttctctgatggccagtgatgatgagcattttttcatgtgttttttgactgtgggatttcaagggattcaatagtataatgcctgccctgccacatacaccctgtgcagatgtatattggctgggtggggggtgggggggatacctgttgtgtttattttgaaaatgcaaatctcggggcagttttttttttctggtttttgggctgggtggctttacaaggacacttcccccttccctcctggcactaagggcagtcacatcctcactggaagtagtggctggaggtccagggcataacccctgacccagggaggatgaaccggaaattcagtcttgcagagccctctgcacagcacaggagctgggcaaaatttggagaaaaggaaaggtcacgttcccaccttggccacccctctcaggtggggctggggtcttcccctacccttcagatgcattggcccacccagccccccatcaccaggccctcccttttgccacccccatccaatgcaccttgggtctgggtggctgggactgcacgagaaggggtactcctgccttgctgagctgcagcccgccccccgcaccaccacccgcccagccagaggccacttctaacctggggagacaggatgcgaaagctgctcactacccaccggcttttgggtgcagccttcaggcctcttgttccaggaggcctggaaaacgagcggggctggaaggcatttagataattggaagatgggccgggcacagtggctcgtgcgtgtaatcccagcactttgggaggcctaggtgggtggatcacgaggtcaggagttcgagaccagcctggccaatatggtgaaacccccgtctctactaaaaatacaaacattagctgggcgtggtggcgcgctcctgtagtctcagctactcgggaggctgaggcagaagaatcgctggaacccgggtggcggaggttgtagtgagcagagatggccactgcactccagccgggttgacagagggagactccatcccaaaaaaaacaaaacaaaacaaaaagaaagataattggaagctgctccgcttaaaacgaatgacaaattcagcctccctggtctggtcatcaaagaaacaccaattaaataatatggtgccattggcaccaagttagccaaatcatcaatgggcgtgatacttaattcgcctctctggttgctgacaccctcctcgacccccagccgcggaaatccattcctagttccaccgtttagagcctctcctggggctgccgcgaaaattgggccggttggggtaacatctaacctggggtcccgcgaaagagcccatcagttccgcttgggggccccactgccctcccacctcctacgctgggcgcttctcctgcgaatgacgttttgctgctgctcagcgcagccagtcgcggaggcggggaggctgcgcggtcagaggcgcctggagcgagcgaatcctggcccaccgcctgcccaaccgcgtgaccttgattgagttaatgaacttcacgcctcagcgtccaggtctgtaaaatggggtgtctaacgcagaccgtacagcccagctgggtttagcaaacttc

SEQ ID NO: 26066 - DNA, 2300 bp, Homo sapien
ggttttgatttgcatttctctgatggccagtgatgatgagcattttttcatgtgttttttgactgtgggatttcaagggattcaatagtataatgcctgccctgccacatacaccctgtgcagatgtatattggctgggtggggggtgggggggatacctgttgtgtttattttgaaaatgcaaatctcggggcagttttttttttctggtttttgggctgggtggctttacaaggacacttcccccttccctcctggcactaagggcagtcacatcctcactggaagtagtggctggaggtccagggcataacccctgacccagggaggatgaaccggaaattcagtcttgcagagccctctgcacagcacaggagctgggcaaaatttggagaaaaggaaaggtcacgttcccaccttggccacccctctcaggtggggctggggtcttcccctacccttcagatgcattggcccacccagccccccatcaccaggccctcccttttgccacccccatccaatgcaccttgggtctgggtggctgggactgcacgagaaggggtactcctgccttgctgagctgcagcccgccccccgcaccaccacccgcccagccagaggccacttctaacctggggagacaggatgcgaaagctgctcactacccaccggcttttgggtgcagccttcaggcctcttgttccaggaggcctggaaaacgagcggggctggaaggcatttagataattggaagatgggccgggcacagtggctcgtgcgtgtaatcccagcactttgggaggcctaggtgggtggatcacgaggtcaggagttcgagaccagcctggccaatatggtgaaacccccgtctctactaaaaatacaaacattagctgggcgtggtggcgcgctcctgtagtctcagctactcgggaggctgaggcagaagaatcgctggaacccgggtggcggaggttgtagtgagcagagatggccactgcactccagccgggttgacagagggagactccatcccaaaaaaaacaaaacaaaacaaaaagaaagataattggaagctgctccgcttaaaacgaatgacaaattcagcctccctggtctggtcatcaaagaaacaccaattaaataatatggtgccattggcaccaagttagccaaatcatcaatgggcgtgatacttaattcgcctctctggttgctgacaccctcctcgacccccagccgcggaaatccattcctagttccaccgtttagagcctctcctggggctgccgcgaaaattgggccggttggggtaacatctaacctggggtcccgcgaaagagcccatcagttccgcttgggggccccactgccctcccacctcctacgctgggcgcttctcctgcgaatgacgttttgctgctgctcagcgcagccagtcgcggaggcggggaggctgcgcggtcagaggcgcctggagcgagcgaatcctggcccaccgcctgcccaaccgcgtgaccttgattgagttaatgaacttcacgcctcagcgtccaggtctgtaaaatggggtgtctaacgcagaccgtacagcccagctgggtttagcaaacttccgggagccagttggagcctctccccatccctagcggtgatcccaggtgacgacatgccgcggggggtcctgcggaggccaccctagggcgttgctgctgcctttgggagtgtggagctccaaaccatgtcgcgagaggcggattttgggaggccgggatcctcgcgccagggggatgtgcgagggtgtgggataaatcttaattcctccggcccacccaaagcctggaaatccagcctccgcgcctcttgccctgcgggccccgccctcagtcccgccctcatctaacccgctaccccattggtggcgtccggcggcgcggctgctgttatttttcgaatatataaggaggtggaagtggcagctgcaactagaggcttccctggctggtgcctgagcccggcgtccctcgccccccgccctccccgcatccctctcctccctcgcgcctggccctgtggctcttcctccctccctccttccccccccccccacccctcgcccgctgcctccctcggcccagccagctgtgccggcgtttgttggctgccctgcgcccggccctccagccagccttctgccggccccgccgcgatggaggtgccccagccggagcccgcgccaggctcggctctcagtccagcaggcgtgtgcggtggcgcccagcgtccgggccacctcc

SEQ ID NO: 26067 - DNA, 2300 bp, Homo sapien
ggatcatcagtggctccccattgtcctcaggataaacttaaagccagctgcagtgactcacgcctgtaatcccagcactttgggaggctgaggtgggcagatcacgaagtcaggagttcgagaccagcctggccaatatggtgaaaccccatctctactaaaaatacaaaaattagccaggcatggtggcacacacctgtagtcccagctaactgggaggctgaggcagaagaatttcttgaatctgggaggcagaggttgcagtgagctgatattgcgccactgcactccagcctgggcaacagaatgagattccgtctcaaaaaaaaaagaaaaactcctggcatggccttttgagatttgggccctcgccagcctcattccctcaagaaattgggaaagggccaatctgggagcccaggccaaacccagatctctgaggaaatcctccctgaataccactgcaggtgaccctccccccagccccccacacacaaatgggagctgtgcgatgggagggactcctttatatctgtatatataagatgctgtctttgacacagagtgcacacacatgtcaggcatgattaccactttctgggacagttcatctatgttgtgaagtaggtgatgcaatgattatccaccccgtttttcagatgggaaaatggaggctatttcctatcagaacagaaaaaggggactccagatccccatgctgagtctaaaggacacttgtgctatctctagcttgttctctcaagtttcttatgcccaagagcttggtcttcactcctggttcagagccctctgcaagggcacaataggtgggagttattggggtgtggttttggtcttggggctgggctgtgctcagggagggaagggacctcaagggttcagaagtcccctccacctagcaggcagcgatagaaaggcaaatgtttatttggtgagaggatttgcccagaaaaggggaaacagctgtgcagatccctgagaaagggagatggaggaggggagaggatgggccccgggcgccatcatgctggcatgcctgctccaccctaagtgcttagggagtcttgtgaagccaccctccctcctggtttcacagacgaaagcagcttcagaagctcacagaaggcactcacttgccccagggcacacacaagatgtaagcagagcagctatcccagccttcccaggagtatcccatccccccttacctcccatcttagtcccagagcccccaggcgggtggggctgggcagcctcacttctgctgtgagcgtcctcttcccactccgggatcaggccacgtgatgaggaggaaacatgggctgagtgtctacaatgcccaggctttgtgccaggtgctgatgtccgtggccacatctgtccccattgtaactcaccatcagagtcttagttgcagccatgggacaattagtatgctctagacacttttagatataatgtctcctaagcccacccaacaggtattcagctcattttgtgggagagatgcgggcattggtcaagccaggagacacctcttccccaagaaaaggctctggtgctgacatctctgctgaggaagcaggagcctgggcctgggcctgggaaagggggtgctgtgggcttgcctctcagtttctgactcgggaccccctctgccctggaaagttcagggggatggggcagaggtgtctcatctcccttccccccagcaagagaagctataactttcttcctggatgtgctaaagggaagtggatcaggcaggaaggcagtttaaaatcccaggctgccagccagttttaaaagttgtttagctttggccagggtggggcaggaattccagcctgcaggagttccgagcagccacgtgctgccagctcacatggttagagagctacatgaggctggcgtaagcacagagagccagttgggggaacagtagtgtctggagggaagggggaagaatcttcatccactccattgtctgaattgttcacccggtaacttttgccatgacaattttacaaattaaggttttcttttaaaattgaggaataattgacatttcatcaagggcacagatcttcagcatggagcgtagacccaagggaccaccacaaagctcaagatgtaggacatctccatcaattcaggaggctccctccgggttacccccactccagaggtaactactattttgacctctgtcacagtaatttagttttatctgttcatgagcttcctataaatgaaattatacagtcagtactcttttg

SEQ ID NO: 26068 - DNA, 2300 bp, Homo sapien
aagccctccatgctgtcacctccatctgggtctcccactgtcctctgggagtagtagctcaagccagcctcccacagctgtctcctccacacacctcacatgaggccagccctctagtggtcagaaacttggtgttgactcactgcctgaggagtggacagaggctgggaaactgtgttccagatgccaggtggcccccagcaaccagagccctctccttgctagctctctgctgtaatcagctggcagacaccagccctggctgagagcaatagggactggggaccaggagctgtgccaacatcactccccagcctcgtagctgaggccccacagtctctgggcttgccgcaacacctgcacacacatttacgtgttgtcacatgctttggccaggccctggccacctgcagcttcccttcagtcacctcctaacctatcctgggtcctatggcttaaggggcccagagtgcactttctcagggggtgctggctctaggatccctgcctgggccaccctaccctgttctcctttcttgtcaccaaagagcgtgttcaagccggctccagtcctgtgttgtgcatggccctggggagtggagatggaagccatcagcactattggtgagacctgattcacaggggtgcaaaggccgcagctgaatgccaacgggcagcctgagcaggaaggcttcctcccattttgtctgagtatatatctacaaggtcaattaaaaggacaggaaaggccaggcgtggagactcacgcctgtaatcctagcaatttgtgggggagaagcgggaggatcacttgagcccagagttcaagaccagcctgggcaatacagtgagacgctaactctacaaaaaaatttaaagtagctggatgtgttgcctgcctatagtcccagctacttggggggctgaggtaggagcattgctgatgggagcgggcagcgaggctgcaaaaaaaaaaaaaaaaaaaaaaaaagccgggaaagggaattctaggctgggggaacagtcagtgggggaggctccgaggcacatttgggggacaaggctgaagccattcacatgccaagaggtaaaggaggtgcagcttcatggtcgcggtgggggtggtagtggtggtggtggctggaggaacacatgcaagtcaggcagtgaggcccaggcaggccttgtggggcccccaaacaccaatgggccaagcctccaagttggggcttttacgtaaggctctataggggttagcgccagagtgcccctttcaggtttaaggtataaacctcttccctgttgttttgatggcctccagtcaagaagggggcttgctggtcagccctactaagcgttcgccctgggcgacactctacaaggttttactggggcccaatgaaattgacagatctgccagggacacacactgagagtccagaagcagcgttcgaatcgttctgcgccgaaccgagtgacagcattaaaccgctgcaggaacccacaaattcagaatctgcgcaaaatacacatatttgtatttaaaatccgcgcaaaatacccatgtgcctaaatacacatatttccctccaaagtcataatttccgggggtacagcccaggaatgtacatttgaactggtgccccagtgattctcacgcatgttggctagataagaactcagccgcagcccgtagctgcgcggcccggcctaggtccacccgccgcccgtcccggagcctcctaaggccgcaggcgacgcgccccgccctccggggacaactaggccccggccttttccgcagactccgcgctccgagccgcggcgccccctcgcggccgccggggtcggcagcctggggctccgctgatctagggcaacgagcgggggacgcttcgagcccgcagcgagagtgaccagcatggtccctgccggcagctcggggccggagggttttgactgcaaggccagcccacgccgagggtccaagcatcgggatatgccgccagcacctggctgctgcagcaccgcgctggacatgagcgctccgcccaacccgacggcgtcagctggcgcgcgcgcccgcgaccgacgtgcgcaggcgcccacgggccgcgcagccgccattgctctcctgccacggaggggagcgcttggtggcagtccgcgggcccggacggaaggctgaggcgacgcctcgacgacagcggaccggagctgcaggggcaacacattcagggcggggtgccccatttaggcctggctgaccggagtaagaaactacaacccccgaagtgcct

SEQ ID NO: 26069 - DNA, 2300 bp, Homo sapien
ggtgcatgcctataatcccagctactcgggaggctgaggcaggagaatcgcttgaacctgggaggcagaggttgtggtgagccgagatcacgccattgtactccaacctcaacaacaagagtgaaactctgtctcaaaacaaaacaaacaaaaaaaatagaaatgctctgtgtcaccgagtatgaagccattagctacatgaaaatagcatttgaaatgtggctcatgggccaggtgcagtggctcacgcctgtaatcccagcactttgggaggccaaggtgggtggatcacttgaggtcaggagtttgagacctgcctggcccatatggtgaaacctcgtctctactaaaaatacaaaaattggccgggcgtggtgacatgcgcctgtagtcccagctactcgtgaggctgaggcaggagaatcacttgaacccgggaggcggaggttgcagtgagccgagattgggccactgcactccagcctgggtgaaagagtgagattctgtttcaaaaaaaaaaaaaaaaaaaaaaaagagaaatgtggctcgtgggtctcaggaactggcttctaagtattatttaattttaattaaaatagctacatgtggctagtagccattgtattggataggacagctgtcaaatgtctctcgttttgggtttgcttactgtttccctatgattagtttcagatcatgagcttttgataggaataccataagcatgttgttgtgttcttctttgtctaaatctttataaaagctgttgataggtggcagggaaccacctagtcaggcagtgggattgtttgaatgctctttgaggtccagcaaagacaggagtgatagctgcacttggaagcccgctcctacactttcaatgttcttcctgaaagaattagatatgaagctgctagagctgctccggtggggagcaggcaggattgattcttgaactaatcaacatttatgccctcttggctaaactaggcagagctggttttattacagttcaggtgtgattaagcatactttgtaaatgctgaaggttgtgaaatattcacagggatataaagtacagtaataaaacctcacttgaggctgggcgtagtggctcacgcctgtaatcccagcactttgggaggccgaggtgggaggatcacctgaggtcaggagtttgagaccagcctggccaacatggtgaaactccgtctctactaaaaatacaaaaattagccgggcgcagtggcatgtgcctgtaatctcagctacttgggaggctgaggcaggagaattgcttgaacccaggaggtggaggttgcagtgagccgagatcgcgccattgtactccagcctgggcgacagagcatgactctgtctcaaaaaaaaaaaaaaaaaaaaagaatagaagaccctgtgcctggaagatcgtaggtgctcagtaagtgctggcctctgccccagaaggggaagggcgaggcagatggcaggaactgcgggaggtacctgtcccaggcccttgggcgtaagaggcctctcccacgcagcacccaacccatacccagcctgcccgccagccaaccttggcgtccctgccttgcgcctacctacccagcagtcccccgcccgctcccactcccacaggcccagcgtgcacgtctccaggataggcatccttgcccctgtgacttcagcggcacccaacgtttattgggcactaactgtatgccaggccatgggggtgccggagagaacgacacgaagaccctcacccctcaaagttcccagggggaggaggggctgcttcacttgggaagcgtggggatggaattctcagccccccgatgactccgaggccggccacctgcctggtttctggccggacaccggacttcccctggaagttgctcgagactgcgcgcccccagcaaaaaatcaggtcggttctccgagcccagtctagcgcttcccgacccgcaaaccaaggcccagtgaccgtccccgctgcgcagccgcctgcgtcgccagccaaccacgcgcggccgagtagccccgcccctccacatggccaatggccgcgcgctctgcccgccccgcctcctcgctgcgggaagggtcctgggccccgggcggcggtcgccaggtctcagggccgggggtacccgaggtaagatcgcttcccgggcgttgggtcctttcggctcagcacgcacggacgcctttagggaaggtggctgcagcggcaggacggagtccgccgggacgccctgggtctggggtgcgcggggggcccaggaggg

SEQ ID NO: 26070 - DNA, 2300 bp, Homo sapien
aaggcctcagggcaggtatgtggtgtgtgggcgactccacaagacctgcctcccatcctggcagcccagcctgagaccgttgcattgaggcaggcaggagcggcagggtggctgctctccaggagcccaactgccttgagttcctgccccactgggccccctcccctgctgggcaatcctgggaaggtctggaggttcctgtggacctcagggaagccaggggcagctgtcaggcctgaggaagacctgtggagctcctctccagcctcctctttccctcccctctggtctccattctcttcagctccctacatgggctggggaggagacacctggtgggcagagctcaggcagaggtttggatttcagctccctcacttccggggctgtgtggctttggcagatgtcagacttctggtcttgcttctccacgtggacagtgagtatctggctcattcttcactgggttcttctgagattgaacctacaggtgtttgccaagtgcctggcccagagcaagtggccactgcttctcccatctctctcctgcccaacctggtagagctgagggcatgagaggcagagtgcacagtggtcaagggtgcagctctgcagcacaggcagcctaggcctgcgtcccaacctgcctctcaccagctctgtgaccttgggcaagggatttatctgtctgtcccttagttttctcacctgtaaaaggaggataagtatatatatatatttcccagtgttgtgaagattaaaggagtttatcgatgtaggtcttaggatgagtcctggcatttaccaagggttggatatatgttattatcactattaagtgttgagggtccaggcatgctgggcaacagggaccccatctctacaaaaaagtttaaaaaattagccaggcgtggtggtgcacctgtcgtcttagctacttgggaggctgaggtgggaggatcacttgagcccagaagcttgaagctgcagtgagctaggatcgtgccactgcactccaacctgggtgagagagcgagaccctgtctcaagaaaaagaaaaatgcagagaaacaggagtcttggctactcctttagaggcagactcagaccctcctgcctcacagctttatctttgtatttgccccttactttatcttgtgccttgagaaattgctggggagagaggtatgtccactgggcagctgtacaggatggaggatatagggcgtttccactcccagcagccaggttccctcaccccaagctcacccactgttggggagattatctacaataacaccagaaacacattggggtggattgggggtatccttatgggttcttttcagggaaccattgctggacaaggcacaggagccacctccatttctgagctctgcaagggacaagaactagagccatcaggggctgggctcactgtggccccaccccaagccgtcagcctccagggatctacaccctgccttggctgctacagctttttcactccactgccctaggggagttcagcaacctaatgatctctatctctgaacatctcttcatcccatgctccaagtccagcaacctgcaccctggaaccaggagtggaccctacccgagctgtctgtattaatccccatcccccaccaccaatcttaaaaagccctctgtccccctaccctaaaccccagttaggtacccatgctgggcaggtcagttaacaatttatgcacaggtactagttttattgtattaccgttccagggtagctttgaaaaaagtatctcaaaaaggcaacatgggccgagcgcagtggctcacgcctgtaatcccagcactttgggaggccaaggtgggcagatcgcctgaggtctggagttcaagaccagcctggccaacagggtgaaaccccgtctctacaaaaataagaaaattagccaggtgtagtggcagacgtctgtaatcccagctattcaggaggctgaggcacgagaattccatgaacccaggatgcggaggttgcagtgagccgagattgtgccactgcgctccagcctgggcgacagagtggtattctgtttcaaaaaaaaaaaaaaaggcagtatgtagccccgaagactgttgcccaagtggtagaatgttagcacactaccagcctaggtaaaaaatacaaaaagtaactgggcatggcggcgcccatctatagtcccagctacatgggaggctgaggtgggaagataagtcacttgagcccgccaggaggcggaggttgtagtgagctgagatcgcaccactgc

SEQ ID NO: 26071 - DNA, 2300 bp, Homo sapien
ttttttcttttttttttttgagatggagtcttgctctgtcacccaggctggagtgcagtggcgcgatctcagctcactgcgacctccacctcctgggttcaggccattctcccgcctcagcctccagagtagctgggactacaggcgcctgccaccacgcctggctaatttttttgcacttttagtagagacggggtttcactgtgttagccaggatggtctcgatctcctgaccttgtgatccgcccgcctcggcctcccaaagtgctgggattacaggcgtgagccaccgcgcccagccaaattaaattttttatagagatgaggtcatgctgttatgttgcccaggttggcctcatgagatcttgccttagcctcccaaagtgctgggattacagatgtgagacactgcacccaaaccccaccacttttttttttcctttttctttttttgagacagtcttactccgttgcccaggctggagtgtagtggcatgatctcagctcactgcaacctccgcctcccgggttcaagcaattctcctgcctcagcctcccgagtagctgggattacagaggcctgccaccacacccgactaattttcgtatttttagtagagacggggtttctccatgttggccaggctgttcttgaactcctgacctcaagtgctccacctgcgttggcttcccaaagtgctgggatacaggagtgagccactgcgcctggctgatcccagcacttttcaaatgatgccgctcaaagccgtgacttggcctactttgaacagcaaacttgttgctgctgttgtcaacctgaaggcctctcaaatgccagcttcaagcagggtgtgaattggccagtgtcagatctcaggagtcctgtgttgagagtgtggctttcagctgcggggagctgcacttggtggggaaagccaggcaggtcaccctcacagccagataatgtggaggtcagaacccaaggaagggagtgagacctccactcccagtgggggacctggccacccatccttggggacctgagaaagcgtacttcaccttggggtgaaggctgggtggggccagagggaccagtgccctcctcagtgcttaggggcagagccacctgcagcaatggtatctgcatattagcccctctccaccttctttctcccgctgaatcatttccctcaaagcccaagagctgtcactgcttctttctccctgggaagaatgcgtggactctgcctggtgatagactgaagccagaacagtgccacaccctcgccttaattccttgctaggtgttctcagatttatgagacttcttagtcaaatatgagggaggttggatgtggtggcttgtgcctgtaatcccagcattttgggaagccgaggtgggaggatcccttgaagccaggagtttgagacaagcctgggcaacaaagcaagaccctatctctaaaaaaaaaaaaaaaaaaaaaaaaaaaaaaaaaaaaaaaaaatctaggagatgctctttaccctgcctggcctcaaactattaatagcttcctttgagcaacattatttattatgaactttcaaacacaaaaaagtagagagagtagaataacaaatccccatgagcccatcacccaacttcagtaattatcaattcatggccatcttgttcacccctgcctgcttccctgcttcccctcattctgcagaggttcttttcttttgagacagagtgttgctctgttgcccaggctggagtgcagtggtgcaacttcggctcactgcaacctccgcctcccaggttcaagtgattctcctgcttcagcctctcaagtagctgggattacagatgcccgccaccacacctggctaattttcgtatttttgttagagatggggtttcaccatgttggccaggctggtctcgaactcctgacctcaagtgatccgcccgccttggcctcccaaaatgctgggattacaggtgtgaaccacggtgcctggccactgtacaggttatttatagaagttggagagtgaagggttgagaaagccaaggggcagatgcgggtctggaggattttgtgcctaaggccctctctttgctcccagacagcatgaagtaacaatgaggcatccacctcttggttttgtggcctctgtggatgacgtctctcaccttgaaccagttcagagttggagtagcgcaggatcctgtcttcagaggaggggccgaagcgggttcctctgttgtcaagctctttggaggtgcctggctgctactactgtcccagaga

SEQ ID NO: 26072 - DNA, 2300 bp, Homo sapien
taatcatagatttaccttactctgctccaaggcaatttttcaactttttaaaaaataaatgttttctttcagtataatacccaaaaaagtgcacaaaatgtcttgataacatattacaaagggaacacacccatgtaacccccacccagatcaaagaaacagaatatcattagccatctagaagcccatttggtcatcttcattttctttttttttttttttttgaggcagagtcccactctgttgcccaggctggagtgcagtggtgcaatctcagctcactgcaacctctgcatcccaggttcaagcagttcttctgcctcagcttctggagtaagtgggattacaggcacgcaccactacgcccagctaagttttgtatttttagtagagacagggtttcaccatgttgggccaggctggtctgaaactcctgacctccagtgatccgcccgcctcagcctcccaaagtgcttggattacaggcatgagccactgtgcctggcctaattttttttattttttattttttgtagaagtggtctcgaacttgtggtgtgccttcttatttatttattcatttttttttagagacggagtctcactgtctcccaggctggagtgcagtggcacgatctcggctcactgcaacctccgcctaccggattcaagtgactctcctgcctcagcctcccaagtagctgggattacaggtgcccaccaccacgcccaactaatttttgtgtttgttttttttagtagagacggggtttccctgtgttggccaggctggtctcggactcctgaccttgtgattcgcacgcctcggcctcccaaagtgctgggattacaggagttgagccactgcgcccggccgctttcttttggttatcataaggcgggcagtagctgaacttctcaggagtccaagctctgtcattctttaggctttgtgcttctggataagttacctcatcatccaaatgttactgcaaggactaagtgagatgtagaggcagtgggcaaattgtgtaaaaatactactgtttcaagtgttttgatgttggagttcatcttgccagccaagggatgatgatactttgattcttcaggatgatcagagctcagacttggacggaagctccctcaggtcaaggaggaccacattttttggggggtggagagaggaggcagaaagagaggcaatgtcaggcactgagatttagaagagtagctatagctgtttttggttcttgtagatccgtctgtgttggcttcctacaggagctagaattttcagagctagtcctacagtgaggggagctaacgtggagtgggcgtgagaattctattcagcaagcacaagcgaagctcaacctttttgttcagcctgctacaaccaatcattatgggagaggggaataaggatcactgcccaaggggcattaggatcactgcccagtgggcattacagtctccccagggaggcactcttttttattttttattttttttgagacggagtttcgctcttgttgcacaatgttgggtcactgcagcctccgccacccgggttcaagcaattttcctgcctcagcttcccaagtagctgggattataggcatgggccaccacgccccgctaatacggaggcacttttaattagcccacagtccagtgaaatttgacggagtgaggaagtgacctcagagtacagaacgggatgggatccttccgggcttgggcagcctttggtagtggggatgcttggaagggtcagggtctcagtcctggaggtgaccaatttttctctccaaaagagaaaggaagatgattaaaaaaaaaatccatgctccaaagcggcagccaaatccttctatggcccccaatgcatcacccagaaaggggctccagactctcctgcaaaaggccaactctacttcccggctcccacttcccctccttcgccacaggagggtggcgaaggatttataacccacctctttctttcagttgccatggagacaagccccagtcctttcattccttctggtacctctctctccaacgcaggcggaaaggaggcggcttagcccaaacatgctgggggaggggctggcggcctcgacggcagctgcggaactaggccgagggacaaaggctaaggtcagccgcggttcaagccctttcgtctgccgacgaccagcggccagacgctgcgggagcactgctgggctggaggagggctcgagctgcgaggacggcacggagcagcggggtgggactcggggtcgccccag

SEQ ID NO: 26073 - DNA, 2300 bp, Homo sapien
tgataacatattacaaagggaacacacccatgtaacccccacccagatcaaagaaacagaatatcattagccatctagaagcccatttggtcatcttcattttctttttttttttttttttgaggcagagtcccactctgttgcccaggctggagtgcagtggtgcaatctcagctcactgcaacctctgcatcccaggttcaagcagttcttctgcctcagcttctggagtaagtgggattacaggcacgcaccactacgcccagctaagttttgtatttttagtagagacagggtttcaccatgttgggccaggctggtctgaaactcctgacctccagtgatccgcccgcctcagcctcccaaagtgcttggattacaggcatgagccactgtgcctggcctaattttttttattttttattttttgtagaagtggtctcgaacttgtggtgtgccttcttatttatttattcatttttttttagagacggagtctcactgtctcccaggctggagtgcagtggcacgatctcggctcactgcaacctccgcctaccggattcaagtgactctcctgcctcagcctcccaagtagctgggattacaggtgcccaccaccacgcccaactaatttttgtgtttgttttttttagtagagacggggtttccctgtgttggccaggctggtctcggactcctgaccttgtgattcgcacgcctcggcctcccaaagtgctgggattacaggagttgagccactgcgcccggccgctttcttttggttatcataaggcgggcagtagctgaacttctcaggagtccaagctctgtcattctttaggctttgtgcttctggataagttacctcatcatccaaatgttactgcaaggactaagtgagatgtagaggcagtgggcaaattgtgtaaaaatactactgtttcaagtgttttgatgttggagttcatcttgccagccaagggatgatgatactttgattcttcaggatgatcagagctcagacttggacggaagctccctcaggtcaaggaggaccacattttttggggggtggagagaggaggcagaaagagaggcaatgtcaggcactgagatttagaagagtagctatagctgtttttggttcttgtagatccgtctgtgttggcttcctacaggagctagaattttcagagctagtcctacagtgaggggagctaacgtggagtgggcgtgagaattctattcagcaagcacaagcgaagctcaacctttttgttcagcctgctacaaccaatcattatgggagaggggaataaggatcactgcccaaggggcattaggatcactgcccagtgggcattacagtctccccagggaggcactcttttttattttttattttttttgagacggagtttcgctcttgttgcacaatgttgggtcactgcagcctccgccacccgggttcaagcaattttcctgcctcagcttcccaagtagctgggattataggcatgggccaccacgccccgctaatacggaggcacttttaattagcccacagtccagtgaaatttgacggagtgaggaagtgacctcagagtacagaacgggatgggatccttccgggcttgggcagcctttggtagtggggatgcttggaagggtcagggtctcagtcctggaggtgaccaatttttctctccaaaagagaaaggaagatgattaaaaaaaaaatccatgctccaaagcggcagccaaatccttctatggcccccaatgcatcacccagaaaggggctccagactctcctgcaaaaggccaactctacttcccggctcccacttcccctccttcgccacaggagggtggcgaaggatttataacccacctctttctttcagttgccatggagacaagccccagtcctttcattccttctggtacctctctctccaacgcaggcggaaaggaggcggcttagcccaaacatgctgggggaggggctggcggcctcgacggcagctgcggaactaggccgagggacaaaggctaaggtcagccgcggttcaagccctttcgtctgccgacgaccagcggccagacgctgcgggagcactgctgggctggaggagggctcgagctgcgaggacggcacggagcagcggggtgggactcggggtcgccccaggagagttccgcggcccgggggggcagaggcatgcacaagtggggggcggaaggagggggtggatgaggaggctcgggcccttccacccacgcgtccattgggc

SEQ ID NO: 26074 - DNA, 2300 bp, Homo sapien
agtgcagtggtgcaatctcagctcactgcaacctctgcatcccaggttcaagcagttcttctgcctcagcttctggagtaagtgggattacaggcacgcaccactacgcccagctaagttttgtatttttagtagagacagggtttcaccatgttgggccaggctggtctgaaactcctgacctccagtgatccgcccgcctcagcctcccaaagtgcttggattacaggcatgagccactgtgcctggcctaattttttttattttttattttttgtagaagtggtctcgaacttgtggtgtgccttcttatttatttattcatttttttttagagacggagtctcactgtctcccaggctggagtgcagtggcacgatctcggctcactgcaacctccgcctaccggattcaagtgactctcctgcctcagcctcccaagtagctgggattacaggtgcccaccaccacgcccaactaatttttgtgtttgttttttttagtagagacggggtttccctgtgttggccaggctggtctcggactcctgaccttgtgattcgcacgcctcggcctcccaaagtgctgggattacaggagttgagccactgcgcccggccgctttcttttggttatcataaggcgggcagtagctgaacttctcaggagtccaagctctgtcattctttaggctttgtgcttctggataagttacctcatcatccaaatgttactgcaaggactaagtgagatgtagaggcagtgggcaaattgtgtaaaaatactactgtttcaagtgttttgatgttggagttcatcttgccagccaagggatgatgatactttgattcttcaggatgatcagagctcagacttggacggaagctccctcaggtcaaggaggaccacattttttggggggtggagagaggaggcagaaagagaggcaatgtcaggcactgagatttagaagagtagctatagctgtttttggttcttgtagatccgtctgtgttggcttcctacaggagctagaattttcagagctagtcctacagtgaggggagctaacgtggagtgggcgtgagaattctattcagcaagcacaagcgaagctcaacctttttgttcagcctgctacaaccaatcattatgggagaggggaataaggatcactgcccaaggggcattaggatcactgcccagtgggcattacagtctccccagggaggcactcttttttattttttattttttttgagacggagtttcgctcttgttgcacaatgttgggtcactgcagcctccgccacccgggttcaagcaattttcctgcctcagcttcccaagtagctgggattataggcatgggccaccacgccccgctaatacggaggcacttttaattagcccacagtccagtgaaatttgacggagtgaggaagtgacctcagagtacagaacgggatgggatccttccgggcttgggcagcctttggtagtggggatgcttggaagggtcagggtctcagtcctggaggtgaccaatttttctctccaaaagagaaaggaagatgattaaaaaaaaaatccatgctccaaagcggcagccaaatccttctatggcccccaatgcatcacccagaaaggggctccagactctcctgcaaaaggccaactctacttcccggctcccacttcccctccttcgccacaggagggtggcgaaggatttataacccacctctttctttcagttgccatggagacaagccccagtcctttcattccttctggtacctctctctccaacgcaggcggaaaggaggcggcttagcccaaacatgctgggggaggggctggcggcctcgacggcagctgcggaactaggccgagggacaaaggctaaggtcagccgcggttcaagccctttcgtctgccgacgaccagcggccagacgctgcgggagcactgctgggctggaggagggctcgagctgcgaggacggcacggagcagcggggtgggactcggggtcgccccaggagagttccgcggcccgggggggcagaggcatgcacaagtggggggcggaaggagggggtggatgaggaggctcgggcccttccacccacgcgtccattgggcggcgccgccatcactctcttctgggctacaccgccttctcttcctccgcggaacccggatcccctcctccaccaccctctccccgccccgtcacgatagcctctcattggacggaggcacggtcaatcctcctcgagttagggagccgactgg

SEQ ID NO: 26075 - DNA, 2300 bp, Homo sapien
ttctggataagttacctcatcatccaaatgttactgcaaggactaagtgagatgtagaggcagtgggcaaattgtgtaaaaatactactgtttcaagtgttttgatgttggagttcatcttgccagccaagggatgatgatactttgattcttcaggatgatcagagctcagacttggacggaagctccctcaggtcaaggaggaccacattttttggggggtggagagaggaggcagaaagagaggcaatgtcaggcactgagatttagaagagtagctatagctgtttttggttcttgtagatccgtctgtgttggcttcctacaggagctagaattttcagagctagtcctacagtgaggggagctaacgtggagtgggcgtgagaattctattcagcaagcacaagcgaagctcaacctttttgttcagcctgctacaaccaatcattatgggagaggggaataaggatcactgcccaaggggcattaggatcactgcccagtgggcattacagtctccccagggaggcactcttttttattttttattttttttgagacggagtttcgctcttgttgcacaatgttgggtcactgcagcctccgccacccgggttcaagcaattttcctgcctcagcttcccaagtagctgggattataggcatgggccaccacgccccgctaatacggaggcacttttaattagcccacagtccagtgaaatttgacggagtgaggaagtgacctcagagtacagaacgggatgggatccttccgggcttgggcagcctttggtagtggggatgcttggaagggtcagggtctcagtcctggaggtgaccaatttttctctccaaaagagaaaggaagatgattaaaaaaaaaatccatgctccaaagcggcagccaaatccttctatggcccccaatgcatcacccagaaaggggctccagactctcctgcaaaaggccaactctacttcccggctcccacttcccctccttcgccacaggagggtggcgaaggatttataacccacctctttctttcagttgccatggagacaagccccagtcctttcattccttctggtacctctctctccaacgcaggcggaaaggaggcggcttagcccaaacatgctgggggaggggctggcggcctcgacggcagctgcggaactaggccgagggacaaaggctaaggtcagccgcggttcaagccctttcgtctgccgacgaccagcggccagacgctgcgggagcactgctgggctggaggagggctcgagctgcgaggacggcacggagcagcggggtgggactcggggtcgccccaggagagttccgcggcccgggggggcagaggcatgcacaagtggggggcggaaggagggggtggatgaggaggctcgggcccttccacccacgcgtccattgggcggcgccgccatcactctcttctgggctacaccgccttctcttcctccgcggaacccggatcccctcctccaccaccctctccccgccccgtcacgatagcctctcattggacggaggcacggtcaatcctcctcgagttagggagccgactggacgcgaggcctttgggccgtccccagcctcgtcggattggcttcctgcgcgttggcgcaacggaagaggcggccggccgagggcgcgcctctgctctggctggactgccgcggaggaggcgagaaggaatccgacgctggggggcttgctcgggcggcagcgactgctgctgcggatgggagggggccggctcggcgcgcccatggagcgccacggcagggcttccgccacctccgtctcgtcggctggggagcaggcggccggggaccccgaagggcggcggcaggagccactgcggcgccgggcgagcagcgcgtcggtgcccgcggtcggggcctcggctgagggcacgaggcgggatcgactgggctcttacagcggccccacctcggtctcccgccagcgcgtcgaaagcctgaggaaaaagcggccgcgtaagtgttccgtggggcgccctcccggcccgccctgcccccccttccggcccaccctgtccccttccggccccgccgccgtttttcccgcgcgcggacactgtccccgcacggtggtccctcgttggtgcgtggcctgacatccggctggaggcctcgggtgctccgaaagcggtaccttcgggggcccccccgcacccattggtatgcacttcccgcttgttggagtggagggcttttccccaggacctgtcctcccttttctt

SEQ ID NO: 26076 - DNA, 2300 bp, Homo sapien
tgcaggaggttgaagcaggaggatggcttgagcccaggaggttaaggccacaatgagccatgatcatgccactgcacttcagcctgggcaacagaacaagacgctgtctcaaagtaaaaaacaaaaaacaaaccaaaaaaacccttgtggctaatggctatactcttatttgctgaatctttggaatttacatccatttccaacgatgtaatacaaaaccatgaaggatctcatattttgcattgcttcaaactcaggtgcttctcaaataaaacaaaactaggtgactgactctgaaaatggcacaggttaagaatctgttttccaaatctgttgcaagaagatggaaaaagacaaaagaactgaaaactcccaaacttttcacagcaaaatagaactacatttaatcatccatatcagagaagattcaaaaaagcagttgggtgactgggctaaggtagaagactattcaataaaaatctcacatcttgccattttccctccctctcacaatctgcatttaaacaagtcaatttcctgaaataggaatctggcaacacccaccaaaaagtccaaccatatgtaaaatggcatcacactgtaaagctcatattacagtatcaggacaattgatactttcaacagcagcaatggctgccaggcagcggtcctgaattgaagacttgtaaaggggagaaaatacacaacacagaaaaagaaacctaataaaatggggaaacggattctctgggaggagcgtatgcaactcccaaggcaaaattcagaaagatgttgtttcccctcaaaacaaagagccttaatgcccagaatgccacagttctgaatcgtgagtacctgcaaatagacagaaggaaaacggaggggatatgtgggtgagagatgacctggattctcacgagaagaagggcagccaccttagaggtgcacggaatacagtttcaggcctggtgcaactcaaggggcagttcaccattttccagtaagcccgaaattgacgaataaaagggacttaaagtattagagagcagctctttggaaacccacggaaaacaaacattggggattcaaaggatttgggaggaaaggaggtggaaatgagtcaaaagaagccttctcgaggataaaatcatgtgaccctcaggaagagaatgcccaaggagctaagaaaagggaggacaggtcctggggaaaagccctccactccaacaagcgggaagtgcataccaatgggtgcgggggggcccccgaaggtaccgctttcggagcacccgaggcctccagccggatgtcaggccacgcaccaacgagggaccaccgtgcggggacagtgtccgcgcgcgggaaaaacggcggcggggccggaaggggacagggtgggccggaagggggggcagggcgggccgggagggcgccccacggaacacttacgcggccgctttttcctcaggctttcgacgcgctggcgggagaccgaggtggggccgctgtaagagcccagtcgatcccgcctcgtgccctcagccgaggccccgaccgcgggcaccgacgcgctgctcgcccggcgccgcagtggctcctgccgccgcccttcggggtccccggccgcctgctccccagccgacgagacggaggtggcggaagccctgccgtggcgctccatgggcgcgccgagccggccccctcccatccgcagcagcagtcgctgccgcccgagcaagccccccagcgtcggattccttctcgcctcctccgcggcagtccagccagagcagaggcgcgccctcggccggccgcctcttccgttgcgccaacgcgcaggaagccaatccgacgaggctggggacggcccaaaggcctcgcgtccagtcggctccctaactcgaggaggattgaccgtgcctccgtccaatgagaggctatcgtgacggggcggggagagggtggtggaggaggggatccgggttccgcggaggaagagaaggcggtgtagcccagaagagagtgatggcggcgccgcccaatggacgcgtgggtggaagggcccgagcctcctcatccaccccctccttccgccccccacttgtgcatgcctctgcccccccgggccgcggaactctcctggggcgaccccgagtcccaccccgctgctccgtgccgtcctcgcagctcgagccctcctccagcccagcagtgctcccgcagcgtctggccgctggtcgtcggcagacgaaagggcttgaaccgcggctgaccttagcctttgtccctcggcctagttc

SEQ ID NO: 26077 - DNA, 2300 bp, Homo sapien
ctggtcaaaagtggtgttttcaggctcagggctggtctgagatgggtgactgcagagccctcctctcccagaatgctttctgatgtgttctgtgctgcacacttaactggagtctcgccaccatgtctggcccctggggaatgctgccaggcgctctatcttgctttcattgagtgaacactggagaacattgtgagcaagaccttgaggctaggtcctttcagggtggatggtgggggtaggccggagaactgacaaatgaataagccaagatcctgaccgtcagggtgcaatacagattgaaaatgtcttcagtgactgactgtttttctgttgctaaatgagagaatattagtctgaaagagattctgcctttttgttttgttttgttttcttgagatggagttttgttcttgttcccaggctggaatgcaatggctcaacacaacctccacctctcgggttcaagcgattctcctgcttcagcctcccaagtagctgggattacaggcatgtgccaccacgcccggctaattttgtatttttagtagagacagggtttctccatgttggtcaggctggtctcgaactcctgatctcaggtgatctgcctgcttcagcctcccaaagtgctgggattacaggggtgagtcaccttgcccggcccagattctgcctgttattctgcatgtcttttagtagagatggggtttcaccatgttgtccaggctggtctggaacacctgacctcaagtgatctgcctgcctcggcctcccaaagtgttggaattacaggtgtgagccaccgttcctggcctcaactttttgactaacatgccttggagttcttcccacttcagaacataaagatcctcttcatttttgttttgttttgagacggagtctcgccctgtcacctaggttggagtgcagtggtgccatctcagctcactgcaacctctgcctcctgggttcaagagattctcctgcctcagcctcccgagtagctgggtttacaggcgtgcaccaccatacccagctaatttttttttttatctttagtagagactgggtttcaccatgttggccaggctgatcttgaactcctgaccttgtgatccacctgtctcagcctcccaaagtgctgggattataggcgtgagccaccgtgcccggccgatcctcttcatttttagttgctatacagtgctccataatacgaataataatttagtcattcctttattatttaaatggaattaattgattatgaaacagttcaaattttgactgctaaaattcccctccctcccaagaggctgtagctagtttagatagtgaaaaaaatcttaccttctaactggatactttcagccttttggcttcagtttgttaaataatgtgtggcctcttttgatactgctccaaagccttgagatggtcctctgtcacagtccttgtggctcccaccctgtgtcacaaggtggtttctgatagtgctgtggcctgagcttggtatcagccccattgtccctgtaagcagagatctgaatttctgtttgaaggttgataaatgctgtggttttttttttttgttttttttgttttttttttggtcacacttattcagctgctgcagtagtttctatgtagagtgtatttgggtctgtagtagcaggagtctgtctcagcactgtgtccctaggtttgctcctaaatctgttctgtaaagcatgcacaaataatacacatctgtgagtgcactttcatggttgtttcacgtagtggggatgccttattgaatggaatttttgtttctgttggcttattaaaaagtctgagtacattcttatttcattacagataggtgatcttcagctttgcaaactggatgaactagattgcttgatcaaaggaattttatacattgactcagtcggattcaatggacggtcacagtgctattactttgaaaaccctgctgattctgaaaagtgtcagaagttaccatttgatttgaaaaatccgtatcctctgcttctggtgaacattggctcaggggttagcatcttagcagtatattccaaagataattacaaacgggtcacaggtactaggtaagttgtatataaaactcactgtttattcttagtatcctaacgggctgagttttcaggtattacatgtaactacaccttcaagaacctgttaggtgaaagtgtttctggattatgcaaacaaatgtttctctttgaaaattctgattttatgacctagttttctttaatctctactgttca

SEQ ID NO: 26078 - DNA, 2300 bp, Homo sapien
aattctgaagctggtgatccacttggaattgtagatagtttcaggaagctcctgcagggctgtccaccgttggtgtgtgcctcagtatttggacttccgaaactgaaagtgaaagtgtctttataggagagaaacgcatgctgctctttggctctttctgtccaacttttctagaaatgactcaaagtccattaagatttgtgaatattgtataaattagctatggaaagtagcaggtcagatggaaaattcttttccacagccctgctctccgcctccctccatcttaggagcgcctgcctcaattcctcgtcaactgctttgctccactccatcccacaggtgtgagtgggggaagtttttcattaggaatacagtctgcgtgacatggagaatggatggagggagctttgctactctgctcttggcatgactccaggatttttttctggaatccaacctctgtcctcttaggagaaggaacctgtccttggttcagatggctgggcatgaggaggaaaatttccattagtgtagaacagtgctggacagaatccggtttggaaaattacaaatccagttggtcaaaataggccatttcctatgtgtgacctattcgtggtatgccaactggactgcttcctaaacaggacgaggaaagtgaggaatatttttatatgaaagccttagcctgtctggcacccatgaaaaaaactatttatgcactcctactttcaccgtctttttgcattctctatttgtagcacaacagagttgaatgccacaaaacaccccgtttatagtgagctgttttcagtgaccaatatcagaaggaggcttgcttctggactagcctcactaattgccagcagccaccattttccatggaatggccttgggacagatgtcacctctgttatggggctctaataggaaagagaatgttttttcccttcctatgatcaatactgcaaattattgctgctcacagcttttataggattctcccaactgaaagttgcaggctttttctgtccctgtgcatcagtactaacaaaagacagcctcaccaagtctgtatatttgaacagaggcaagttaattcatccccccgtgtcagagccacaggcatgttgagggggttgatacgtagcactggaccagggcgcaaagcccagatagttccagccatgagaggagagcacaagaatgctctgcactctgcactcagcaccaccttgggtctgctttgcccagatgagggaccactaacaaccttctcagcacatgtgaatgtggactggttttaaaatgcattcattctgctaggattgggctggaagctggaacagtgagagtactttttctgctcctagtcatctccctttctcagcgtgacatcctcctgcagcaagcctagtatcactagcagtagttcctgcgactcttagcaacacaacccgaatatttgctccctgcatctgggtcctccaccaggatgggcctgcgcatctgcattgctgtacagacaaacaggccttttaatttacatcctcctttaattctcattaaaatcgcagggtttttgtttgaaagacagtcctttttttatttattttgaaaaaggaatgagttagggacccctttataactctcttggctcagactcgaaccccatggtaaagtcaccctttccgcatctatcttcaggagttgctgggacttgttactgtgtagctgcgtggggattctggtctgctcttggaccactggctggtatcctttgtgtgtttcttaagcagctcaaagatagaatgttgctggtctgctatgggttagtggagcataactcagccccaactggactccacgggtggctgaaccattagtagttgctaggggtacaactgaattcaactgccttcagaaacagggaacaaaaccagcctgacttgattcctggttgggtcagtatcagacactaggaagttgacatctgctgcttttctttgccacgtgtgatttggttaggcctgtccctggcagataaggtccttgaagcctatgcttgcctagccagggaaggcaggacagaaatggccaaataggggcaggtggcccctgggaaggtctgagctgagggatacaggggacctcccaccattgccggataccctgttcttgacaagaagatccttttccccagtgccaagccccttggatccatcagagaaatagcctcgggccttgtcctttttcacaaccccacttcaaaatcatgtcatctccctggcctgatc

SEQ ID NO: 26079 - DNA, 2300 bp, Homo sapien
cttctgcaacagcccaggggagagatgagggggctgatttagaacagtgagaggtttgagcaaagcaaagttgaaaagaccctccaggtaactgctatgattgacagcaaggagggcagtgttcccccagcacagccctggcacaggcagctctagaggaagcctgggtctcccactcccttccttttgccacagtctccctagcacatgcctccacccttctctcactttgggggactgtgaccattgggtggcaggtgacttcttgagaaattcactaatgtttccctctttacttcctccctgccttggtggttaatggtttgccaaagcagaaggaacatgcctctaggcgcttgccatgatgacttttgcttcccaaagttaagctactgagctgtttatggtttatgtgatggggcctgagagattaggagaaggaaggagaacttctgggggacacatggagactgaggaagagggggcaatcatttttgcaagctctgagctgcagcgcacacacagtcagctgtggagcttcacagccattccctctgcaggctcctagcctctccagaaacttccgtaccccaggagtggcagacacaaggcgatgggaacaagagagtatctgcagaatacactgcctgctaaagacaagagaggactccccagatccttgccttggtattgcaggaagagctcagcctcccaaaatcggaggtcaatttattgcctgccctgtagaatgggagccggaggttgaggagtggatgtaaataaaggaatgcactgtttcttgcacacacctctctccactatctgggcagagtctaggtctcatccatcaccaaggttctagcactcagctgagaggctgcagcaggaggggcagatggaggagggtgcggtgcataccatctccccatcaaaccaatgggcaccacgtgaccattcttgtgtctctggggactgtcaatctgcatgctaggaaaggggtggcattccaatctttcatttttttgtgtgtgagacggagtcttgctctgtcacccaggctggagtgcaatggtgcgatcttggctcactgcaacctccgctccccgggttcaagagattttcctgccttagcctcccgagtagctgggattacaggcatgagccaccacacccagctaattttgtatttttagtagagacagagtttctctatgttggtcaggctggtctggaactcctgacctcaggtgatccacccgccttggcctcccaaagtgttgggattacaggcgtgagccactgcgcccggccccatgctttcacttttaaaaatgcttgtagggcacgcaaaaatactaaacggtcgatggagaaggtctgtctggagtagttgttttttttttttttttttgagacagagtctcgctctgtcgcccaggctggtgtgcagtggcacgatctcggctcactgcaagctccgcctcccaggttcaggcgattctcctgcctcagcctcccaagtagctgggactacaggcgcccgccaccacacccggctaatttaattttttgtatttttagtagagacggggtttcatcgcgttagccaagatggtctcgatctcctgacctcgtgatctgcccgcctcagcctcccaaagtgctgggattacaggcgtgagccacctcgcccggcctgtctggcgtagttctaaccaggaacagagccagcggccagggccgcaccaggcctggccagggagcgccgcgcctgcgcactgcagactctgaagccgccgagccctccgccgaggtgggtggggaaactgcccgggcatccgggtccctcaccccgcccccgctgcatgaatgagaggcgcggcgcccgcccctcccccggcgggcccgcccctcgcgaggggccgccgggcgcagtcagccgccgccacctccgccgcgctctgtccggacggacgctcgccgcccgcagcctgccgcccgccgcagggcgctgacggtcccgcacgtctgccgctgccaccggcgcgcccgagtaagtgagcgagcgagggcgggagcgccgcggccgccgcccccgggctggggtttgggggaccgagccgctccgggttcgggatgctgaggagaccgcgggcccgcgccagcctcccacacacacacactctcccggcgcctcggccggccgggcgcggtgtgcaggggtgaggcggtgtctccaggctgaggagggacgcggaggagggtccggcgcggccccgggactggagggtgagtccctc

SEQ ID NO: 26080 - DNA, 2300 bp, Homo sapien
gggaacagcaggaaacagcagtcaccttggtgactactgaggtgaaacaccatggtgctgttctgtaaatggctggaaaataaggctcaaggagccagatggggcagggaaaaagaaaaagacagaaacacaggcagatttgaataccatgagaatcgatttgcatgagaatggattgagacttctgcaacagcccaggggagagatgagggggctgatttagaacagtgagaggtttgagcaaagcaaagttgaaaagaccctccaggtaactgctatgattgacagcaaggagggcagtgttcccccagcacagccctggcacaggcagctctagaggaagcctgggtctcccactcccttccttttgccacagtctccctagcacatgcctccacccttctctcactttgggggactgtgaccattgggtggcaggtgacttcttgagaaattcactaatgtttccctctttacttcctccctgccttggtggttaatggtttgccaaagcagaaggaacatgcctctaggcgcttgccatgatgacttttgcttcccaaagttaagctactgagctgtttatggtttatgtgatggggcctgagagattaggagaaggaaggagaacttctgggggacacatggagactgaggaagagggggcaatcatttttgcaagctctgagctgcagcgcacacacagtcagctgtggagcttcacagccattccctctgcaggctcctagcctctccagaaacttccgtaccccaggagtggcagacacaaggcgatgggaacaagagagtatctgcagaatacactgcctgctaaagacaagagaggactccccagatccttgccttggtattgcaggaagagctcagcctcccaaaatcggaggtcaatttattgcctgccctgtagaatgggagccggaggttgaggagtggatgtaaataaaggaatgcactgtttcttgcacacacctctctccactatctgggcagagtctaggtctcatccatcaccaaggttctagcactcagctgagaggctgcagcaggaggggcagatggaggagggtgcggtgcataccatctccccatcaaaccaatgggcaccacgtgaccattcttgtgtctctggggactgtcaatctgcatgctaggaaaggggtggcattccaatctttcatttttttgtgtgtgagacggagtcttgctctgtcacccaggctggagtgcaatggtgcgatcttggctcactgcaacctccgctccccgggttcaagagattttcctgccttagcctcccgagtagctgggattacaggcatgagccaccacacccagctaattttgtatttttagtagagacagagtttctctatgttggtcaggctggtctggaactcctgacctcaggtgatccacccgccttggcctcccaaagtgttgggattacaggcgtgagccactgcgcccggccccatgctttcacttttaaaaatgcttgtagggcacgcaaaaatactaaacggtcgatggagaaggtctgtctggagtagttgttttttttttttttttttgagacagagtctcgctctgtcgcccaggctggtgtgcagtggcacgatctcggctcactgcaagctccgcctcccaggttcaggcgattctcctgcctcagcctcccaagtagctgggactacaggcgcccgccaccacacccggctaatttaattttttgtatttttagtagagacggggtttcatcgcgttagccaagatggtctcgatctcctgacctcgtgatctgcccgcctcagcctcccaaagtgctgggattacaggcgtgagccacctcgcccggcctgtctggcgtagttctaaccaggaacagagccagcggccagggccgcaccaggcctggccagggagcgccgcgcctgcgcactgcagactctgaagccgccgagccctccgccgaggtgggtggggaaactgcccgggcatccgggtccctcaccccgcccccgctgcatgaatgagaggcgcggcgcccgcccctcccccggcgggcccgcccctcgcgaggggccgccgggcgcagtcagccgccgccacctccgccgcgctctgtccggacggacgctcgccgcccgcagcctgccgcccgccgcagggcgctgacggtcccgcacgtctgccgctgccaccggcgcgcccgagtaagtgagcgagcgagggcgggagcgccgcggccgccgcccccgggctggggtttgggggaccga

SEQ ID NO: 26081 - DNA, 2300 bp, Homo sapien
tttttgatcatttgttattacaagtaactccacagtgaaatatcttactgttttggatttgtggaggtgtaatttcagagtagattccaagaagtgggattgctgggtcaaaagcatttgtaacttcttaggaaagctctttttaagccttgatctgatcctgtgacggtgacttcctgtggccacagttatgacctcagattcccatcctgcctgactttgaccttggctccaagcagtgttcttcactgaagcgagcgtgcacaatcaaccctgtctaacaaggctatttccctccatgcgatgttcttctggactgcttcacccatccagatcagccagattccgagtcaattgcaagcctcatctccttcatggagccttccctaaaattatcaaataatgttctgttttgttatttaatgtttcactcaacatttcctgagtagaacaactcagggaccacgacccattgctgctctccaggagcctacactgtggtgagcgctgcaggaggcacaaggacatggtgctcacggaagaagaggagaggtccttcccaaggctgtggggggcacaagaaggcatttcagagaggcagttagggtgtgagctgagacctgaagcctacatgggagggtgcagagcaagggcagatcagggttggtggaagatgcctcagaattaggttttcttcttcttcctcttcttcttcttcctctttttcttcttcttcttcttcttcctcttcttcctattctccttcttcttcttcttcttcttcttcttcttcttcttcttcttcttcttcttcttcttcttcttcttcctcttcttcctcttcttcctcttcttcctcttcttcctcttcttcctcttcttcttcttcttcttcttcttcttcttcttcttcttcttcttcttcttcttcttttcttcctcttcttcttcttcttctttttgagacagagtcttgctcttattacccaggctggagtggaatggcgtgatttgcaacctctgcctcccggtttcaagcgattctcctgccttagcctctctagtagcttggattacaggcacctgcctccacacccagctaatttttgtatttttagcagagatggggtttcaccatgttggccaggctggtatcaaactcctgacctcaggtgatccacccgcctcagcctcccaaagtgctgggattacaggcagagtgaccgcagctggccataattagattctcatattagacaaatttctctgcccttgtgctcataaatattgtttaaatgaatgaagcactgaatggagaatgggttggagaagggcagaactgaaggtccaaggaccatgtagaagctattgcagtcacctaggagatcactgcagcttacattttttattcttatttttattttttggagacagagttttgctcttgtcgcccaggctggggtgcaatggcacgatcttggcttcatgcaacctctgcctcctgggttcaagggattctcctgcctcagcctaccgagtagctgggattgcagacatgtgcccccatacctggctaatttttgtattatcagtacagatggggtttcaccatgttggccaggctggtctcgaagtcctgacctcaggtgatccacccacctcagccttccaaagtgctgggattacaggcgtgagccacctctccctggctgctgcagctgaaatttgagtagatgaatttgagggtttggcttttgaccagataggggagtgtgagcagggagataaaaccgggtaaaacatccaacttctgacttgagcaactggattgatgtgagtgccttcagtgagtcagataattttaaaaaagaaatatgggattttatgggtggggaaatgggcttccttttacacacatttttgtttgacgtgcttgaggttcacccaagcagagacaatagtcaggagtttttataaaaggtcaggggactcatctagtctgaagatagaaatctgtgggtgattaacatatggatggcaaatgaggccacatctaggaagagagtgtggcttgagagtagtggtctgagctccaaacccggaggaatggtcacatttatgagttaactggaagaaagagacagagaaggagtgtcaagagaggtgaaagccaagagcaggtgccaaagaaagcgagtacacttctaaggaaggaggaaatggtcagtgagtcaaaatattcccaagagggtaagtgagatgaggccgtacaaaggtccaccgaggaagctattaaagaa

SEQ ID NO: 26082 - DNA, 2300 bp, Homo sapien
ccaggtgtagtggcgggcgcctgtaatcccagctactcgggaggtggaggcaggagaatcgcttgaacccgggaggcagaagttgcagtgagccgagatagcaccatttcactccaggccaggcgacagtgcaagactccatctaaaaaaaaaaaaaaaaagtgtgtctcacaattgatgaaattgatcaaattagatgaaatatgatataagtttaaaccaaagaagccgattaaatggatacatacttaatttatctgttgttgcctctggcagtagggatccaaaggagactacaatttgacttgtagtgtttcatttcttgtatttatttgcttttttgattttattgattttttttttttgagaccgagtcttgctctgtcacccaggctggagtgcagtggtgcaatcatagctcactgtagccttgaaatcttggcctcaaacgatcctcctgcctcggcctcccaaagctctgagattacaggtatgaaccactgtgcctgtctacaaaaaaagaatgacaaggcaaatgacatataatgttcacaataatcatatctgagaagcaggagcatggtgtttgtctttcttggttatttttattttattttctgtatttacaaattttaaggaacaaaacagaaatgcctgaaaaaataatactgaagagactgagtgtggtggctcacacctgtaatcctagcactttgggaggcaggaggatcgcttgagcccaggagttcaagaccagtgtgggcaacatagcaagaccctgtctcattaaaaaaggaaaaaataataataatactgaagaacaacagctcagaaaccttcttggagcagcctgccaatcaccaattctatttgctggggagtattcttaggcaattgaagaatgatagaacttgagggaggaaaagacaggcaggcagacacaaaggacaaatatcgtgtgagtctgcgtatgtgaggtgcccaccatagattcatagagacagaaagcagaatagtggtcaccaggggctggaggtggggcaggggggtgtcattgtgtaaagagcacagaatttgagcttgggttagtgaaagagttctggaaatggatagtggtaatggacacacgaattgtgaatacactgcatgccactgaactacacacttaaaaatggttaacatgagctgggcgcagtggctcatgcctgtaatcccagtgttttgggagggagcttgaggccaagagtttgagaccagcctgggcaatatggggagaccctatctctacaaaaataaataaatgaataaacaaataaataaataaagccaggtatggtggcacacacctgtagtcccagctattcaggaggctgagacaggaggatggcttgagcccaggcaggaggatggctatgattgtgccagtgcaccccagcctgggcaacagagcgagaccctgtctcacgaaagattaaaatgataaatgttgtgctttgtatcttttactacatgcacacacacacatgttgggcagaagaaatcaagaattttattttggccatgttaagtttgaggtgctcaggaggtagtttgataaaaatccaagctctagcgagtgaccagggctctagacgtagattcagcagacaccacgttgaagccatggggctagcgagagtgtggggaaggggaggcagtcaggaccaagaggggccctcccacattcagaggagcattgtcccgtgaggcaggaggaaaaccgggagagtgtagggtccgagacgtctacagcagaaagccttcccagagggaggcagcggtcagtggactggatgtttctgagagattgagcgaggtggggaccatcggatttggccacgtgggaggtgctggaaaaggaagctggcctgcagtgggctgggaaggaaggagctggggatgggaaggacccacaagccttgaagaaggtttgctgtgaatatcacggaggaggggcgtggtcgctggaggcagataaggaggttagggtaaccttgttttgtttagatgagagcggctggaaaatgtgtgtatttttatgggaacagtccatgagacagggagagatggaagaaacaggagaggagggagaactgaaggaggaggggcacagtggagtgaatggcttttgctaggagcaggatgcctcccgtgtctcagaagggacagcagggtgggacagacagcccctaggacagggttgagtgatttccccagcagcgctctctctctgagagctctctggggtgtgtgcagagagc

SEQ ID NO: 26083 - DNA, 2300 bp, Homo sapien
gggtttaatcccagctacttgggaggctgaggcaggaggatcacttgaacccaggaggcggaggttgcagtgagccgagatcgcatcactgtattccagcctgggcaacagagcaagattctgactcaaaaaaaaaaaaaccgttgttttaaaccactatatttggggcagcttgttatgtagcaatgggcaactgagacgtgcatcttcagttcagtggggcaagtactccagcatctctgccactgttgcccttagtgcctccagtgccatccttccaccctcctcccggtggattctgggtgactcctgcctcctcacatggcttgcttctcttcttttttatttttattttttaaagatacattctgtttgatgttcccagcattgctcacttccatacactaattttcagtggtgcatcttgttggcagggcctggctgctgccagcgcttcagctgcaaaggagactgggaaagagtgtttctggctttggcatgtggggaggggttggggattcatgacatggaaaggtcccctaacatagaaagatgttcaaaaggtactggcactcctgaaatgtaatgaaggtcttcaaccatggccaatactttttgggaacttaatgtgttcttggcacacagctctgggtccgttcaccttctaaagataaacagggccctgaaatcacctttcctcactctccaccacatgaattaggatgaattgactctagggatgggtgtgtgactcagactcaactaatctgaatatcagaacctcagtgattagtttggaatgatatgtgaaccagtccaaggcaactaggtgtcaccttggctttttgctgaaataaatgaggacttgggctgtgagggtggagcctagagctgctggaagccaacttcctactgcaaagaacagagatgaaagataggggaaggaagaccaaatcctgatgtattttgtgcttcttggtacctgaatcagtcagaccaccttttatgtcagcatataaattacctgtctgcttacaccaagccaatttgcatagtttcccatcatttgtaatccatcaagtccatattaatatttttatttaataaacttttttttttttaatttttttgagatggtgtcttgctctgtcacccaggctagagtgcagtggtgtgatcttggctcactgcaacctccgcctcccgggttcaagcgattctcctatttcagcctcccgagtagctggggctacaggcgcccgccaccacgcccagctaatttctgtatttttagtagaaacgggtttcaccatattggtcaggctggtcttgaactcctgacctcaggtgatccacccgcctcggcctcccaaagtgtggggattacaggcatgagccaccgcgcccggccttatttaataaactctttggagtaggtactatttattaaccctgttttacaaatgaagaaactgaagcaaagagattaagcttacctaaggctacttaggggcagaattcaaatccaggagatataattctgagagctaacaaatattctgctctccttggtgacccaggaggattcacagaggaggttgtgacatgtagactaacatttaaccccaagagggcatagggatttgtggggaggggtgaggagaagaggcttccaggggatggaatagcttgggcaatgacaaggctttttctgctgagaggaaacctcacctgaaattcacttgtcccagtcctgaagcctgtccccaagcggttccctcttggaggggagcatcaaaccccatttctccagggccacctctaccctcctggcttctggacctctgccgccgccctgtgctacacgccggggcctgtcccgctgtgggtcccctgcgggaggggggcccctgctagggagggagggggtgcgggcccagatgtgggcgtgggacccgggtttccgaggcagggatccagcagtctccggcttcaggggcttctagcttcccggctcccggcggggcgggcccggggaggagctcggcgggtccccgcccagaggcggagcggagggccgggccggagcggggtgggtaggggacgcgaggcggagcggggccccacacaggccgcggcggctggctcgggcccctacggtcccggcggcggctggaggaggaagccaggcggctggcggaggaggagagacggaggaggccgagaccggagcgccgctcgccgcagacttacttccccggctcagcagggaaaggtacggtgcgcccgctctccggccc

SEQ ID NO: 26084 - DNA, 2300 bp, Homo sapien
ttcttgagataacagacaacagaatttcctggggtgagatgcctgtgctttgggggtaggctgggggtcaggtgacagtgcagaaccagtacgagggactcacatttcaagggtgtctgttgcttcaggaaacagtaacggagcaggccttgctggtggttcgagcaacacccaccccgaaatcacacaaggccgtgcatactaagagaacccagaaccagcttctctgatgtgtatgcgggaggctgtttcctgcaggccttcaggtgggcggggctggggaggctccagacttttggtgaagttgggggtctgtgtgtatgttttggcggggagttgtgattgagaactgaagctagaaaggccagctgggtccagagggcaaggctgacatgcagagatcttccccaggcctgctacatagtaggtgctcagtgaattgctaaattatattccctggccagcgagatgcccagctgtgcttatccttggagggtggggctgggagattgagacccgcatgggtgaggctcacatagaggaggcggggtgggggggtgcttctggcgcagttgggggtggaggtgacatgattcaggctgtggagttgccatggcttgacccgatgtatgaggagggtctcccactaagggtgactccagatttgagcctagggactgcttggtggtcctgtaatttgccctcaatgaggaaagtgccaggagttgggtggtgcctcctgtttagttctgggcatttccaggcggggcttggcagggtcagacgttggagaccaggactaacgcgtgtctctctagtatttggccattagaaggtacttgctggagtgtaaatttcttcacttttttttttctgagacagggtctcactctgttgcccaggctggagcaccatggtgccatctcagctcactgcaactagagcgtaaatttctgagggtgtcaaaatgaaattggggaggatgttccagggatgggatgaagaagtggcagttcacacaaactttggtggctcgtgcccactctggtcacctgacctctgagtctttattctattcatccgtctttggcaaccctgccacaggacggggtttttcctccctcttttcctctctccataccctgctgccttcctgtgtccaatgtggcctcttgggacacttcagtcagggtggtggtggctctggacagctgggggaggcggtggcctgcaggctggagaactggctgcgtggtatcttggatgaaattgccaggggaccggggggtgcactcatgccctggctggcctgatttcttggcactcctaggcattgcctgcttggggacatggagaataacctcaaggcgtgggtgcaggcgctgggcaagaggctcacacccccactttgccatggaagcaggagcaagaaggcaagtgtctgttgcccgccctcctcctcttccctgcctggctgagccagcacttttttcttctctcctttatctgctcagaaagtacagggtgttctgtttctcctgtgcatacagatcaaggagcggatgttatttctttctttctttccccaaggcgagagaaggacagggcaggcaccgagtaccatttaagtgattctccttcctcagtaaggcagtttctcatacattaaaacaaaacaaaacaaaacccagaagggaaaggaaacgatgacacaaaccaacagaaaacaagttgccccttagtgcccccactccccagcaggcatttagcacacagtaggtgtcctggctatgttctctctctccctttcagttggaccacagggtgtgctggctccatgggatgatatcagggccacaggacggactcatttctctgccctctgtgggctgtgtagggggctcctctggcttcctggaggcattggggattgacaggcttatctgggacagggcctgaggagggacaggaccgtgggattagctgtgagggtcagaatgcaggggactcacgtggcccctgcttacttgcgtgtcattccatgtgcgatgtctgtttgagttcaaagtctctgagaccaggtgcagggagctgggggttctttctgtgctgatcttggaggcagagtggctgcctgcattcattccacggtccattccacagcttgttccaaagacagtctgctcatgatgtagcttctgcacttgacaaattattttcatgcacgaggcccttgaaaatgttgacagtcttgtgacatccatggagggccttatttgacggtcacaaaggagcggtga

SEQ ID NO: 26085 - DNA, 2300 bp, Homo sapien
ggcctgctgttgtcaccctcaggacacgccacctttgagctgggagccacctggatccatggctcccatgggaaccctatctatcatctagcagaagccaacggcctcctggaagagacaaccgatggggaacgcagcgtgggccgcatcagcctctattccaagaatggcgtggcctgctaccttaccaaccacggccgcaggatccccaaggacgtggttgaggaattcagcgatttatacaacgaggtaaggtgtgagcagagtagctgggcgtaagggcatggggagacctgggaggtctgtgattctggtcgtgtctctgcacactccctgggccttgcatttggaaaaccaggataatgtgagggtaaaatgaaaatattcagtgggatagaactgatttttatatattgatttgttagcttgctaaattatttttaattctaataatacatctattatgttaattgtattaatttatattctaataatattttggaatttatgtatataactctacacaaaaaatgagaattttgtctttttttcctttctagtcattagaccagcatttatccaatagaactttccacagtgatggtgatgttttagaccttcgctctgcagtgtggtagtcactagccacatttggctcttgagcacttgaaatgatgcaagtaaaaccgaggaactgaatatttaattttttgttgttgttgtttgtttttgagatggagtctcgctctgtcgtccaggctggagtgcagtggcgcgatctcagctcactgtaacctctacctctctggttcaagcgattctcctgcctcagcctcctgagtagctgggattacaggcacgtggcatgcccagctaatttttgtatttttagtagagatggggtttcaccatgttgttcaggttggtctcgaactcctgacttcatgatcggcctaccttggcctcccaaagtgctgggattataggcgtgagccactgcacccggcctaatttcttaattttaaattgctacaggtgtctagtagctactgtgttggatagcacagctgtagacagttttatttttttcttgccttattgcactggttagtatctcagtgcagtgttggacagaagtggcaatggcacacatccttgttttattcagatttttaaaaaattattaatattgttagtattctttagctgtgtgaactgcaccgaacaagcaaagtaatgtgtaggccctgtcatctgatagcttgtcatttgtagtgtaatgaatgatccttcactccaggtcagtaatttggccagcaaacacctattgtgcattttcttttctttctttctttctttcttttttttttttgagacggagtttcgctcttgttgtccaggctagagtacgatggcacgatctcagctcaccgcaacctccgcctcccaggttcaagcgattctcctgcctcagtctcctgagtagctgggattacaggcatgtaccaccatgcccagctaattttgtatttttagtagaaatggggttttaccacgttggtcaggctggtctcgaactcctgacctcaggtgatccgcccaccttggtctcccaaagtgctgggattacaagcgtgagccacctcgcccagcctattgtgcattttctaatctcttgggcatgagaaaggagacatgacccttgctttggggtggtccctgctctatggaggacaggcacacttggtgtcatgtgtgtgcaccaacaaggtacgttgtgttgtgcattctcactcatgtgcaaagagactgaattgttaatgggtcaaataagaactagtattcttcaaaacagacctttcttttctgctggaaatcagccccagcctgattcccaggttattgtgagtgattcaaacatggatgcctcttgaaaatgactttcggggcccgtggtttgttcttttaaatgtcgttaaaagtagatcatcatcaaattctgctggtgggtttgatttttgaaagtcaagagagtgcgttgtggatatggagtggatatggtggattatctgggtggtgatgttttgagtcaaaaggataaggcgtaaccctgatgtcaagatttctttgtgtggcttttaaccaatcctagaggccattctgaggaggggtgctctaagcacgtgaaaccttgcctcagtgtggcttcataataagtatgcagcccccaaagatgatgacgttgaagagccactcatctgaatgtattttatttattaacaaatacatgagtttgtgca

SEQ ID NO: 26086 - DNA, 2300 bp, Homo sapien
tgtggaatcttgagcaggttattgagcctctctgagccttactttcctcttctgtaaaatgggcatggtggtacttacctcatagtattatgaggattgaatgagaaccaatgataagtgcttaatgagaattggggtgagtattattagctgtcacagacctgtccgattttccttgggtcacattgggaaggtgtcgaataacccaggagaggagactgtgccatgtgatacacccatgttcggtgaaggctgccctcgttggtggctgatgcaaagagtcatgtcgatggactaaattcattactcctcagctgggcattttggcctctagttaacataagctaaggactggctaccaggttgcttatcgcccaagggaaaaacccagggaggaggcaaattgaaagcctgacccttggcagtggtcctgggtgaagaatttgctgaggactccagctaaggctcaccactcagcatctcctgattgcagggaggcaagatgaaacaatttccctcactttcttctttataatttagtctccagagataagtttaattcatgtctgtgtctcaggtggaggccttccccttgagtgagatggtggtggtggcgggtggtggacatcactgtgctttgccatcttccttcaccctgtggccccagggcctagcccagggctgggggacagggcagacaccattcccagacatgtgtgctgaccacactcactttaggaagggaaacaaaccattcatcagctcagccacaggggctcgaccaaggagcctccattagctggtgtcctgggaatgacagctgtgggcatgtgatcctgccgccttcttgctcacggccctccagcgatgccagggccttggatcaagtccagagtccttggaataactctcagtcctttatgccctggaccctgcctgcccttccaaagtcggctctcagatcctctctccttgctgccccctccagcaaaaccaaaccccttcaggattcctgactgcttctccatctttgaggttgctgttccctctgcctgaaatgcttttcttctccctttcctctccaccctggctgtctctcagctgcccagggttgtctgcgttgacctcacagccccgggttctttcctatcacggcagcccaatcgtggactgtctccccagctggagtgaggggaggggcagggactgtttcgcccacattacaagctgtgtcctgcacagagcccggtaaatgttgagtaaatgttgcttctggggatccctggactggcttacttccttcagggagctctgcccagtgcttagtggggactgtatatgagacaggcacgagggtcgggcgggcagtcagaccccttttcaagtgactgatcgtcgttatctgttgatgaggtgtgggctggagttcttgctgaaacgtgcccgtgaaatgcatctcccttccttggcacactggggcctcctgagaccctggcttttgtgttcctgtcttccccactgcgtctcagcttccttactcgtggctgaggcctgaagcaaagggggtgctttgtacggagctgcacaggcccagggaggtgtctccagtcgtcaggggcccttctgctggccaggccacagctccagactgccctcttgggagcgggcaaagcagacacacttgggcaggggtggcagggaaagtgcacgtatcgttcttggaacaggtaaatgtgtgcaaatgcccatcctccagtgggaggtggagcccatggaggcccatgcagagtccatgaggggtggcttctttcccacagactgtatgggcaccaaatgtttcacattgtcctaagtgagggcccagcaagaaaacctccggggcttatcccacctccccgacaggccggaggcgaggaggtggctgcccggggccttggcttttggtgcagcattgagtgcaacatcggatccctaagggacagagaccaggggctcagtgcatccaggggacacctgggaactggtgggtttgggttgggggccttctgtttgagatggaggtgtgatgaggtgttttcagtctcatggggtctctctggcaggtctataacttgacccaggagttcttccggcacgataaaccagtcaatgctgaaagtcaaaatagcgtgggggtgttcacccgagaggaggtgcgtaaccgcatcaggaatgaccctgacgacccagaggctaccaagcgcctgaagctcgccatgatccagcagtacctgaaggtatcttgaggaagacggattctg

SEQ ID NO: 26087 - DNA, 2300 bp, Homo sapien
gtgcatgtaggtgtgtgtgcgtaagtggatgcaggtaagcatgtgtgtacgtgtgtctgtgtgttagacatctccatcacaacctaccagcctgggcaatataatgagacactctctctacaaaaaaataaaaataaaaattagccaggcatggtggcacatgcctgtagtcccagccactcctgagtaaggaggatcatttaagcccaggagtctgaggctgcagtgagccatgatcgcaccgctgtctccagcctgggcaacagagtgagatgctatttcaatcaatcaatcaatcacctgggaggaggaaggggctgtcatgtcctgtcaagggcagggccctaaatgtccatgaaggggacctgacctaagctcttcataacttctccccatcaccccacccttcaactctgtagaattcaaatttcatcactagaaatctaggataacaaaatgactaactgttctttaagatgactggggacagtgtgaatggggacattttagtgtattcttatatagcttttgggcttaaaccacatggacagagccatgtggatctgaattcaaatttcatcactagaaatgtggagtaacaaaatgactgttctttaaggttctgtgtgtgtgtgtatgtaggtaggtatatgtgtagggtagagaggtgagtgtatgtaggtgtgtgtacctgtatatgtcatgtgggttatgtgtaaggtgtagtggtgagtatatgtaggtatgtgtacctatatatgtgggtgagtatatataagggggtagatgtgtctttttactcagcaaaaagagaagaaaaagaagtttttcttttttaaaagacatctgtagagatggggtctcactgtgttgcccaggctggtttcaagttcccaggctcaagcaatcctcctgcctcagcctcccaaattggtgggattacaggcataagccaccatgtccagcctaggacccttttctagatgcctagtatgtaaaggaaagtattgattgctttatatttggtgtgtgaattattccttaatactgagaagcttgacagcttacatgtaaaggattacaaataacaccttcttttatttttctgagacagggtctcactctgtcacccaagctggagtgcagtggtgcaatcatggctcactgcagcctcagactcctgggctcaagtgatcctgccaccttagcctcccaaagtgttgggagcactgaacccagctgacgagaagaaaaatctattccccaataaatggcaggccttaggatattccccctgtcaaaaaataaagcccagaatgaccatctgcccagaggttcaaaagaaggccaccccaggggccagacccacagcccagtggacaggtgacgctaattaacaatgaacaagccaggtgcggtggctcacccctgtaatcccagcactttgggaggccaaggcgggtagatcacctgaggtcaggagttcaagaccagcctggccaagatggtgaaactacaaaaatactaaaaatacaaaaattatccaggcgtggtggcgggcgcctgtaatcccagctactcaggaggctgaggcagagaactgcttgaacccaggaggcagaggttgcagtgagccgagattgcgccattgcactccagcctgggcgacagagcgagactccgtctcaaaaaaaaaaaaaaaaaaaaaaaaaaacaatgaacatacctaggcttggcatggagccaccaccactgggggtcccccccacagaactccttcactccaggcagtgtgtcactcagttaaactcagagaagtccagcaaaaaaaagggccagcaagcagactcaggccagacctgaaggagcaggtgtacactgagaggcccgtattcctgaggggccttactggcaggaaggtaaacaccccaacagatggggggaggggacatcccttccagtaaaagcagcaccttccctctggggacacagccaggccagggctccccaaccttctccctctcactcaaaggcggtgtgacagaaataaacacacacacatacacagaggctgagaaaaccagagagaagctgaggggcaggggagggagccttttttattatcccaaaatgcaaagtattgaaggcacttacaataacaaggcaggacagagggtaggcaagtgggggcacgggatccagcacagaggtaactcaacggcccacctgctcacggcccagcctggagaaaaagaaaagctacagggccaggtctgaaggcagtcagggcggctagctct

SEQ ID NO: 26088 - DNA, 2300 bp, Homo sapien
ctcagttgttggatttccccatccactgcagtgggatggagacaagcagccccatcacataagtatcggggaagaaagtgataaataggttctcagtgtataggcagaggaattttaaaggactccatggtggggtgaaaggtctggaaatgtttacttggtgactgcacttcagggagcttcatgggtgggtaagagggagggagagaatattcacttagtgccaattgcctggcactatgccatgtgaatgtgatactgatttgacagtgatgccaactcaggctttatttattcctgtgggcaagtgaaacctcagagaagttaagtaacttgcccagggttgctcagaggtgccgagacatgagctgaagtctgtctgactgcgtggtgtaggctcgttctattgtatgatgaaaagaagaggctggtgccaccaaaaaagcttaaggccattgctggagagagtgggtgtggtacgaccacactgggggactgtggcggagtcagctaaaactggccatgtgcttgccagcgttcccacccctgggtatacacccaagagaaaggcgtgcaggtgctcaccaaacatatataccaatgtgtccacagtaacatggaccctaacagctaaaaaactggaagctgcccagatgtccatcaacagtagaatgaattccagtgcactcacacaatggaatactatatagcaataaataaaaggaatggatatttgcaacaacatggattaacctcaaaaatgttatgttggcagggtatgatggctcatgtacccccagcactttgagaggccaaggcaggtggattgcttgagctcaggagttcaagaccagcctgggcaacaaggcgaaaccccgtctccacaaaaaatacagaaattagctgggcatggtggtgcgtgcctatagtctcagctactggggaggctgaggtgggagaaatgcttgaacccagaaggttgagtccgcagtgagctgtgatcatgccactgcactccagcctgagcaacagagcaagattccatctcaaaacagcaacagcaacaacaacaacacaacaaaaaccctcaaaacattatgttgagttaaagaagccggacaaaaggctatgtactatatgatttcttttatgtaacgttcaagaacttgcaaaactaatctactgtgttggaaatgaggggctgggggtggcggctgggcaggagtgggatgggggcacttcctggggtaacggaagtgttccacatcttgatctgggtggcggttgcatgggcatacacgttggtaaaaatgcatcaagttatacatggaagaaagtttcaagagtctgagaatgcctccctccattctcccattccaaaacatggtcatattggcccagctaatttcctccttgcagcagagatgacacatctgagagcagataaagggaggaggggccctcttaggccccactggctgcctggtgataagcagtgacctcaaattaatataggatgtcactgtttaccagctccattgcctgtatccccttatcctctctgcatctgcaaccacgaaagaggggttgggattgttccacagcagaggaaatggaggttctcggaaggacctcggggaggccatgcaaggctactcggcttggagaggacatgacctcgtggggaagggagcaacccggggaggaagccgagggggagcctttggacacacaggcagggacaggcgccagagggggcacctcctgcagtgtgctgcctccacatcaataattgcataatgtggataccatttatgattgacagttccaaaaaccaaactcactcactacagatgagcaaggaagagcaagagccattcagaagtgaggaggtatgacgtacaaggaacacaggatatgtttcatgctgtgatgaagtttcacaatagacttggcatagattgaaacccaaagggctctatcagaagtggcaaatgtggcacgctcaggccaacacccatgccaatgattcctataaaattcccattgcctggtagaagttcacaggagaggaaagttctttcctgcaccaggttctatggagaattggttgcatggtttctcgtgctgtgggcatcagggacttcaggtgaaggtatttagctgtggctttgtgcaaacctcagaactgtgtcctccaagggcctggggtatttggcaggcgctgtctcttgctgcctttgctgctgtatgacaggtgagtaatatgttatatcctatttcttgggagctgcctggag

SEQ ID NO: 26089 - DNA, 2300 bp, Homo sapien
cccagaatcaaatggattccaccagggttgcccctatcccacactatgtgatagcagccaaccatggacactgacttgccatttaacaccctccagagaggagctccttgcctcccctttcagttcccactgtccctcccctctcagaaaggaagcccaaacccaagattttacttttggtcagctgctagctaatccctagaagccacgttgctttcgtttcaactcactatagtaagtttccaaaaaccaaaataaaagaagatttaatggggaaggccttggaagagctgtttccaagctatgattataaaagccttatcttcctggactgggcaatggggaggagggaggccacccatctctaaacatttctgcagttttttactttttctccaaagcagcttctcatctagaactcagacatcctgcccctgtgtcaaccataaccagtgaacactagggctatgggttctccgtcccctcccagacacttctgcaaacaggccttcatctccctggtagggctcaagccctcctcattctgcaactatgagacggcattaccctccttacagttagtgtatccagcatggtgcctgccacgtgccagcagccggtatttttatgttggctaactgtatgatttccttgtgcctctccctacccagtcctgctattgctcaagaagcttctcacaccctctcccacatctgcacccggggtccataccagccccacacctcctcgccttccatcctccctgttaaaagcctgccctgaagaagccctactccgctgacatgcccaggcactgctctggggccctcactcatatttactcagttaaccctcaggccaggaggtagacatcacttcttattctcatttgacagttgaggaactgaggcacaaagaggttccgctgttaatatggggcggagcctggattcagatgcggagccagactgtctcacacccgccccgcttaaccatcctgccaagtgccctttcccaccctctggcacttaaaccctccctcttaaaaaggccagaacaagaacaaggccccttatttagggtagctatagaaaggtttattcccgcatctgatacagggaaaagtaacagtgggaaagttggcgtatgtagaccagcgtgtcttgggcagggtccgagggctgtagccacagcctgctgctcctgagcccatcgtacccagcctctgcccagcacaggcttccgacccttcctgggctctcttcacgccatcgcactggacagaggcgtctgaaaccctgccctggccagtggcgtgagaaaaaggaggtgcggcagatccatgcgggcagtcccaggaggcaacccgcagcggcactgcgccgtccggtccgcagtccgcagatcccaggcgcttgctgctctctggcggccaaagccgggatcccgaagacccgggactcacgccttcaacgcaccgcgcgcccaagggcaccagcgagtgaccgagagactcgggggagagggcgggaggaagagggacgccgctgagggccaagggggagggggtccgggagaggagcgggaaggaacgcaaagggcaccgctaggggagagcgcgggcttgggcacctgcggagaggcgtgggtggctgctgcgggacccgagcgcgcgccagcgccgcagccccccggaccccgacacaatcgcttgtcctgagcgaagggtcccttctaccctggagtgtggcgcccgtctctcggcccgggtcgccccctcctccttcctggcgctgcccctcctcggtcccgccccccgcgccgagttgggagcgccgcagtggccgctgcctgcaccgcccggccccggagccgccgctttgcccgcttgccgggcacgctcagagcgccgcgcgcgtagcgggccccggctcttcggtgctactccacggccggcctcggggagcccggccgccgcccgggccaggcagctccgctctcggacagccgcgctccgcgtcacaggaacttgggcaggaccccgacgggacccgtgcgcggagctgcatctggagccccgcggctatgccctgtgctcccctccctgccggccgctcgttctgtgccccggcccggccaccgacggccgcgcgttgagatgactttccgcgatctcctgagcgtcagtttcgagggaccccgcccggacagcagcgcagggggctccagcgcgggcggcggcgggggcagcgcgggcggcgcggccccctcggagggcccggcggtgggcggcgtgccgg

SEQ ID NO: 26090 - DNA, 2300 bp, Homo sapien
acgacgaagactcatggctgaggatgaaaaaaggagatgggggtactgactaatgggaagtgggcagtacagatctaggaggggagggatcttgagcatggatgaaagagtttgccttgggcaggaggaggccagcactgcttagagttaggctgtaaggagcagagcggacatggatgcgtgtgcaccggtcatgattcagggcaggaggcacagaccagtaggctcccaccacttggccactctgtctttgtgtgacttggcccaagttgcagagctatttagtggtagaaatggggtgatactcagaattgtggagtttaagtcatgtgatgtcaacaacaatcttgttttctttgtaaaaatttaactgtaacttttctttctttctttccttttttttttttttttttttttttgaaacggagtttcactcttgttgcccaggctggagtgtaatggtgagatctcagctcattgcaacctccacttcctgggttcaagcgattctcctgcctcagcctcccaagtagctgggattacaggcacatgccaccacaacccggctaatttttgtatttttagtagagacagggtttcactatattggccgggctgtcacaaactgctgacctcaggtgatctacccacctcagcctcccaaagtgctgggattacaggcatgagccaccacgcctggtcaactctaacttttctaatgaaaagatgtgctattatattctaaaatgaatataatgcagcatgtgacaagggctaatatggaaattttaaatgatccatgtcacaagaaacatgggagggagattaaggggtaaagttgggatttacaaggcaatttgctctctgctcccattctcttaatccgtaaacctttactctaggaatttttttttccagctgcactaacactgctccccaaacaccccggaccctgtccttgccatccttggggatacatcttacagatgagcttatcttcccctaagactacctacttctcctggtcccatgcccatgaggtcaccctctgctaatactctcagtcactgtgtgctttcttgtgagtgaacaatgtcctgagtgactgaaaaagacttcctgtctttttggcatggttaatggcaagttgacattctagcatcttgtgtataagaagatggatttaggccagggtgtggtggcagcactttgggaggctgaggcgggcagatcacctgaggccaggagtttgagaccagcctggtcaacatgatgaaaccatatctctactaaaaatacaaaaattagccaggcgtagttgcacacccctgcagtcccagctactcaggagcctgaggctggaggatcacctgagcccaggaggcagaggttgtggtgagccgagatcatgccacactctagcctggcaacagagtagacttgtctcaaaaaaaaaaaaaaaaagcagcagcagctacatctaattgctcccaaggcagcaataaggacacacttccaacatgaaaagagctaaagagcagaacccacacctgtggttagaatgtcaaaaccctgccaatctgtctgacgcaaccatctggagtcatccttcatgtgccaaaactgcaccccaacctttcctgggtgacaatgtaggatgaagcctgactctatctgggaagccaagatcttctgtgatgtatagagctatgtttacctaggacaccttatcttgctctgtggacagtcagcctaggacaaactggggctgggtctgatttaagtcaaatagatacattgttggtgtctaccccgcaaaggagtgttgacctaatgtgcagttcacagcctcttgcaggctcagaagcctgcccaacactttgacacctggaaaacctttctgtagccatgagagaaagggggtctgtgtaaaattcttccatcatcacagacctgggggccagccagaccagagaacagagaagggtgcttcctggctccttccacatcatagtccttaccatacaagccccattgtgacttcatggcctccactgagcctccttcactggacctgctactgttgagccaagtccttggtttctattacctgctcaactccttctgtgcatagctcctgactgccgagctgggaagaactccagtcctttcctaggctagggattttaacaacggaacaaaatcccaggtgaacataggctcagtgcataaaacagataaaagtggaggtgggagaattaaaccaggggtggtgggcaactctgaaatctacttctcct

SEQ ID NO: 26091 - DNA, 2300 bp, Homo sapien
gatcttcaagtcctcctagcccaggtgccactcaggcaagtgcataggcttcagatgactgcaacccccggctatcaaggtacccctagacttagagtcttctcaactgacaccccaaacataatggggcagaatcaagtccccgctgtgcctgtccagctccctggcttaaacaatccattggcataataaaatggtagttgttttaaaccacctaagttgtggggtatttgcagcacatcagtaataaccagaataggtcataagtcaatcccctttggttccctagttctttccctccaagaaatcccaggccatttgagccctttcctgatgggaggaaagcagtcgaccagaaaatacaattcttttgaggaaaagatgggttttagcgtcttggaaccaagcttcacagagcgccttctgccagtgggcagccagccccttgcctaggctgatctggtcacctacttccagccccaccccagctctgtcctcccacccagctctgtcctccctgcaggccctgagcctctaggagactcaaagagacactgtgctgcccgctgaattcatctcccagtgagccatctctgaggaaaggaggtaaggctctgaatgcgatgtcaacctaagcattacataacactgataggttgtaaaatggcctcgctgcctagtgctcattctaactggccacaatccagtcctccctgttgcactgagtcagctccctccaaaggcggcgctttccaggcctcctggttgccctttcccagcagacctttcaagtgctcacccacactcacataaacatggcccaggcactgtttacagcagctctcctctgtgcattctcctggcttctcctgtctctcgccatttgtacccctcccctgcaacttgagtgacagtgattggtcctgagatgcaaatatttgatgcacatatgtttacaatgcagcctcagcttttttttttttttttgtaaagagacaaagagtgagacagggtcttggcctatagccctgtggcccaggctggagtgcagtggcacaattaaagctcactgcagcctctacctcctgggctcaagcaatcctcccatctcagcctccccagtagctgggactacaggactgtgccaccgttcccagcaattttttttattttttgtagaaatggggtctcactatgttgctcactctggtctcaaactcctgagctcaagcaatcttcctgccttggcctctgaaagtgctgggattacaggcctgagccactgcacctggctgtcaacattcttaaatctctttccttacatgcttcctaaacctctcacccaaaactaggagactagatgtcctattttccccagggcatgcctggtttacgcccatttcactttaaaagtgcccaatttgggtaataatttataagatccccctccctctaaatcctgtccttctatcacttcatccttcgctctcctttaaaatgagacagttgtcagcaggaatcctgcgcaagaacacaccaccctgtttcatagaagatatctcaggtaatgtgcaaacacgggtttttaaacggagcgcatttttctcatttgttaatatcaccacctaaatcatctcttgcctaaaacaaggagtagaaagtgaatgaaggaaggaacaggtgatggtcagtgtcctttctacgcctcaaaatttaagagtttatgtgaaaattcataaatattaatctcaatccaggttaagcaaaattttttgctctcctctttagaaatttctggttgccaaagttccagaaattgcttcctcattcctgagcctttcattttctcgatttctccattatgtaacggggagctggagctttgggccgaatttccaattaaagatgatttttacagtcaatgagccacgtcagggagcgatggcacccgcaggcggtatcaactgatgcaagtgttcaagcgaatctcaactcgttttttccggtgactcattcccggccctgcttggcagcgctgcaccctttaacttaaacctcggccggccgcccgccgggggcacagagtgtgcgccgggccgcgcggcaattggtccccgcgccgacctccgcccgcgagcgccgccgcttcccttccccgccccgcgtccctccccctcggccccgcgcgtcgcctgtcctccgagccagtcgctgacagccgcggcgccgcgagcttctcctctcctcacgaccgaggcaggtaaacgcccggggtgggaggaacgcgggcgggggcaggg

SEQ ID NO: 26092 - DNA, 2300 bp, Homo sapien
ttagacacttcagatgttaactgctctaaacaaaactcctaagtctgtcctatgcaatatatattttatatacatatatatttttacatagaatactcacaaagtgcaagccaataataacattgcagaaaagtaatacatatctgctaggtgacaatatcaaacaattcagggaataattttactttaattaacattaacagaatttctttttccacttcaaatcaatcatatttctgtcatctccaacctaagatattttttagattgtctccctattctttgattcaaaagccaattacagaaactatgaacttgacctaattctggtttttgacaattatgagacagaaataaagaaatgcaagcagttcttttctttgcacactgaccattttttaattacatcatcctctatgatgatggtgctttcacaactgcagctctcctgtatgtcaaaatcattctggtttccaggtaaatggacaaaggagatttgccttcagtgtctagaaggcaatttacttttcagctgccttaattacctatagtttaaagaaaggaatgccacatatagggtcctttaaacatctaaaatgggaggttgcctccaagggcaccattcccaaacatttgatttcaagtcccagaagcctttcatatatgttacagttatgttcactgtgaatatgtcctctagccagaggttcagtgttgtgacaatatttactcttgttgaacagctgctgtgtagcccatactgtgaaaagtaaaacatcaccccagttctcggtacacacagagctcatgctccagcgggctgagcctgcatcccaagagctaagaatctctaggatttttttgaataagtatcatgtggcctcctaacaaacctggcagaaatgttgtcgggttttcttaaaatggaaaatatctctaaatagctatgaaatctctactaagatagggcattagtatactgagctctagctgctgaaggagccagaggtatccaggcaaaggtatttcagactgttctgagatttgttttagcctcaacctgttgcactaagtccaaaaataagtccagattaaccaatggttatttgctgttatacttttactggcctggcattagcaacggctcatgatgaactcaatcaaagggggcttgaccagcatctcaggtctactctatgttttccagtgcccatcagtgccaagggtattgattagcctatccgggacaaagagagaagaaagagtgagacaccaccactaaaagggctgcaggtggataccgcctccctcaagctggaaaaagattagaaagatggtgaaaacaggaagaccttcctcatcccactatcaggaagatgaggaaagagatcaggaggatcacaggtggagaggagaagaggaccatgctcgatcctctctggtaataggcctgagattccctctcgtactgggtgatacacatctgctcaaccacgcgctccatcatcttaacgtcggtctcggtgaagttctcccccttggtggttgtggtgaccgtgtgctgcttgattgtgatattgacgcagtcgtgcacaaagttgttctggttgctgtactcatccatgggcctgtagtacacttggttggggtaacggtgcatgttttcacgatagtaacggtcctcatagtcactgccgaaatgtatgatgggcctgctcatggcacttcccagcatgtagccgccaaggccccccaccactgccccagctgctgcagcaccagccatgtgcttcatgttggtttttggcttactcggcttgttccactgactgtgggtgccacctccttgaccccagccaccaccatgaggctgtccccagccaccaccatggggctgcccccagccaccaccatgaggctgcccccagccaccaccatgaggctgcccccagccaccaccgccctgaggtgggtagcggttgcctccagggctgccctgccccgggtatcggctgcccccagtgttccatcctccaggcttcgggcgcttcttgcagaggcccaggtcactccatgtggccacaaagagaaccagcatccagcagccaaggttcgccataatgactgctctgcaaaatgaagaggagaacgtcagagtcccatatttatgttgaaattactaaatgtttcctgcataatgaatgagtgcatagcaatggtatcagctgctcagtagaaacactgttgccaccctgtacttctctgaagcacttaggacaaaagcaaaagtaagaaaaggg

SEQ ID NO: 26093 - DNA, 2300 bp, Homo sapien
tgttgcgtttttagaaactggcataattttctattatttacgcgatctagagaactatgtcatagacccctgcatcatagaacacccagatctgtggtctccatctcattcttcctgctttctcaaagatgatctacacacagttctatttcccagactatataatataatccactttatgtaacatagtgtaattcacttggccctggtctctcagttcttttgaagaaatgaatgttctcacactaattccttggtctgtttgtcgatctttacaggcagggagggaggatgcgaggcagcattgggtcggctccacattctccacatctgcttattgttttcttgccttgtttgcagcttccagagctcctccctgcttctgtagcaatttcagtcttccccattcctctgtgcctttgtaaacagccttttgttcactaacaagaggaatctgctgccacgtcagctctaaaccaacctcccaccattctctgggtaaagtcctgcttagaaagggaataggaagaagaggggtggagggggttggagatgattgtgtctagtgggaacaggcagggggatagtgcacagagttcacaatgggacaacgagcctgccgaggctgcactgccggcctggctgggtgaccttgagcctatctgggcctgtgagctcaccatgcaaaggagctggaccacagaattctgagtcctttctagctctaaacactgtggccctaagtatctatatgtgaaacaaaattgtcctgacatttgtctctgggtactgaactattaggagattttgattttttcatctccattttgcaaacagtctgtactaagattacactactgtgtttctgttttgtgtgtattcagaagcacaaaaagtctgtggttctagaaaggaaatagaaaagttcttaaaaaaaaaaaagtggggaagtgaaacaaatgttaaagtcagaggagaaagaaaggcccaaccggaggccccaaatccacccagagcccagaagcccgggtttcccaccgaccggctgcggtctttgtcagctctctggcgctatctgctgtccttctcgataacaaccgtttaatttggtttgcaaaattgctctgacgcaaatccaccgtgaacactgacggggtcacattcagcataaaaatcgcattctgtttacaggaaaatctggccccatacttgctcccatattcacttttgactttgccttgcagtactaactgtaacagggacacctgagcaagtcccttctgtataaggcccaaaatggtcacccaataccaatgagtctcttgctttggaaagcccaggaatgcacctccagccccttctgcgcagcgctcggacaccatgtagaggagaaggcactctgcagaactcgccctcagcccgcaccacctgtccaggggactggctgcgtgtcaatgtgtctctgctcccggggttcccgcagatctttaacttattggcctttgggctaattcagtccttcaagcattcctcgcccaacatgccaggaagtcttctcacgtgtcttccaccccatacctaccagttctgttttcccactacccgatgaaagtgtaaccgccccccggcgccccccccccccaccaccacacacacaccctgttggtcccatcctcagggcgtggtggtccaggtgaacgcttgccctctttttgagctgaacctccccacagaggctgtcagcaaagactgctttgctgtccaaggccggcctttaggtacaggacactatgcatgtccagcgaggcttgttgaagccacatctgtcatagatattgatgggaaaagcattttccttctaacacatctcattccaattctaaaaggcacctctgaagccttgctgaacttcatcaagattttcacgtggtttccttagtaaagtgtgatgagaaggtccatccttctcaggatgaaggagtggtccaggaagccctgattggtctgccggggagggaagggctgccttatttggagacctgcaggaatgccacctcccccggcagctcctatatagctgggcggacctggctgccaagagggtgtgctgggggactgtgcagctcgaggctccagaggcacactccagagagagccaaggtacgtggggggccacttctgtggtcaggactgctggtttcttatcaaggctcgatcccagattgaaaatcatgcaatgatttctttactcccacacctggggatgggtcccaagttcagggtagacttgcgaggatacc

SEQ ID NO: 26094 - DNA, 2300 bp, Homo sapien
ggcctccggctgcttctactcatggtggaagggaaaggtgaaccactgtgggcagatcacatggggagagaggaggcaagaggagggaggaggaggttctacactcttcaacaactagctcttgagggaactaagagtgagaactcactcccatgaggatggcagcaagccattcatgagagatatactcccatgacccaaacctcccagtgggccctacctctgacattggggatgaaatttcaacatgatattgtctttggaggggaggccaaatatccaaaccatagcaatgaatcttatttgcagctggcctgtgttggttcagtgcttaactccagtggtatttgggagtctggtaaagaccctcagccaaaatattaattgattgttcttgctggtgatttataagatgctgtttaaagtccagaactccctgggaggcatgcttcagcagtatgtctatattatttcttaaacatatgtagattgatgatttgcatttggtttacatgtttacccagcctgatttaagctacgtaatgagtggggtatacaaaatccctctgtaagctgtgccttagcttcccaagaccaagggattacacacatatcaagaagaaagtgctctttctcatgatatagaaatatttcttcatgttactgataatgcaataaagtgtatatgcttctgagtgatttgctaatgtgtatgtcagcaacacattcagtatccagaatggcttgaagttatgccttcagggccaaaaataacataatgttaaattctgtagattcaataacagaatttattaagaaatctgcactgtgaggtaaatgattaaacactgactctttctcaacattagataattctttttattcatcagagaaatgtgatttatgacacatttaaaagcatgtttaaggccgggcatggtggtgtatacctgtagtctcaattacgtgggaggctagggtgggaggattgcttgagcctagtagttctaggcttcagtgcgccatgatcacacctgtgaatagccactgcactccagcctgggcaacatagcaagatcccatctctaaaaagaaattttgttttaaagcatgtttaaaacatacatacaccagcctggccaacatagtgaaaccctgcctctaccaaaaatacaaaaattagctgggcgtggtggcacgtgcctgtaatctcagctactcgggaggctcaggcaggagaattccttgaacccgggagacagaggttgtggtgagctgaaattgtgccactgtgctccagcctgagcaacagagggagactctgtctcaaaaaacaaacaaacaaacaacaaaaaaaccatacatagaaatgttccagtagaatacaaagaaccactttctagaactgaatgcaccagagaggattagaaacccacttattctctcccagcttcaagtatttaacgttcctacttttgcacgtggcagccttgctgactcagatccgagggcgttgaaagacagattcacaatttctggtccatatttgatgcaaatatttagaactatctagcagagcttgctgcctttccaacaatccagttagtgaattgagaatgttctcatttaatagaaatgaaaggtaaacgaaggatccacctggccatgggactggaggaatgacccaagccatgcttcatagaggcacagatagacaccctcagggaagccgagaccctttgaaaaaagggcctggtgtgtgtattttcacactgccccctgctggctgacactggaacattgattcttcctgctgacactggaacattgattctcctgtggctctaagacgacctaacaggatgaggccagcgggccccccgcaaggaaacttgagctagaggcagttggatttggctgagacgctctcctcagggaaggccaggtctgggagtgggtttgaacagcagtggagaaataacttccatagggcatgtcagagtaagttctagtgtttccaagagaatgggacaggatcttagtggaatttagaagccaggcaggtggaaaagcattgaggaccccatcccaagggctcgagtccctagagacagcctggaaagattgggtgccagctgcagagaggagagcaaggcgaccaaacgcagggtaaggtctggaggtgctcatagttcactacgggacatgtacatggaagtgaataattatgtcacaaggtgccaagggggctagttacctcacataggatcttagaaaaggtctcctggagaccatgtctg

SEQ ID NO: 26095 - DNA, 2300 bp, Homo sapien
cacataagctctggatgttagcagagtccccactgatagtgggcccgtccccacacttggtcatcctaggttgcttttgttactcatctgattcccatcctgaaactgagcttactcatcctgtatccatttctctaaagcctgttatcagatagatgatgagttataaaggagtctggtagggtactttatactcaagcgcctgtgactgataaaaaggtccctatgtgtaatgccctttgaaacacattttcaggttatcaagctgtggcgatttaaccatagaaacagataacagatggtggaatttcagctgctagggcaggttgcttggggacagtatgtgggatgtagtggcctattctgtgtccctcaaaccactccacttagacaaaatcctgttttgggttaaattttgacctacaattgtgtaaaggaatgatgcccaccttgaccaggggaaggccatgtaaattgcctatgtttacataaagccttcctccctgagacgcctaagcaccgtaaaattgtttcatttctctccttccctcttttattccttcctccctctttgaggatgattttggggcccaagttagttagttgctcaatgggctgatgttattttcacctatggggcttgtcctgaagatgtgttccatgacccagatctaacacttgaatagcccataaaacatggctccaaaaaggtttttctgagactagagggaggagaaccgattcttttaggaactgcccttcaagcttttactaatcagcagctgggccatgcaagattttagttcttaaatagctttcctgggttatgtcctatagaataaatgattaaaagtgcttcatgattaaaggatttcatagtcataagcgagtcccaattcttcgggatagaacatataaatgcctctagaatggttttacatttaatgtctaattagtcagcaacctttgagtataaattggggactcctgcaagatttattcacctgttggagagttgtcatttagcccgttagtttattacagaacctgggacattctgctgtttggaaatctgattagcacagcctctcccagctcatgatcacttgacacccttttaaagacagcagttcatctgctagaggagctagtgttctgtagaataaacttcggcaaatgttgctttaaatttccttcaaccaccaggttggattgctaaacagatgttgtagctaaagagacatcattttccgtagtaggggatgggacgtagctaactccagttcttgcttctgttaacaaggctaatctcacttattttaagaaatgtattccgctttctttaaaagtcattaggataaaaagaaaaacaatgctttttataatttatacctatgtatttgaatttcacagcaacttttgtgctgacctgtgaggtcagcttcaggatctggagtagttgacgtcagaaagtatctcagagctgcggtgtgaactgggcagctgcccctatcctgtgaatacagtctgggggcccccagccaggacatgtgaagaatgtgtcatttgtccctcagcatggtcttggcttctgtgggggcttttctaggctcactactctgattgctttgtgggcaggaagaagacgagttcattgtggaggggctcctgaacatctcctggggcctgcgccggcccattcgcctgcagatgcaggatgacaacgaacgcattcgaccccctccatcctcctcctcctggcactctggctgtaacctgggggctcaggggtgagtgaggagagacggggcagggagatgactgggatgcttgggtgttctatgtgttctcaagcagataaatgctgccttcttccagccagccctgaccctggctcctcctcctactacctctactgcccacctgccttagccttggaatgaggaacaagcagcagatgtggttgtgattgagcccccttcctgtcactgcaatcactgatgaggtcacaggaggggagctgctgagtcatacgaggggagctgctgagtcagagtcctcccttagggagaactcaggagtctctgagtggagctgctagtggctagtgaggcccagcctgtatatttctaacagggcgccccatgccccagcaccctccccactgggaccactcctcatagaatagccccactccaaagcatttatgacttgaaccttctgaccaaagctctctgaatcttgggggaacctagaagaggaaaaggaatgtcaggctctgtcagagtcagccaagcgag

SEQ ID NO: 26096 - DNA, 2300 bp, Homo sapien
cagtcatacattagttaaccatggcatgtctatactttggaataccaagtggctacaaaaacataggctgcaggtgtgtagctattaacgtggaagaatatgatatatatgtatttttgagatgtagtttcactcttgttgcccaggctggagtgcaatgccatgatctcaactcactgcaatctccgcctcccgggtgcaagcaattctcctgcctcagcctcccgagtagctgggattacaggcatgcaccaccacgccaggctaattttttgtatttttagtagagacagggtttcaccatgttggccaggctgcttttgaactcctgacctcaggtgatccacccgcctcggcctcccaaagtgctgggattacaggtgtgagccaccagaatatgatatatttttaagaagcagcttaccaaactatgtgctatttttacaaactgtatcacccatctatattagcatctggaaggatgtatggtaaaatgtcaatagtgattatctctgggtggtggaggtttgcgagatttcgatcttcatcttttttcatatgtaataatttatttttatgttttattgtggcaaagtacgcataccataaaatttacccttttaaccgtttctaagtgtacaaattagtggcattaactccattcacaacgttgtacaacccatcaccattatccatgtccagaactttttcgtcgttccaaacagaagctctgtacccattaaacaataaccccctcactcctttctccttccagctcctggtagcttctagtctacttaccgtctttatgaatttgcctgttctagctacctcatatcaatggaatcaaacaatatttgtccttttgtggatactaatcttttcatttatctatatatatttttcgtttttgtttttgagacagggtctcactctgttgccctggctagagtacagaggtgtggtcatggctgactgcagcttccgtctcctgggctcaagtcatcctcccacctcacctcagcctcccaagtagctgggactacaggtgcacgccaccacactcagctaattttttattttttatagagacaaggttttgccatgttgcccaagctggtcttgaactcctgcatgcaagccatcctcccgtctcggcctcccaaattgctgggattacaggtgtgaaccatggaacctgacctatatttaaaaaataaaacaaaaaatgtttattttacttctgcaattgaaaggaaagccccgggagacagctgtggtatttggcccctggaggttccatctcaggctgggtcatgtggtcctgactatccttcctggcctgggcagtatcagggtgctgcctccatctcagcctcacaggacaaaagtggccagggtgcagacgtgcagcaccactggcttgggagctgaccacagcatggcttgctggctgctggcagctggcccttggggcccagacccactgctgcttaatctcagggttttctgtgtggtgatgagtttggaaatgtgggctcacgattcgccatgactttgagggagcaggtgccgtgcagagagagagattcaaaccaggtagaagtggagttgtgtggacactagcttccctgaagctcgagaaggaggatctctgcctttctatttcaagcatcctttgtgtgtgcccaacgcttgccctgctaaatacccatcccagtggctgtagggctggttgttgaatgttttgtccatagtgtggcatggggtgcaggggggactttaactggtggagtccatgaggcctcaggtactctggggagatgggtggtggtagcctcagataatcagtgccccttcctaaagtgccgtgtagggtcttacagctcatcacacagacatttagggcaaggatggctcttttgtgtacagtcggggccatggtgccacgtagttggggggctgctgaggcagagtttgcccgcaggtcagctcaggaagctgcgggacccagaacagggaaaccaggtcacgtgactctattcaggggtcacgggagtgggtcaggtggcttttctctgggacatttgctctgaggcaaatgctgtgagttccttgttaggtgagttccccgaagcgcccacggctcctccagtgagttggtaaaagcgtgagtctgggagggcgctcagggtctcttcacctggccctgcccagtgggtggctaccttattaatcttaggtagtcgtccgggtgtacagaggtttgatagagccgcctctgcgggccacgtggagga

SEQ ID NO: 26097 - DNA, 2300 bp, Homo sapien
aaggatgaagggctattcctttctcacctgtggctttggtatggggaaattgatgaatggaaaaatgttttctggtgacttgcgtgaatgaatgaatgaatcaatcaatcaatttattcaccaagatggagaatctaagtagagagaaatgtgttcagggcttggcaagatggcttgtgcttgtaatcccagcactttggaaggctgagggggaggattgcttgaggccaggagtttacgactagcctggacagcatagtgagaccccatctctacaaaagatacaaaaattagctggccatagtggcacatggctgtaatcccagctactcgggaggctgaggcaggaggatctcttgagcccaggagattgaggctgcagtgagctatgatcatgccactgcactccagcctgggtgacagagtgagaccccatctcaaaattacaaaacaaaacaaaaacaaaaacaaaagtaatgggtttagttttaaatagggcctaggttcagggtttctggtagcccagtatgtacaacctgagctcatccctagccccactgtcacaggaggatgagctgctcttttgggagattagattagagaataagggattctagcagcatctggctgctttcctgagcagcagagctccaagccccggagatagaagtcatggccacctttcaccaagtgtctggggtgcagggagggccagtctgtgatgaaggagaagaaagaacccctcagggaagactttctgggttacgggaagccctttaggctctggatttgcctcttatactgagctctccatgcagttctgacactgagattagatgagattatcgagaaaccactgcgtctgcaaatgcattcccccaaggttatttctattacctgcaaaggaaagaagcttaacacatagagtagtgggtccatatggggaaacttaatgggagaactttaacttatttaatttatagtgtttatagcccaagaagaaagaaccagaagatatatacatattttttctacaaataaagctgatcagtggcctcctttttcagggtagctgacacagttctcagcaccaccctacagctgcattttgggttcaacagacttttgtggctggcctgggaagcagatcaccatttataacattgtttctaagggagacacattccaagatccaaacaatgaatttagtaaagaatgcttggcttccaggctggatgagctggtctggctgtaccttgggggttggcctgaggctcccttcccctttggtccgcagacactgcagggttggggataggcacgtgagggggagaactctgagtagatagggaacctgcagccgggctgctcaagggcctctgtgtactgggggcgccaggaggtccagggatggaaaagggggaggtgagaaatggacaaagaaacttggcctccttggcattgctgtcacgtctggccggcccgccaagtcgaaggggcctgtttagcccctgtccggctcaaacccttttgggaataagctgggatgttagaaaaaacaaaatcccacaacctctgcctggggaatccaggccgctggaggtgggcttggtagggcagcgtgactgttccctgggagtggctgtcacagctccgggtgaaccgaggagcttgggccaagtctccatccctcttggagagggcagcagcaaggaggtgaggggagccagctcatcctccccaaccctgcactccccccccacctccccacccccagcccggaagaatcgctggcggcgggagcctggacgagctggcggggaaggggacgcagccacagcattgtctgggagggaggggagaagctccgcccctagaggggaggggagaagaggagggggcaggagacaaggggaggaagaaaggcgaaggcaaggcgaaggggtggagagtgatatgaagagcgagagaaaagagaggacagcggacgagcagatccggtaggggctgaaaaaggccaaggggctggagggagggagaggaaggaggaggggagcgaggagggcggggcgcccggtccccagtcgcgcggccaccgcctgcccagcctggctggatttgagcccggcccgccgatcgctggccgaggcgcagctgaagcagccccccagccgcggcgcccccactttccaactccacggttcctgcggcgcgggcgcgatgcagctggcccggggtgaaggcaaggcgcggggcgcggggcgcggggcactgggagcgaggcactggcgcgggatgcc

SEQ ID NO: 26098 - DNA, 2300 bp, Homo sapien
aacctgggaggtggaggttgcggtgagccaagattgcaccattgcaccccagcctgggcaacaaaagcaaaactccatcttaaaaaaaaaaagaaaatatgatttaagggtagactttaattattagtttaatatatgcaaaatattatccctgttcagatgtgttgctatattctgccttgaaggatgaaggatgaagggctattcctttctcacctgtggctttggtatggggaaattgatgaatggaaaaatgttttctggtgacttgcgtgaatgaatgaatgaatcaatcaatcaatttattcaccaagatggagaatctaagtagagagaaatgtgttcagggcttggcaagatggcttgtgcttgtaatcccagcactttggaaggctgagggggaggattgcttgaggccaggagtttacgactagcctggacagcatagtgagaccccatctctacaaaagatacaaaaattagctggccatagtggcacatggctgtaatcccagctactcgggaggctgaggcaggaggatctcttgagcccaggagattgaggctgcagtgagctatgatcatgccactgcactccagcctgggtgacagagtgagaccccatctcaaaattacaaaacaaaacaaaaacaaaaacaaaagtaatgggtttagttttaaatagggcctaggttcagggtttctggtagcccagtatgtacaacctgagctcatccctagccccactgtcacaggaggatgagctgctcttttgggagattagattagagaataagggattctagcagcatctggctgctttcctgagcagcagagctccaagccccggagatagaagtcatggccacctttcaccaagtgtctggggtgcagggagggccagtctgtgatgaaggagaagaaagaacccctcagggaagactttctgggttacgggaagccctttaggctctggatttgcctcttatactgagctctccatgcagttctgacactgagattagatgagattatcgagaaaccactgcgtctgcaaatgcattcccccaaggttatttctattacctgcaaaggaaagaagcttaacacatagagtagtgggtccatatggggaaacttaatgggagaactttaacttatttaatttatagtgtttatagcccaagaagaaagaaccagaagatatatacatattttttctacaaataaagctgatcagtggcctcctttttcagggtagctgacacagttctcagcaccaccctacagctgcattttgggttcaacagacttttgtggctggcctgggaagcagatcaccatttataacattgtttctaagggagacacattccaagatccaaacaatgaatttagtaaagaatgcttggcttccaggctggatgagctggtctggctgtaccttgggggttggcctgaggctcccttcccctttggtccgcagacactgcagggttggggataggcacgtgagggggagaactctgagtagatagggaacctgcagccgggctgctcaagggcctctgtgtactgggggcgccaggaggtccagggatggaaaagggggaggtgagaaatggacaaagaaacttggcctccttggcattgctgtcacgtctggccggcccgccaagtcgaaggggcctgtttagcccctgtccggctcaaacccttttgggaataagctgggatgttagaaaaaacaaaatcccacaacctctgcctggggaatccaggccgctggaggtgggcttggtagggcagcgtgactgttccctgggagtggctgtcacagctccgggtgaaccgaggagcttgggccaagtctccatccctcttggagagggcagcagcaaggaggtgaggggagccagctcatcctccccaaccctgcactccccccccacctccccacccccagcccggaagaatcgctggcggcgggagcctggacgagctggcggggaaggggacgcagccacagcattgtctgggagggaggggagaagctccgcccctagaggggaggggagaagaggagggggcaggagacaaggggaggaagaaaggcgaaggcaaggcgaaggggtggagagtgatatgaagagcgagagaaaagagaggacagcggacgagcagatccggtaggggctgaaaaaggccaaggggctggagggagggagaggaaggaggaggggagcgaggagggcggggcgcccggtccccagtcgcgcggccaccgcctgcccagcctg

SEQ ID NO: 26099 - DNA, 2300 bp, Homo sapien
gaagcacaacaggtacatgacctgtgtgtcccccatagcaccagacacgctaaaatggagcaaagcagcatgaagtgtgggtctgtctagatgggggggtgaatgtgcagtgactggttgatgaaggcattgtgtgatacaataaagattcagccctgttttgcaaactcagatttgcattttaaagaggtttttttttgactcagatttacattttacagagtttgttttgtgtgttttgttgtttgttttgttttgttttgttttgtttttaagacagagtcttgctctgttgcccaggctagagtgcaatggcatgatctcagctcactgcagtctctgcctctcgggttcaagcaattctcctgtctcagcctcctgagtagttaagattacaggcatgcaccaccacgcccagctaatttttgtattttgagtggggacgggatttcaccatgttggctaggctggtctcgaactcctgacttcatgtgatcctctcacctcggcctcccaaagtgcttggattacaggtgtgagccaccacacctggcctagagaggtagtttttgagcagacctggggcaggaggtgatgagccagaagactaggtaaccagatgggagaccgatagaatgaaccaggaaagcaataacatggcctgagctgggccctaacagtgaaaattgagaatatgggtcacatagaaggatagggaggtcagaaggtcattaggtgattgcttgaatgaggacatggaggggttagtgcttcttagacttctggtttgggcactggatagctgagcaccttcacctcctcaagtattctttgctgttatctaggcaggtttgatctgtgggaccatgtgtgtgtgtgtgtgtgtgtgtgtgtgtgtgtgtgtgtgtgtgtgtgtgtgtatgtgtttgacgacagtttcattttcagtagagctgctaaacgaagcattcctttgttctatcttgggatgtgtgacaggcactccagaggaaagaggaatccggaaatggaagaagggtgtgggcaaagggaacaaatcactcgacggcatggagtcgtacaatttgccatttggcatgaacattataaaaaaatacagatgcttcagctacttacccatcagcccaacctttgtgggctacacatggaaaggcctcaggaagagcgacaacagccggagttcagatgaagactcccaggccacgggatagcctttgctgtgccctgtggcctggccgcagtgaggcatgtatctgtagttccttgctgagtaacaagaagtaaaatacatgtttgtatatctacatttacattctgcgccccagagctaagacagactgcgaatcacttttctgctgtgagggtgatggtgcctgatgcggtgtctcgcctatctccttatttaagcccttaactccttgccctttgagagtgtccattgctggccatggtcactaaatttgaagttccagtcctccctttggagtggacatttaaaatctgcagccattccttgcttcagttcccttccaccacccagggctggctttcctataagccacctccagggtccaggggctttctctctctctccgaagcccctggacctgtttccttgtcatttgaccctcgtctgtgcccgcggagacctcctctgaccaaggggcactagtatgccttgcgctatcatgactgactggcccagtatgattctgttgtcgctgatctcccggaggaggaggctgttgacctgaaaacagtggcgtggctcccctgtgcccagatctggccatgggtgaggcctgcacagatgttgaatgaacatctgtttggggcattggagggaaaaggaaaggaccctgaagccaatatctgattctcggctgcaccttctcttggccaccctggccctgaccgggccagcacgtgcacactggcctcttttcatttcactagtggccgagacaccctctctggcatttatcactgttggccggtgtgatgagtatagagtgccacccaaggcaccagtcacacaagctgatgggcgtcttggctctgccgtcatgtggatgttattgtcgcgcgcgtctataattacaaggttttattcctatttaatgttattgactatagcagattttggaaatcagtgttttccatgtgaccctctttccttgcatccctattccttgtcccccacccactcttccccccatcaagaaaagaaccagcatttgtaaagctgtggacaccatcagggaagcttgttgtaacgg

SEQ ID NO: 26100 - DNA, 2300 bp, Homo sapien
ggggtcttgaccctggaacttcccttcccttctaatcagaagactccacattccttgctaagcaaacacatcgtattaaaaaaaaaaaaaaggttggctggaatacgctctatgctctcactggtgtagaatgatggttacggggcaatgcgtgagtttttctctgggtgctggtcacagcatttttgttgttgttgtttttgttttgttttgttttgtttttgagacggagtcttgctctgtcgcccaggctggagtgcggtggcgcgatctcggctcactgcaagctccgcctcccgggttcacgccattctcctgcctcagcctcccgagtagctgggactacaggcgcccgccaccacgcccggctaatttttttgtatttttagtagagacggggtttcaccgtgtttgccaggatggtctcgatctcctgacctcgtgatccgcctgcctcggcctcccaaagtgctcggattacaggcttgagccaccgcgcccggccgcatctttgttttttattttctccatcttcaacggggatcaaaacattcgacattattgaattttgcaatccaacactttcttttccctacttactgaatcccagtagggattgtgaacttcaaatatctgagacaggtctcagtcaaattagaaggttcattttgtcaaggttaaggatgggcgcccgtgacgcataaaaccaagcttagctggacctggtggtgtggtcctgtcatcccagctacttaggaggccaaggttgggggatcccttgagcctggaaggttgatgctgcagccttaattgtgccgttgcactccagcctgggtgacagagtgagaccttgtctctaaaaaattaaatataagcaaataaaaatgcagttattagataaataaatgggaagacacattattgtcaagacacagaccacacttgcctatttcataaaattcctttagttgctgctcccccaactgcattaatatgtgtgatgtcactttccaaaactgtgtaaaacacataaataattctgattataaaatcaatttctctccatgtgaggtcagacagacaccgtctacaattctgtttctcaagagttgcccgggaactagtacattatcattcagttagtaaagcaaccatgacaacggtttcaagatggaaggtgttaagaaagtactaattattagaacatttaaaaaattgtattcagatttcagcagtggctcaatacgtgtggtccccagaccagtagcatcagcatcacctgggaacttggcagaaatgcagattctggagcctcacgccagacctccagccttagcaactctgggggtggggcccagccatctgcatcttaatgaagtcctcaaagtgaggctgcccagctctaagaccgagggccagggatttacacttggcctttctgcttagcggtccaagaacctcacccgggggcatcacctggggacaatttagaagtgcagacttttgggctgcaccccagagccactgaatgtgaacccgcccctagcctaacacgacccccagagaattcacgtctgaaaagccttggtctgtattacgatctctgcatgaggtaagaaggacttcttctccagttaggttaaaaaaactggctacctaagtggagaagcggtgaaattgttttaaaacatccaacccactgagcccaatgcaccacaaactgcttgcttatcacgctcgagcaatgacagggctcggtggcaggcggggtaaaaaggggggacctggaccaggacactcagggaccagcgctctgcttgccaggtgggtccccaggaacaggtgtgactggtgggaagggtcgcgaaggggggcgatctttctgcgcaggggagggaaatgaaaggaacgggaaggggacggctgggtgcgaggcccgggatgttccggggagcgctgccgggtgccagggagcagcccctccccggggggaggcccgagggcaggggtcgggggcggggagggaggtgggccccagaccggcgcgggggcgggcggctccgctgcaccccgcccccggcccgcccctccgcggcgccattttgcaggcggctgtcgcggggaccggaggcggaggctgcagcgggcactgcggcgccgaggcgcggcggcaggacgggaaccacgcgagctgcagccaggtgagagcccggccgccgcgccccctgcccggcctgcgggccgcacctgccggcggggccgcgaggtgctcgccgcgcccacgaggccggcctggcacg

SEQ ID NO: 26101 - DNA, 2300 bp, Homo sapien
atagggcagacgaaattgtcttaagtttacatactaggaaacctaaatgtagtttggttatatgatttccccaaggtcactgagcaaggcagaggcaggccagggaccctgtgccttttctcgccaaggctgcatgaggtgtataactcatttattctaggatcaaagaaatattcaaacttaaaccttcacatcctgcagtacagacacatccctcttttctaaggcacacattcctggagacagcacctgggacccattcaagaccctgagccttttcttgtgccccaggccccacctcagacagagaccaagctgtttgaaacagggaacaagcccagccgcggtagctcacacctataatcccagcactttgggaggctgagacggggcggggggaggtggggatcacctgaggtcaggcgtttgagaccagcctggccaacatggagaaaccccgtctctactaaaaacacaaaaattagccaggcgtggtggtgggtgcctgtaatcccagctactcgggaggctgaggcaggagaaacgctagaacctgggaggtggaggttgcagtgagccaagactgtgcctttgcactccagcctgggcaacaagagggaaactccatctcaaaaaaaaaaacaaaaaacaactttttgtagtatacatacagagaaacacacttaagtgtgcaggttaatgaaatctcacaaagtgaatatgcctgtgtgcctagcacccatagcaagacatcacacatggccagctcttcagaagacccctgtgcctttgcttagtcactatgcccccagagggtgacagtatcccaaattccaacagttttgtttgcctcttttctttaaaaacaaaacaaaacaaaacaaatttgctgtcatccacttcctgtttgaaactcttttctttttcttttcattttacctgtccctcccattcaacctcttttctactttatataactactgatagatttttgtcctttttccttatttccccctcaaagactaagtgtgtccatgagggtctaggttaaattcccttattgaaaaaagcttccctccctttcctccttccttccttccttccttccttccttccttccttccttccttccttccttccttccttccttcctttctttctttctttctttctttctttctttctttctttctttctttctttctttctgtcttgacaaggtcttgttctgtctcccagcctgctaggctgacgcgatctcggctaactgcaacctccacctcccgagttcaaatgatcctcccacctcagcctccccagtaggtggaactacaggcgtgcaccacgatgactagctaattttttttttttctttttgagatggagttttgctcttgttgcccaggctgtagtgcaatggtgcaatctcagctcactgagacctccgcctcctgggttcaagtgattctcctgcttcaacctcccgagtagttgggaggcacatgccgccacgcatggctaattttgtatttttagtagagatggggtttcaccatcttggccaggtggccttgaactcctgacctcaggtgatctgcatgccttggcctccctaagtgctgggattataggcgtaagccatcgcggccggctaattttgtattttatatagacacggagtttcaccatgttgcccaggctgggcttagactcctgggctcaagccatccacccacctcagccttccaaagtgctggattacatgtctgcgccacagtgcccaacccaaaagtctcatttctataccctggcactggagccttctgtgttttgcctgtaacctatgttttccacttggcttatctgatggttaattatatgtatcaacctgtctgggctaagagatgcccagatagctggtaaaacattatttctgggtctgactgggacggtgtttgcagaagagataagcatttaaatcagtagacagaaaagttccactttcacccacgtgagcaggcatcatccaatccactgtgggtccagacagaacaaaaaggcagggcgaaggcacatttgcaccctcttctggagcagggccattcatcttctcctgcccttggacatcacagctccaggaactcagatcttcagactcagggtgaaggacaccaccagctttccaggttccccagcttgcagacggcatacggtgggacttcttggcctttagaatcacgtgagctaattcctgcaataaatcccctctttcatatcctctttttttttttttttttttg

SEQ ID NO: 26102 - DNA, 2300 bp, Homo sapien
ctgtcaccaaatttgtacctctaagtacatatgtagatattgttttctgtaaataacctatttttttctctattctctgcaatttgtttaaagaataaagtccaaagtcagatctggtctagttaacctagaagtatttttgtctcttagaaatacttgtgatttttataatacaaaagggtcttgactctaaatgcagttttaagaattgtttttgaatttaaataaagttacttgaatttcaaacatcacagggcagtgtcttcattttgaccaggactgttggaagtatcctactgaattcccagctacagctaccctttcgtttaaatggtttttcagtttagagcagcctgatggagatcaaaaggatttcaaatacagtaggttactagatattttaggggattcacttgtcaaacttgttattccaatttgagctcaaggaacaagtgagagagtagtacaaatcctgtgtatttcattttacttggcaaaaattaatactcttcagaagcttaatgtaccgaaagtcgtgtgggctttataagatgttaatggagtgtttctttttagcctggggaatcttacaagagtcttggatgtttcagtagagctgtaatggggcccaaggagtatggttgtacaaaatttctctagtataagtacactttgcaacttcactcaaaggatgaagatgtcttaaattccacggatgttggatccaaccaagaaagtgaaaaagccctgaagttgtgaagaaagacttaaaaacattcccactaatagctacaagttcactgtgtgctgtgtattaagaattttttgccaggcacggtgcctcacacctgtaatcccagcactttgggaggtaggcggatcaactaaagtcaggagttcgagaccagcctggtcaacatggtgaaaccccatttctactaaaaatgcaaaaaaaaaattagccaggcatggtggcacatgcctgtagtcccagctacttgggaggctgaggcagaagaatcacttaaacccaggaggtggaggttgcagtgagccaagatcatgccactgcactccagcctggtcaacagagtgagactccatctcaaaaaaaattattggctggtttaatagtagtaggttatcagaacttactaacattagtatcactaaagtaggtatacaacccctgctgctcaatttggctttagaaaaaacatttttaaaaactgctttatcataatccttttttccagtgcatttttgtgtttggtagattaaatgactgatttctttcttaaattacttggactgagttctagttactggacatgagaattaaccatgtccagtagtaagttcattttcctacagtgtgcctgtgagtggagaaggaaataggctgcaaaagagcccgatggaactttggggtgatggatatatttccatctagattggtgatggttctaggaccgtatgtattttcagagctcatctatttgtacttgtgtataaatacttcaataaacctaactttttaaaaagcttcatttgccgcaaaatgtcccttgtgggcaggccttttacctggacaagccctaaagataagcacaagtttgtggggctattcaagggaagtatagtggggtgctgacagcacagacaagtgtgctattcaagggaagtgtggtagtggggtgttgacggcgcgcgcccatggaaggctggcgccttgcagcggatatctggccgctctgactgctggtcctgaggctcgacggactcggcttctgcctccctgggaagccacggcggtctctagcctggcccctgtactgaggaggggagaaaccacgtagccggcttgccctggacctgactgtgacccaggtaggtgaggaccctaggtgctcgcccgccacagcggaggtagccggcggcaggcacaggtcgcggctgcttaaacaaaacccacgaagaagcattcgggccgtgcagccccggagtcccggtgcctcctgcaggtgacactcggtaagggttagcccgggaagctgggtaaagagacaaacgcttccggagacgcaacttccgacgcgcctgtttccggcacgccacttccggcgcactgatcccgcctggggccggctgagtggcacttaagcgggccatgccatgcaaccttgggcgctgccaaccgtgggcgagctctgggtgtgcgggcggcctggcgcggcgctccggtaaggcgtgtgtgcggcagggcggggacagaaccgtcctctcgggctctgggcgtg

SEQ ID NO: 26103 - DNA, 2300 bp, Homo sapien
gctgaggcatgagaattgcttgaacccaggaggcggagattgcggttagccaagatcacaccactgcactccagcctgggtgatagagtgagactctgtctcagaaaaaaaaaaaagaaaaagaaaaagaaaaaaaaaaagaaattctaagtgataaagcattgtgtaacagtttgaggctgggcacagtggctcatgcctgtaatctcacactttgggagaccgattgggaagattgcttgagcccaggagttggagaccagccagagcgacatagtgggaccttctctctacaaaaacatttaaaaattagccaggtacagtggtgcacccctgtagtcccagctatttgggaggtggcaagaggatctctcgagcctagaagttggaggtggcagtgagtagtcatcttgccactgcactccagcctgggtgtcaaagggagactcccctctctagaaaataataaaaaaaaaagtttgacagttttcttgcttgtgctacataaaataatggtacatattacaattgaaggcatcttataatagaaatgccctttcctgttcccttttaaggctgacccagtgctttaagaggctgatacagaagggtaaagttaagtctccacaaaatccagggaagagactgtgaaactcatcttagaaccttgtatggagtcacagctgaactaggaaaaaaaaaaaaaaaaaaaaaaggaaagaaaggcattccagagataaagaatagactaaggagaggagatatttgaagccataatgattgagaatatgtcagacttgaaatgaatcttcagttccctcaacaagacaaataaaactaactccatacctagatacatggtagaaaaactaaagaattctgctgaccaaggtattaaaagtaactaaagagaagtggtgtgaagaaagcaagagagaaacaacaaatcctgtccatcctgtaacaattgaaaatttctggctgggcgtggtggctcacgcctgtaatcccagcactttgagaggccgaggcaggtggatcacctcaggtcaggtgttcaagaccagcctggccaacatggtgaaaccccgtctctactaaaaaaaaataataataataatacaaaaattagccgggggtggtggtaggcacctgtaatcccagatactcgggaggctgaggcaggagactcacttgaacctgggaggcggaggttgcaatgagctgagatcgcgccactgtactccagcctggatgacagagcaggactccatctcaaaaagaaaggaaaagaaaagaaaaaatattaaatgtgtacgctctttgactcagctgtattacttcaaggagttgatatcaccaaaattgcctaagtgctcaaaggtgtttgtagttaaacaacaggagattgataaattatgttatatacatgtgatgctatgttttaaagaggtactgatatgataaaagatgtacgtggcataaaattaaatgtactttattaagtacttttccaagtgtttacggaatgagtgcatttttgaaaaaaaaaaagtgtattcgaacttttaaaaaagctttaaaagctttatacaatgaacgattgagtgattataagagctggcgggggaatgttaagaggatgatagggagctaagtttaacagaacaattcacctctttatcttgtgacacctacgagcgcatcaattctgtaattgaaaaataaagtgcatatttgcagcagctgtactctcttcaggctgcaaggaggcttttcctcccggtaggcttgatttgcatttcactttcactttcgtggctggaaactttctacccacgtagtgggaggctgaggagccaccataaagctggggcttgacgagccgggaccgggacccgatctccacatatgcccggacttgttctgcggccgggttcaggagtcaaagaggcggggagacctgcgcgacgctgccccgccctgcgcccgcttcctccaatgtatgctctagggggcgggcctcgcggggagcatggacacgattggccctaaagtcttccccgcaaggccgtgggctggacagcgtggtgacgtcgcaacgcggcgcagggtgagagcgcgcgcttgcggacgcggcggcattaaacggttgcaggcgtagcagagtggtcgttgtctttctaggtctcagccggtcgtcgcgacgttcgcccgctcgctctgaggctcctgaagccgaaaccagctagactttcctccttcccgcctgcctgtagcggcgttgttgccactccgcc

SEQ ID NO: 26104 - DNA, 2300 bp, Homo sapien
ttccaccagacccctgttcgtcacacagtactgacttcaggaatatacttgatctgagttccattaacctgagagggctgagtgtaatggatgagaagtttgttcagaccacatgttatccatcctagtaatcatgctgtgcattctataattctgacttatgtgcattgattctccaagcctccttttattaggctggatttgaaaaggagcagctgagtttctagaaggactgacatgacactcacttagatatgacctttcatacctacgtgcccctgaaggtgaagttctagacactaacatcttcacctgtcttagaagatcatcttgctcgagtgctgtggctcatgcctgtaatcccagaactttaggaggcctatgtgggaggattgctcgagcccaggagtttaagaccagcctaagcaataaagtgagacttcatcgctacacaaaaatttaaaagttagctgggtgtggtgctgcacacctgtagtccaagctactcgggcatatactcatatagaaatcaggaatatataatgctgttttcagaattctcactacctgccccaaaactcacagctcaggtcaaaattaccaataggaaattttagccaggcatggtagctcatgcctgtaatcccagcactttgggagacctaggcgggaggatctcttgaacccaggagttcaagaccagtctgggcaacatagtgagaccctgtctctaaaaaaaggagaaataaattaattaaaatttaaaaattgaaaagaagaaaaatgtaaaattatatttttttaaaaaacgaaattgcaattcttttgtgtgcaagtgtctcattgtgagattacagtatgcttaagttggggacgcagtgttatatgtgttttacatcacttacagggcagtgaatagaaagaacaggaaacaccaaaggcaatgctggagcaacacaagtattaataaatgcaggcaggcagtatagtatggtggttagagtgtgggctggtaacaaacctgtttgtgttctaattcttactaggcactttctagctgggagaccttggctaaggtccttttaaaagttttaaatccatccaacaagtacttacaatggatgtgtcaaagacatagaggatgcacagtaaacaaagtagacagcacttctgtcccaaaaaaggtctttccatagtccagaagacaaatttgaaaaactgaggaagggccaggctcggtggctcacgcctgtaatcccagcactttggaaggcggaggcggacggatcacctgaggtcaggagttcgagaccagcctgaccaatatggtgaaaccccgtctctactaaaaatacaaaagttagccgggcgtggtggcgcgcaccttggaattgtttgcgcccgggaggcagaggttgcagtgagtcgagatcatgccactgcactccagcctgggcgacagagcgagactccgtcacaaaacaaacaaacaaacgaacaaacaaacaaaccactgaggaagatcttaactgtaaaattcaaatcatacccacttccaagccatgtgtggattaaacgagataagccaactaaagcgattactcagctcagtgcctagtatacaattagtgcttaacaagtactagcgaccgcttggcaaagcaaagcagactgaagcgtgggtttcatttctcatcatgtgataagtgataaaatgctcttaaccaggtcggctcacctggcctttccattcgacctaaataacgtctacttacttgcgtaagggaagagctctggcccaggtcagcaagcatttgtcaggctagagcctccgggtggcgcttctcgccctcagtaaccggttacctccagaaccagggcgccagctccggccatccgcggttaagcgggagctcccattggctaatcgcacactgaaacgcacgccttttcccgcccctgacgctgccgtccaatgcgcgcctctcgactctgctccgccccgccccgcccccgtcgccctgcctccctggcgtatttgcgccattggtggatattccggaccgtgatggtggcgctgcgcgtgcgcactcgctccgagccctgctcccgggagagggagctctcgggtcggggctagggaaggctgaccccgctcggcccgggtgaaagggcggtgacggcactgggtggggccgagctccagggctggctgctgggctgctaagggaactgtgagccgctcagagccgcgcgcctcccgggcggggcggggccggccgtgggagtccgcgcgtgcc

SEQ ID NO: 26105 - DNA, 2300 bp, Homo sapien
tctttcaggctgaaccaggatagccaaatgaaaaattagagacttcaaagtatcttgtctctgcaagcgactgctaaatcctcagccccagccctaaatgttctccaaaatatgtttttgtttttgttttttgagacagggtctcaaactcctgggctcaagcgatcctcctgcctcagcctccctagaagctaggattacaggcgagcagcactgtgcctggccaaaatatatgttctaaaaatcggtaggaacagttctctttggatagtccactgtcaactgcaataacacgaaagttgtttaaaaaaaacccatgatctcattatctttcaccaaaaacattcctcctagtgtaactgctctgttgacatcctgtcaccaaatcttgtgctttcttccttctgggtgtctccctaatgtccgttgcgtccagtcatcaaaaagttacaggctgcattaggggaagccgtgagcctggtgtaaggcaacagggattggtgggaaccgatgatcctcagctccagccaaccattgagcaggtgacaaagtgatggtggaccctccaattatctaagacaggcaagaaatttagattgttaggagaaactttctgatttttaaggcaatatgtgggccaaagaaaacatctacaggtcactcatgggcaatcccgagtgaaccaggctccctcagtctggtccaggctccctcagtcccttctacacatcactgtctgatcagtttcccaaacacagggctcctgatcactgctatctcggaaagcacaactactgctacaaagtcctatactgccattcaacctccacagtaataaaaccaatccctaccttccttaactcccctacacagatctttcacttcacccaaaggagtccactcccccacccgtcacccccgccactgtccccgccaagatggcctccttcctactctcctcccctacccaccagagcccacacggtgcaggaaacaacccatcaaccgggaggacgccctccaacacctgctgatgacggactggctcactgggtaacacccctttgctcaaagccgatgatttcatgcccaagaagggatttacatctcccaggaggcaaatgctatggccttgtcctgattcccccaccccccaaaataataacattgtaaaagggaacggagagcctaagttgcgctcagaggagccgcctccctaagaaggctctgcatatcttcacctccaggaaggcctcacggagttgggggagaggggagtccccgcagccagcccagcgaggcaggaggccgtgcgccactcccgagaagctccttcctgcgccccgggggagccacttcagtcagaccctgagccgggaccccgacccgccgacccctgacgcgcgcgccgcgaaggccgggcacccgagggcccttcgcgctacccgggcccggggccgccgtcggctgcgacaaagggtcagagaacaagacgacccctctgcgcgcgtcccccgcaggcctcccggatgcgccgctgtcccggccgcgcccaccccgacgctgccgctaccttgtcctcgggtggcgcaaccggctcatgggccaccctctgcctcagctctgtcatcctgggaaaatcggcccgacgtcgccgcgagctagcagcgaagccgccggagcaggcagctcggcgcgggcacgcgcggactcccacggccggccccgccccgcccgggaggcgcgcggctctgagcggctcacagttcccttagcagcccagcagccagccctggagctcggccccacccagtgccgtcaccgccctttcacccgggccgagcggggtcagccttccctagccccgacccgagagctccctctcccgggagcagggctcggagcgagtgcgcacgcgcagcgccaccatcacggtccggaatatccaccaatggcgcaaatacgccagggaggcagggcgacgggggcggggcggggcggagcagagtcgagaggcgcgcattggacggcagcgtcaggggcgggaaaaggcgtgcgtttcagtgtgcgattagccaatgggagctcccgcttaaccgcggatggccggagctggcgccctggttctggaggtaaccggttactgagggcgagaagcgccacccggaggctctagcctgacaaatgcttgctgacctgggccagagctcttcccttacgcaagtaagtagacgttatttaggtcgaatggaaaggccaggtgagccgacctggttaagagcattttatcacttatcaca

SEQ ID NO: 26106 - DNA, 2300 bp, Homo sapien
gtttgcgattaatgggcaggctgcttttcactgaggagtccacgtttccagttcagagtttagtttctctcacatcctttgtgaacagttccttaaattctccaggaagaactgggaaacatcttaacctaggtgaatctagtgttaaaacttttggcccttgagaacctggttcttttaacacagctatgtgagtagatcaaaaacacattataagaccccaaagcattatctcagtgttcctatgtgtgcctccaactgtccccttgggagtctgaattgtgcagtggttaagggcgtggactttgcagccagacccttggattcagatcccagctttactgtttgccagctgtttgacctgtgcctccatttcctcatctgtaaaagcgaagtgtgttgaggattgaaggagttaatatatgtaaagtcctcataaaattaccttactcaggccgggtatggtggctcacgcctgtaattccagcactttgggaggccgaggcgggtggatcaggaggtcaggagatcgagaccatggtgaaaccccgtctctactaaaaatacaaaaaaattagctgggtgtggtggcaggcgcctgtagtcccagctactcgggaggctgaggcaagagaatggcatgaacctgggcggagcttgcagtgagctgagattgtgccactgcactccaacctgggctacagaggaaactctgtctcaaaaaaaaaaaaaaaattatgcatatttatggtagctgttattatcattgcataatgttactattattcccataattattcagggcagtgcagtgtaggatcctgctgctggaaaaaaatatttttttcttcagatagtcagctgtagaaaccatccaagtggatacagaagcagagggcactacatttcccttggtttttttgtttgtttgtgttttgcctgataccttctttaagatataagctaggtttattttttgccaagtttggttgtgacttaggcattggtactagtggtcctgctcctgccagcatgtggctggtgcctccgtcacggtgaatctggaaaggactgagctcagggccctcatctcaggaagatccatatcccttgagtttgtgcattggtttttttctgggctcctaactggtgttttctccttcccctgctctctgacctagatggaagaactggtgggtgagaggcatcctgactttggccatgattgcatttttcttcatcatcatttacctgggaccaatggttttgatgataatcgtaagtgccatttcacactattttagttttcccttcagtttttgctgcaggcccggttgtcttaagtgcgaggtgttgggttggttgtgggaattgacgggggtccaggcttctcagaaaacctctgccatagaacatctgtgacttcccacttctcagtagccacctggagggtcattggtgtaggctggttgtttatggttgaagatgtctcagtgtcttttcttttaaaaaactgactttattgcctgtgatcccagcactttgtgaggctgaggtgggcggatcacgaggtcaggagtttgagaccagcctgaccaacatggtgaaaccctgtctctactaaaaatacaaaaattagccacgcgtggtggcacgcgcctgtaatcccagctactcagggggctgaggcaggagaatcccttgaacctgggaggcagaggttgcagtgagccgagatcatgccactgcactccagcctgggtgacagagtgagactccatctcaaaacaaacaaacaaacaaacaaaactgactttattattccaactctgtaaacttttaccctgggcatgtctctatatgactcctggtttcgtttcctgttttcctggggcctcccttctgggcttagagcttttgttaaggaaatcccagtccacagagctgctctgtctgtcttcccactgtcctggacagggtcaggtgaccatcagctgcatgtgagcaaagcatttgactttgaatacttgagacttttcaagtattcagagtcaaaaggagaatggattggttgaatcctgggaggttctagaataaaaagttaaaaaggaggttttagaataaagttaattgagggtcaggcatggcggctcacgcctataatcccagcactttgagaggccaaggcgggaggatcacttgagcccaggagttcgagaccagcctgggaaagaaggtgaaacctcgtctctacttaaaaaaaaaatccttttggctgggtgcggtggctcacgcctgta

SEQ ID NO: 26107 - DNA, 2300 bp, Homo sapien
ctcatttgtctcttttgtcccattgtgggcatatggtgggctccttgagaggagggagtctcagctggggcctggctgcagagacctgctcttgaatagggctgcctttgggatcagggagccgagcatactgggcaaggctcatcatgttcctttgtggaagtggttacttggtgggggtggggtggggaaggggggtctaggaagccgaagctgagtgcgcactagagctgctagcaggcaggccagagggtcagcttgtgttttattttctgatttctcctgcatgctttctggagatgaggattttttgtcaggtagctaggagagcactgccaccttgtgtccatatagcacaatgtttctctttcctattcacagacaagattcaagaaaccatttttacgtgtgtacattcaaatcttcatgaatggcatcacttgctttagacccattttttttttattggtcagaaataaaatgtgactgcaactgtgtgccctcccttgtcgtgaattccctgtttatcacttccatgcatggttttatgcttctcatttgtttatgtattcatgaatactgcatagtcctgattcagagacttttgctttgctttccaacttgtatccctacattctcacaacagccttcttacctcgggtgagagtcatgagcaccttaccaggcagggagcttccccaggatagtgtggtggagtcaggactcactccatcctgcactttacccacaggacacctggagggtcccccagccctgcttgcttttgtgaacgtcgtgtgagtacaccgaggtgttgcagctttccttccctctagctcaggaggcctggcctgagccaggttggagcttaaattgctgttggctcctgcctggtggaacaagggggtcatagaaaccagggctgatgggcaccccccagcccctgggagctctgctcatgaccgctcacagggtaccgagtctttgccttttgtgtgtgcgcatgctgccctcttaactgcttttagtattcagaaaggttccatttatgttttactcctgaaagtgaaaccctcttaggcaacttgtttcatattctgggcattttagtagctacagtattttgcatttaaaatgtaattactcttagtattgtacagccctataatgtatgagaactagtttcacatcctttgaaactaatctctttcattggggaggatacaacttttgactttacacaggtggactttgaatccatttttatagaatttttttccactgtaacttgacctatattatgcaagaaaatcccaaaaatatgttttaagggagactacacagaccttgtgatttggtctgagctagttgctgagttgactggagccttatttgaatggatctttgagttgagatcttcacactgtcagtgagcccttggctcagcccttgtcacctgtttgtatggggaccatgtttcccaaagctcaggttcatctccactattgacagagtcgggtagtgggagagtataagtgacttgagacagagtgtccttgctcagaaaactgtgaagcaggggtcttgttagttacaaagccagtcctagttgcatgtccaagggggtagattttcatcaccctactaaatgtggtatgtcactgctgaagccttttcctgttttagtaatatcttaggcactattgtcttttgtcttccagagtaacatatctgggcccacctttcttgcacactgtgattatgtgctaagaaaagggtggagttgggaggacaatttcacttgaacaggtttctgttcttctgaggtcagggtggggaggatgtccaggtgacttttatggacacattgcaagacagtaagccgcggatggactctcacttgtgctttggaacactggactccaaagagcaggtggaacaaactctggcctgaagatgatggctaatactcaggcagagccccgtattcttccctgacttggtcaaaacaaacttccttttcccttgatcaccctgcacgcagctgcccagcttccagtttttaaagagatgaacagctctcacttcctgactcagtttctcttgttgggtgggggccttgtgccacaacctgcatggggtgctagggtttaaaccaagtggtcacgaaggattcttatctcagggctctgcctggcccaccttctcttgggcctggactctccttatccacatccctgcagaaggtgggccctattctcagaagagtcctggctgctgttgccatctgaatgcgccct

SEQ ID NO: 26108 - DNA, 2300 bp, Homo sapien
actggtgaggagcacagaaggttctctagctgatggaaatgtttcacatctccacctggagggtggctacaggaaaagcctagtacatgttttcctgactggaagctgccctagttaactctcatgtggcttctaggtagtagctgcctgccctttctgctttccctttgtgttggtgccacatactgtcatgtggcatgcctgtatctgaagcacatgtggtatctgggggcatggcccagagatgggccactcagcagccccagtcttgctcacatctgggggaacagaactcaactggagaaacaagacctcctcttgccctccaaagattggtgagcattcctatctggagcaatgtcagcctgtcagagcctaaatgaggaaagagacagcctggcccagccccaccactcaccccacccaccatcctcacctgtcaatggcaatggccagcaaggcattggtggagacgtagagggagacggtgcgcaggtagttgacggaggcacagagcacgtggccatgctcccaggagagctgccgtaccacgtagtagtccatctcgaaggggcagcagatgatggccaccaggaagtcggagatggccaggttggcaatgagcagattggtgaggttgcgcaacttcttatagcgggtgagggcagcgataaagacaaagttaccgatgccgcagaccagcatgatgcctgccagtgcaatgccaatgacgatcttggctgcgaagaaggtccgggtcttggtcatgtcctcatcctcatccatagggaggtcataatcaccataactgaagttaaaggagagggaggaggcatggtcttggggtggattaaagttgggtgtgaaactggtgtttccattctgggctgccatggtgatgtctgcaagaaaagtggtgtgagggaggtgcgaggggtgagggtccagaccttctgctctttcagggtcagtgagcctagcaccctgcccacatccttggggagagttgactcaccgtcctggatcctggaaggaggcacaaccagtgggcaacatgcaggagaacatctggtcacattccctgagttccccaagtataggccaaccagacccactgcctaaccagatggaactacccgggatgcggggagaggagacctgagatctgtaagttgggaaaccctccgtggctgcccagctgtcaggaaggacagcataggatggatcagactgtccagaactctcaagaagaatgtgcacctttgccctttgcccaggggccagggcctctttgtctgcccagtcacatcctccagcccccaacacatcagctcccacaggggcttctggaacatttccaaggatgctcccatgagctggccaggctcctacagctgtcacaacgttgtggcacctgttggccagggacaatgaagcaggagggccaggatgctgcggggtcttctctccaaagcaggacaccactccttctgtactgaccaagccatagacttggaaatcaccaagttcactttcacatggacagactgagtcaccctgggccagtgatttatgctctctgagtcctaatcttcctgtaaaccaaattcctgctgcccagtccagtgcctggtgcatagtgggggctagacagacatctgttgagtgcatgaccagggcgctgtaggtggaggaggtggtggtggggtgggggaggggaattcccctgctgctccccgttctgtgggaaccagctccagaaagaaatcctctgccgcccttcccaccctactccaactttggatctgctctctgacctccttcacttggccctagttctccacccagagtcaaccctgcctgaaaggcaccatgtcctgtcaccaaggtctcaaaatagggaaaatagtctctgaagccctcagcccgcaggagatagggcaccccagggtacaaggcttcaccgaggggctggaaaaagagcccagatcccaacacctatagaaaggggccctggctgtccagctgtgagtggccttcccctcgcctctcagcacacctggaaacgactccacatgtgggcgccgcgggatgctgggtagcaaggagatgacccagctgaacaatgcatttggtccactcctgcgaggggaggagaacgccgagggacaggaactgcgcgccagcaaaagacaccctaacctggggtgcgcccgccagctgctttcccaaggtgaaaacctccaagaggcgagatgcaaatcccagtggcgtccacacccggaggtgtcttctctcca

SEQ ID NO: 26109 - DNA, 2300 bp, Homo sapien
ccgggactcagtcggtgcggtgggggagtcgctaggacaagggcctctgacgcccacttttttctcgggcattccggctgctttgcctcccgccactctcgagatatgcgtcggggctggctccaagcaggcgagttggtttcaggagatcccctctgggccctctaggaccgggtagggtacggtaagcggagtctgtggtgtgcgggcgcgggcagagggagccagcgggtagctgagctcgcggacgagctccaaattgcaggggagggtgcaggtagaggggcaccttcctgaaaggtgagcaggaaacagcaagcgtccgtggggaaattcccgcgcaccgcatcctccacccacccgccgttttcttccagccaggaggcaccgcagcctttgcttctagagcctgaatttctgacttgattcctgtctttgccaggatgtcgcctctagacgccgacagtgcggccgcgttgatggggcgggaagggggctgctggaacgggtcgctcccgggcggggagtgcaatctacgaaaatgcggctgggacctgtcccagcccgggcgcgcgccctcttgtcttgggttagggggctggaaagccgaggaggggtaggactccccattcttggtcccacgctgagcagaggctgcggggattggggtgtcgcatgagacggaggggcgacctggagagaagacacctccgggtgtggacgccactgggatttgcatctcgcctcttggaggttttcaccttgggaaagcagctggcgggcgcaccccaggttagggtgtcttttgctggcgcgcagttcctgtccctcggcgttctcctcccctcgcaggagtggaccaaatgcattgttcagctgggtcatctccttgctacccagcatcccgcggcgcccacatgtggagtcgtttccaggtgtgctgagaggcgaggggaaggccactcacagctggacagccagggcccctttctataggtgttgggatctgggctctttttccagcccctcggtgaagccttgtaccctggggtgccctatctcctgcgggctgagggcttcagagactattttccctattttgagaccttggtgacaggacatggtgcctttcaggcagggttgactctgggtggagaactagggccaagtgaaggaggtcagagagcagatccaaagttggagtagggtgggaagggcggcagaggatttctttctggagctggttcccacagaacggggagcagcaggggaattcccctcccccaccccaccaccacctcctccacctacagcgccctggtcatgcactcaacagatgtctgtctagcccccactatgcaccaggcactggactgggcagcaggaatttggtttacaggaagattaggactcagagagcataaatcactggcccagggtgactcagtctgtccatgtgaaagtgaacttggtgatttccaagtctatggcttggtcagtacagaaggagtggtgtcctgctttggagagaagaccccgcagcatcctggccctcctgcttcattgtccctggccaacaggtgccacaacgttgtgacagctgtaggagcctggccagctcatgggagcatccttggaaatgttccagaagcccctgtgggagctgatgtgttgggggctggaggatgtgactgggcagacaaagaggccctggcccctgggcaaagggcaaaggtgcacattcttcttgagagttctggacagtctgatccatcctatgctgtccttcctgacagctgggcagccacggagggtttcccaacttacagatctcaggtctcctctccccgcatcccgggtagttccatctggttaggcagtgggtctggttggcctatacttggggaactcagggaatgtgaccagatgttctcctgcatgttgcccactggttgtgcctccttccaggatccaggacggtgagtcaactctccccaaggatgtgggcagggtgctaggctcactgaccctgaaagagcagaaggtctggaccctcacccctcgcacctccctcacaccacttttcttgcagacatcaccatggcagcccagaatggaaacaccagtttcacacccaactttaatccaccccaagaccatgcctcctccctctcctttaacttcagttatggtgattatgacctccctatggatgaggatgaggacatgaccaagacccggaccttcttcgcagccaagatcgtcattggcattgcactggcaggcatcatgctggtctg

SEQ ID NO: 26110 - DNA, 2300 bp, Homo sapien
ctcattcttgtatataacagtagatcaacatgcaactgaagaaagcactactcaggatggaagtagccttgggagggaggcaaggagtagtgaggagggagagaatgagctgtttctgtaacatttcatttcataagagagatggatggacttcaagcatctgtggcaaaaggtcacctcagataaatctgattggttccaaattattttctgtaatcctccctatgtttgactcattattttaattaaaaagaaaaaatatttaaagtaattttaaaaataacagagctcaccagccccttagagcgcagcttggtctagggtagtttctttaactagcagagctttctgtagatacagacatgcgttcacaaagtatctttaggtttcccaggcccggaggggtgagataatactaagggagggagatctgctcttggaggagggacctgctctaaccagccctgtagctctgcaaatctttgggattttgtccttatctgtaaatagggatgacgtttgtcccatttatctcattcagttataatgtgcatcagataagatgatatttgtaaaaacaacttgaaaatacaaaatgatgtacacaggtattatttagttgtgaagctctaagtcctgaggcctcgtttatattaacaatagcaataaaaataacaatacagactgggcgtggtggcttacacctgtaatcccagcactttgggaggccaaagcgtgcagatgacgaggtcaggagtttgagaccagcctggagagtatggtgaaactcagtctctactaaaaatacaaaaattagccggacatggtggcgtgcgcctgtagtcccagctactcgggatgctgaggcagaagaatcgcttgaactcgggagacggaggttgcagtgagctgagatctcaccactgcactccagcctgggtgatagagtgagaatctgtctcaaaaacaaacaaaaacaaacaaacaaaaaacaatacaatggcaagggaagaaataaaaggagggtgtctaatgtggtaaggagggaaggaaaaatgaagaaagaagaaaaacctattgaaaatagccaagaaaacagctgcccttctaagatactgacttgagggctttcaaaataatggaaattatgcttcacaaaaaataatcccaatggtcatggtcattagaatttagaacaatatttatatggctccctgtggtgaatcaacaattattttctatggcttcaattttcagagtttaaataatgaacatagcaataccaccaaagaaacattcattaaatatcaatataaaataaagtggaagaaaaagagaaaaacagcaagctgctgattgcagtgtttgcaaccgagactctgttctgcaaaccctgggggatcagcgtggattgagctattactagaggttggggttaaacacggtaggctatagactttctgggggagaaaccagtcaatttctattctgaaaacctggcactgcctaagaaaatccaaacccttcaaacagaagcttcgcaagagtgtagttaatggcataaaagagtgctcagaaactcacccacagagactttctgatagctgatgccaggaacagcaaaaagcagaatgtccagttagggatagttaaccaagcccctctcaattcttcttcttgaggctatcctctcctcactggtccccattttataatcatgctcaaggagcctaggcttctcttcttctcttacagcatgtttaatatcactactttatccattctgtactgttgcaggctgaaggtgacattacacttagagggatccacagattcaagaggctgcttggggagggcagcacagtgaagtacaaggactttgacatcagagaggcctggattcaagtcccaatttctgtgtgtggtaaccagtctgcaagacagcctgtgatggttcctgcctcctcgtattcatgtccttcttagttcccttgcgcattgaatcagggctggctctgggtgaccaatagaatgtggaggaagtgatggggtgtgaattccgaggctaggtcacaaaaggcattgtatcttccacctcttagatctctctctctgcggaagccagccaccgctctccaaggactctcgagcagctccatctacagattcacatggagaagaattaagggttcctgccaatcaccagcaccactttgccagccttgtaagtgggccaccttggaattggagcctccagttcctactgacatctgactgcaacatcatgagagaccctgagt

SEQ ID NO: 26111 - DNA, 2300 bp, Homo sapien
ggaatctatccttgacactttagtgtgtgagtgcatcaaagcataattataattatcttgaaagcatatactattatgggtattgagacatctggactttcttttgttgtaggattgtgtccttgtaggtatccttgggctgtttcctcaattgaaaaatcttatgaccatagtttgtgattggcaaagaatgtgccttcctggttttcaaatggagttcattttaaaatggtgtcaccctggctctcctatgttcctgtttcccttgcttataggaggccagcagagaatttacttatgaatgatctgtgggggcagggctttgtagatgcttgaggccttttacctttccatggggatctggctgatgcataatgctagtaacaggtattcatttgaaagtgggtgttgcatgactcagcatctgggcttaagtttggaggtcctgacatttttaaatttcctttacattccccctgttcttcaaagcttttggagaaagcgttgaggaagacacgagattgtggtttattggtttatccaatcctatgtcaccatgaagcctccctcttaggtggtcacatcctagagagggggaaattacatcagaaaaggaccaatgccaaattacagcaacaaagggaaagtaatcctggaagctgatttaagctatgtgactgtgtcttcaattaaaatattcagtcccttcccctccccctccccctcccttccgtctccctctgttgctgaggctggactgtactgccgtggtctcggctcgctgcagcctccctgtcccgggctcccgtggttctcctgcctcggcctgacgagtgcctgggattgcaggtacgcgccgccacgcctgactggtttttgtatttttggaggagacggggtttcgccctgttgaccgggctggtctccagctcctgacctcgagtgttctgcccgcctcggcctcccggggtgccgggattgcagacggagtctcgctcactcaatgctcagtgttgcccaggctggagtgcagtggcgtgatctcggctcgctacaacctccacctcccagccgcctgccttgacctcccaaagtgctaagattacagcctctgcccggccgccacactgtctgggaagtggggagatctctgcctggccacccatcatctgggatgtggggagcccctctacccagccgccccgtctgggaggtgaggaatgcctaagcccggccgccccgtctgggaagtgaggtgcgcctctgcctggccgcctgtcgtctgggatgtgaggagcgccgctgcccggccacccatcgtctgggaagtgaggagcgctgctgcccggccacccatcgtctgggaagtgaggagcgcctctgcccggccgccccgtctgggaagtgaggagcgccgctgcccggccaccccgtctgggaagtgaggagcgcctctgcccggccgcccatcgtctgggaagtgaggagcgctgctgcccggccacccatcgtctgggaggtgaggagcgcctctgcccggccgccccgtctaggaagtgaggagcgccgctgcccggccaccccgtctgggaagtgaggagcgcctctgcccggccgcccatcgtctgggaagtgaggagcgctgctgcccggccacccatcgtctgggaggtgaggagcgcctctgcccggccgccccgtctgggaagtgaggagcgcctctgcccggccgccccgtctgggaggtgaggagcgcctctgcccggccgccccgtctgggaggtgaggagcgcctctgcccggccgccccgtctgggaggtgaggagcgccgctgcccggccgccccgtctgggaggtgaggagcgcctctgcccggccgccccgtctgggaggtgaggaatgcctaagcccggccgccccgtctgggaagtgaggtgcgcctctgcccggctgcccgtcgtctgggaagtgaggagcgctgctgcccggccacccatcgtctgggatgtgaggagcgcctctgcccggctgccccgtctgggaagtgtacccaacagctccgaagagacagcgaccatcaagaacgggccatgatgacgatggcggttttgttgaaaagaaaagggggaaatgtggggaaaagaaagagagatcagactgttactgtgtctgtgtagaaagaagtagacataggagactccattttgttctgtactaagaaaaattcttctgccttgggatgctgttaatctataaccttacccccaaccccatgctctctgaaacacgtgctgtgtca

SEQ ID NO: 26112 - DNA, 2300 bp, Homo sapien
gttttgtagatggcagcatagggcatgactcatccctgtgtgctcagggtctcaggagctccaaaccccaaggaagtgcagccattctgctaaatcactccaggaatcaacccctgggcgtcttctgaagcacatgtctacaccggggaagaaaacctcctccataacactaaatgctgaaggtaacatgagaaggacttggataaatttattgcacttcaactactggagagctatttaggcagcacagctgccatgggctgcagcctacccgtgccccacagcttagccaaaagaacctggcatcaagaataaatgtcatgtagcaaaggagcctctatggagttggacatcacaatttccagtcatgctttctgccctcactatggggagggcaaagaacttgtgagctagattgaaagctccatccttggtaggaaactggaaggccaggttagagtgtgggtcccgatttcccagaactgagctggtgtttccaagggacctccctcatccctgggcaacaggacagctggtcagcatagtggctataggtgcttgggtgagagaggtggcaagtggttaggaggtggctgctagaagaatgaaggattggggcagacagctagctgctcatcacaataatctgagggctttaaaactgctgatattcactcagccccacaaaacagtagcaagagctggggaagtgaggtccaagaggcagtaactttgatgaaactaccaatgagtctcatgtgcagccaggatgacagcacatggtaagaacagcaacagtggctatcaacaccagtggtcgtcagcaccagtgactgtcagcaccagtgaccatcagcaccagtggccatcagcaccagtgatcatcagcaccagtggccatcagcaccagtgatcatcagcaccagtggccatcagcaccatggccatcagcaccagtgggtcatcagtaccatggccatcagcaccagtggcccgcatgggaggggttctcacatggggcttctgcctggctacctggtgagattctccagggctgagtgttttcagaggacctagttgttacggatcatcctgcatctgcccttcctggcacattaatgatcacagtcagcatgcagcacaaagccaggtgaagctttccggtaaggagggtcgcaggcagccagtggctccaccttcgtgtgcagacaccacgtgttctcaatgatcaacacacagtcactagggacatgaacacattgtggcataaaccgtgtccgggtgtgaatgtccacagactccaatgtccctgtatacactcaggtgcacagccccttccagctccaagtggcaggtgccaggaatctcaggtaaaaatgtgggcctttggtgctgagctgaagcaggaattctccactgttctgggtgtcctagaccagaagtaaagggagacttccaccttacaccagtgcgccttgcatatggcaactgctcttcaagggacaactgagtgaaggactcagagccccagttggaactcagagggcacccagggcctcgaccctcctccctgacaacctcacccccagctcagtccttggcatcccgccaaggtgcctccatgataccttggacttctaggagcaagagtgaaatgggattcagtgagttttattctgggaccttcctgaccttctggagggtctccgtggagaagtgactcctaatatctttgaattctaagatagtcatttttgagagctaggtaagtactatgacctctccttacagaaagatgaatacgctttcaggaactcagtggtctctatggagcccatctgtgggtctcacatcaagaaacttccagagacagatctgactctgaagactgcagggcactgcaagaactcgatgggtacctgaggccagaaactggcagagctcgcggaggaagccaccagcccctggcccggcctccctcttggctgttcctcccccgggccctaccgggctgtgcgtttgataggcagctggaagacccaggtgggcggttcaatcggtcacgtggacacgcagctcagccaattagaatctcgcggcagttgattcctagaggtggaatccattaaactgacaaagccccagtcccggggtcctaatagtcgggactattaggtcatcctgggtactcaggcctctagactctagactgagctgccttggtcactcggggacagttggcagagtattcgtggtcagggaggtgacccgtggtcagcaggatcaggccacccagggac

SEQ ID NO: 26113 - DNA, 2300 bp, Homo sapien
gccaaagcgggaggatcccttgatcgcaggagtttggaccagtctgggcaacataaggggaccctgtgtctacaaaacaaaataaaaaaattagctgggtatggtggcatgtgccttcagtcccagctactccagctactccagaggctgaggagggaggatcacttaagctgaggaggtcaaggctgcagtaagccatgattgcaccactgcactccagcctgggtgacagagtgagaccctgtctcaaaaaaaagaaaaaagtacaagtggcaaaaacaaaattggacttcaccaaaatttaaaaaaattgacttcaaataacaccacccagaaagtaaaaagacaagccataggatgggagaaaaacctggcaacttgtttatctcatgagggacttgtattagaatacacagggaactcttacaactcaacaaaaggaaaataacctaagtgaaaaatgagtgaaaaatgtgcatggacatttctccaaagataatacacaaattgccaataatcacatgatatgatgctcaacaccattagtcattagggaaaggcaaatcaaacgcacaatgagatgccaccttctaccccttaggatggctatgataaaatctacagacaagaacaagtgttagcaaggatggaggaaaaaaccctcatcactgctggtgggaatgtgaaatggtgcagccactttagaaaacagattggcggccaggtgctgtgtctcatgcctgtaatcccagcaattgggaggccaagatgggtggattgcctgaggtcaggagttcgagagcagcctgggcaacatgatgaaaccctgtctctacaaacaaacaaacaaacaaacaaagaaacaaacaaaaaaacattatgcaggcatggtggcatgttcctgtagtctcagctacttaaggagctgagacaggagggtcacttgagcccaggaggttgatgctgcagtgagtggtgtttgtgccattgcactccagcctgggtgacagagtgagaccacatctctgaaaaaaaaaaaaaagaaaaaaaaaaaaaaagaagaggggaaacaggttggcaattcctctcaaaaactacacagttatactttgacccagaaattatactcctacttatataagcagaaatgaaaacataaatctacacaaacttctacacaaatgctcatagcagctttattcataataaacagaagtggaaacagttcaaaagtccatcagctgatgactggataaatatcatatatgcatacaagggaatatttttcagtaaaaaactaagttctgggccaggtgaggcatctcatgcctgtaatgctgatgcttgcacccgtgcaagcataggtattgcacaggctgaagaaggaggatggtttcaccccaagagttcaagaccagcctggacaacatagcaagacccctttctctacatatatatagaaaatgttctcaaattagatggtgccgatgattgcacaattctgtgactatactaagaaccagtgtatattctattttatttcattttattttagagacagggtctcactctgtcacccaggctggagtgaagtggtgcgatttcaggtcacagcaacttctatctcccaggttcaagcgattctcctgcctcagcctcccgagtacctgggattacaagcacacacaactatgcctggatattttttgtatctttagtagagacagggttttgccatgttggcaaggctggtcttgaactcatgacctcaggtgacccgccacccccatccccgctgccccctcggcctcccaaagtgctgggattacaggcgtgagccaccgcgccgggcccattgtacattttaaatgggcgaattacatcgtgtgtgaattataacttaataaagctgctgggaaaaaaaagaagataaaaaagtgaggtggattaaagggcccatagaggaagccacctgacccccggcctggcctccttctcggctcttcctctccgggggcccaacagggctgtgcgtttgacaggcagttgggagaccctggtggccggttttggtcggtcacgtgggcacgcggctgagccaatcagaatctcccggcagttggttcccggaggcagaatctgttaaactgacaaagcccacgtctccgggtccctgtctcggggagtcgggactattgggtcaccccgggtagtcgagactctagactgagctgtctcggtcactcaggaggcagttggcagagtattcgtggtcagggaggtgacccgtggtcagcagg

SEQ ID NO: 26114 - DNA, 2300 bp, Homo sapien
tgtgatcttggctcaacctccacctcctgggttcaagcgattctcctgcctcagcctcctaagtagctaggactgcagactcctaagtagctggaccaagcccaactaatttttgtattttttagtagagacggggcttcaccatgttggccaggctggtctcaaactcttgacctcaggtgatccgcccatctcagcctcccaaagtgctgggattacagatgtgagccactgcacccggccaagctacagtttacttctgaaaatcaatgagagttcaaatattactaatgccccattttcaccaggctatatcttgatctgaagttgaacctgaatgagttaattgagaaatgaaagcaatgaacttttatactgaattttgatttttaagctggtgtttttcttataaaaacaattcatcttcattagaaaaaaaaaaagtatttcagaagattatgaaatgagaaataaatctttcctgtttttccttgttcttactgtcttacttttaatagtttcttgtgtattccagaaaaactttatgcatgtacaggttcataccaatgcatatgaatgaatatatatgtgatggattttagtatatatatatactaagtatatatatatatatactaagtatatttgttggacagatgatttattggtgataccttaattcatttcctgtagaagtgccttcaacagagtgacattgatcatttgatagacattaaaacctaatacaacagatttgcttgtgggggaaacatggtagctcagagtgcttaagtattatggtttatagctaatcagacaattttttcatgacatttggtgtgtctgctgtttttaatcagatgtttaaaagtcttcgaaaagattagaaacttacagaaataaattttatatagtactttcatattgatttctagtcacgtagtatggataagtatcaaagaaaatgtatagacagcataacaggaagtaggggagatgactgacttctggttctatcctcagctgtcttcagcgctacagctttctgccagctgcattttccttccaggtattctacactgcaataaaaatgaaagccagaatataagggctgggaggtggtgttaggttagaagggctgtcctgcatgggctcagtatggctactaacagttattctcattgttgagtaaatagagttgctaggcctgtctagtgtaagcattcagtaataatttagggcttacttttctcttaattttctttattctttctttttctttctttcttttttttttttttttagaaatttgatgctgatccagttgaattatttgaaattccagtaaaagaattaacatttgaccaactccagttgttaaaggtagtaataataacatgaaatgtaaattatcccttagctttaggactattgtacttgcttgtatatggttatgttctctttgcacatggggatgactgttaaatttaatgtgtagactatgtgctttggtattctgttctgtttgggagaagggttctgtatcgatccagctgtcttctccaaccatttccatggaccccactggtttttgtatttatgaaggaacgaactagaccataagtttttgtaggccatagtggctagcccttctcattcataatctttaggttgcttctgttctgcagtagcccttcttcatataatggtcattattttacaataggccttttatgcaatagttggtaaatatatgttaatttccaatacctttgaatattttgtatcatgtaattttacatggtacctcttcctgtccctattaggaacctaaataaatgcatgattccctattaacagttatctagtgaagaatttttatattcttccctaattgagtatttgatcattatcttaaatgtgtatgcacatataaaatatatatagtggctagtgcttattcttattaaactgatagttctacgttttataggcttttttatcttgctagtttttcaggatattttctgttaaccatctcttcataagctaaggcttcctttctgatttcattttgtttgtgtgctttctagctcactcatgtgactgcactgaaatctaaggatcggaaaggtatgtaccaatatggaaacactgttttccttttgtagttagcattaataggatttttaaaatcgattttagcacatacttgatacttggtcatttttatgagtataatactgggccttctaaatgtaattttatagttcggaaatgaatttgcatttgttttctac

SEQ ID NO: 26115 - DNA, 2300 bp, Homo sapien
gattaaaatgagtactatcaaaaaactattgcatcctgagcctagcataaagcaggcacttaattatttaactgaatggatgacattgtcagaaattttctgggattgaatccaagctaaatatcaaatgtggtagaggacaatccgatttataaaaccagaaattctgcctaaagctagagctcatctaatccaaacacattttcagtaggcccattttgaactagcgtgcaactcgagctatttctctatgtcttgttgtaagagaacttcgacatctcctgaaaggtggttctttttagtcggttttttgttttgttttgttgttgtttttgcgagagtctagctgtcacccaagtaggagagcagtggtgcagtcttggctcacagcaacctccacctcccaggcttaagttattctagttcctccgcctcccgagtagctggaattacaggcgctcgaccacacccggctaatttttgtatttttagtagaaacggggtttcgccatgatgcccaggctggtctcaaactcctgacctcagatgatctgcccgcctcggggtcccaaagtactgggattactggcatgagccaccgcaccaggcctctttttacttttcaatatctcacttgatttaagtaaaagctgctgatataattttatattggacactaaccagagggtaactttgatactggtaaggtaacagtgtaagttagatgagttgcaaagtttttgttttgttttgttttgttttttgagacagagtctctctctgttgccatgctggagtgcagtggtgcgatctcagctcactgtaacctccacctcccaggttcaagcaattctcttgcatcaccctcccaagtagctgggactacaggcgtgcgccaccatgcctggctaattgttgtatttttagtagagacggggtttcaccatgttggccaggatggtcttcatctcttgacctcgtgatccgcccgcctcggcctcccaaagtgttgggattacaggcgtgagccaccacgccccgcaagttgcaaagtttcgtaagagaacttcaagtggcaaatgctgattaactttctggagaccaccaaaggagaggaaaaaaaaatttttttttttgatacggttcattttttagaaaataaactacaactctggcagggagagtcagctttcaaaaaagttccttcaaactttaatttgcatacttgttaacgtggggatgttgctagaggcagatttgatagggtaggtctgggatggtcctgggagtgtgcaattctgagttctggcaggtgctactggcttgtcgaccatactttgcgtagcaagggtataaactctcatccagcttaggtgacttaatagttttcaactaatgatttgatccaagtgtgattgctgttttgcaacgaaagaaagtttctagaaaacatcagtactggtaatttcccccgttttcaaatggggaaaaaaaatacaactctgaattgtagctccaggatccatagtcggtttttttttttttttgagacggagttttgctctcgtccaggttggagtgcaatggtgcgatctcagctcactgcaacctccgcctcccgggttcaagcgattctccttgtctcagcctcccgaatagctgggattacaggcgtgcaccaccacacccggctaattttgtatttttagtagacacagggtttcaccatgttggccaggctggtctcgaactctgatcttaggtgatccgcccgcctcggcctcccaaagtgctgggattacaggcgtgagccaccgcgcccggcccacgtgggttatttctaaggcggctttggtggaccacagtacaagcctatgaccccagggcagctctccaacgtgcgggcgccggggtcggctgagaagggcagcggggacacgggggatgcccggccgccctcggccgcgtacgtcagccctttccaggaacgcgcgggcccgcaccccccgcacgcggctgccgattggctgggacggcgccgggcgtgacgtcagggcccgccccaccgccctccggccccgccccgcggggtggcctggcagtttggtctggagcagctgaaaccggtttgagcgtggctgcttcctgccgctcgacgccgcggcaggccgcctggggggagcgctggcgaggcacggacggcgggcgcccggtacctctgcccgcggtcctcgctctcgggcggggcggcggcgacgcggacctgcggactagcgaacccggaggtgaggcagcgagcc

SEQ ID NO: 26116 - DNA, 2300 bp, Homo sapien
caggccaggccaaatcagaactgagttacttgtgctaagtgccatgtaatcaaactgaactttgaaacaagcccatcttccagaaaacgggagattccagtcaatctgagtaaatataataaggaagtcttctctgttttaaccctacaaggaaagtaactttgaaatgatcaatttgcagggccgggtgcggtggctcatggctgtaatcacagcactttgggaggcccaggcgggaaaatcacttgagatcaggagttcaagactagtctggccaacatggcaaaaccctgtctctactagaaatacaaaaattagccgggcatggtggtgcacgcctgtgatccaggtactagggaggctgacacacaagaatcactttaactcaggagatggaagttgagatcgcaccaggacactccagcctggacgacagagtaagactgtctcaaaaaaaaaaagaaaaaaaaaaggacgatcaatttgctttttgttcaaatctctttctgcattctttagccccttttctgcctatgaagctaaccttgtctgctcagctcattggaacattcaatcttatagaatgagatgctgcctgattctagaattgtaaacaaaagccaattagatctttaagctaaatcttaattttgtaattttgtctttagacagtctcttttttgtggtcctgcagttgtggcagttatgtagttatctgcatgcatcagaatattacaatattttcatcctcatctttaatttctacttttcatatttttaaaatgtagacattcaagtttatttatttatttattaaaaccattttgtaggccgggcacggtggctcacgcctgtaatcccagcactttgggaggcccaggcaggcggatcacgaggccaggagatcgagaccatcctggctaacacggtgaaaccccgtctctactaaaaatacaaaaaattagccgggcgtggtagcgggcgcctgtagtcccagctacttgggaggctgaggcaggagaatggcgtgaacccgggaggcggagcttgcagtgagccgagatggcgccaccgcactccagcctgggcaacagagcgagactccgtctcaaaaaaaaaaaaacaaaaccattttgtagagacaaggtctccactgtgttgcccaggtgggtcttgaactccttgcctcaagtaatcctcccatcttggcctcccaaagcagtgggattacaggggcatgccaccccaccctctccaagacattgaattttatttatttttttttttgagacggagtttcgctctcgttgcccaggctggagtgcaatggcacgatcttggctcaccacaacctccaccttctgggttcaagcgattctcctgccttagtctcccgggtagctgcgattacaggctgcaccaccacacccagctaattttgtatttttagtagagacagggtttctctgttggtaaggctggtctcgaactcccgacctcaggtgatcctcctgcctcggcctaccaaagtgctgggattacaggcgtgagccactgagcccagacgaatttttttttttaaaaggcaaggtctagctctgttgcccaggctggactgcagtggcaagaacatggccaactgcagccttgacctctcaggctcaagcaattctcccacctcagccccccaactacctgggcctacagacatgtgccaccatgcctcgctaattaaaaaaaaattttttttgtagagacagtgtctccctatgttgcccaggctggtctcaaactcctggcctcaagtgatccgtctcagcctcccaaagtgctgggactacaggcgtaagccaccgctcccggccaacatttaaatttttgaatattttttctgttcccttagggtttaccaagcacatttatcgacaagcctcctcaggaaattgcccaaaatagccacatgtggcaagcctcattgacaggccaaaagcctcagtcaacatggccgcgaccggcttccattgcccttcactgcccgcagtaaggatggctccggtgacttccttcgaacctcacatttcccataaaaaagatggcgccattgcttccgcgttccggttgcggatggtgagtgtgtcggggggcttggcggcttttctcctcagttttctggagtgctttggaggagaggtaagcgcgggatgggatgggggggggttggagtggtgggggcgggggtcacagcaatgcatctgatcgttctctctcaattaggaagttatggaggctttcctaggcat

SEQ ID NO: 26117 - DNA, 2300 bp, Homo sapien
cagtcaaagaacagccctcactcaacagcttctttttctgtaccttctgctctacagaggttttaaacagactcttttgtgccccaaatattcttttttcaattttaaaagtatttcagatttcagaaaaatgcaaaaatagtaaaaaaaattcccttatacctttctcctcaattccctgaatgttaacattttgccatacttaccttagcattctctttttctctatctttatatttttttctaaaaatgtgaaaggaagttgtacatatgatacccttttacacctagtcacttcaagatgtgtttcctaaaaacagggacattttcttacataatcacagtacaattttctttctctctctctttctttgtttttcttttcttttttttctttctttctttctttcttttttttttttttttttttgtatttttggtagagacatggtttcaccatgtttcccaggctggtcttgaactcctgagctcaggcgatccactcgcctcagtcttccaaagtgttgggattacaggcgtgagcttccacacccggcacacagtacaactttcaaaatcaggaaatcaacactaatacaatacaatacaatacaatacaatacaatacaatacaatacaatacaatacaatacaatacaatacagtaacctatagatcttattcaacatttatccattgttccactaatatcctttttaagtccattcttttaactgttctgtggctgtggtcttggtgaaatactttccagctttttcaggaagatgtagccattcattcagcacatacaaaaagaatttgaacctcattaattttcaagaaaagtaaactgaaacctcgcttgagctgtgcatgcagacatcttcattccctgaatgaagagaacccagtgaagtctcactccgttccacaaagcctgtgttattcctattctgtgcaggtcacctgcctgctgctgcttcccgattcctcattaggctgagggaacccacatcaaaaatatcctggaagatgctttcgtctttttctcacacatcataacaaaaatactttactgtctcaatttgaaagcaagagaggatgcacagggtttgtagcatcgactatttcttactagcaggttattacacgacccacccctgagactaaggctgtgttgtaaaggagtaaagaccaaagggtaacaacctgaatgaatgctcattagaaaaggaactggttaaatacattctattgtatccattcaatgtaatacatcattcaaaagaagatgcagctgtatatgttccaaaataagtcaaacctaaattataggagtagtaaagttgtgttgactgaaagaggaattgaggaacttgagatttggaaataaagggagaagggagacttttatagtaaatccttttgtaccgtctgattttttttttaaaccatgtgtatatgttatgtattcagagagggaggaggaagagagacagagaatcatgaataggagatataatcatggataggtagatggatatgcagacaaaaagaaaagtttgagagaacagcaggtcccatattctccggctgcacttttaacttttaaagctatcactgtcttttccattttccctgaccaaccatttagttctctctcggtagcaggagtgttttcctcagctaggtcgaggagacacaaacagacctcgtcacgcacacatctcagcacacaggcatatagtctcaaacacacggttttagatttgatggtgtgtggggggagatggggagcaggctgaggcactcgaagcgggacctcccgcctcccctaccatctcagatctgcactactcccctcggccgtccattctttggcccgcctttcccccacccccgctccagaccctgcacaccaggcgactggactggcgtaaatttccgcccatttgcgtcgccgcctgggggtgctgcttcgtgacgtcagggctgagctagggggcgcccgctcctggctgcccgctcctcccggccctgcggcccccgcctgccctttaaaagagcggggcctgcgccggccgcgccacaccgcggggaccaggaggcacgctggttttccggggccgctccatcgcgccttcctcctgcgcctcgcttctccggtccagccgccatcttcctttccgcacaggggccgccgagcggggccatgcagccaacgctgcttctcagcctcctgggagccgtggggctggcgggtgagtgggcgcggcgggccggtcagcaccgcggacagc

SEQ ID NO: 26118 - DNA, 2300 bp, Homo sapien
gttagacttcaagtagagctggtaatttgcaaaattacagggctgggggaagcctcaagaaaccatctagctcattcacttatccttaagaacttctgaaagatatgcacaaccttctatggaagctattgtgcactctaaaaattaatataagggaagtagtaaaatgatatccatattattctaggtaaaatggtttctttatctttctttttcttttcttttcttttctttttttttttttttttttgagacagagtcttgctctgttggccaggctggagtgcggtggtgcaatctcagctcactgcaacctccatctcccgggctcaagcaattgtcttgcttcagcctcccgagtagctgggattacaggtgtgtgtcaccacgcccagctaatttttttgtatatttagtagagatgaggtttcactatgttggccaggctggtctcgaactcctgacctcaggtaatccgccagcctcggactcccaaagtgttgagattacaggcatgagccactgcacccggccgggaaaatggtttctaaattcagaagagcttatttaacttattttacagttatattttcaatccagtatcaaaccttaacagtattagatattaatacatcagaagttgctctcagatttaccagattatttgataatttttctaccatttgattgctttacttttaacacgagcagtaggttttctttttttttcgtatatacctacagagagcattagattttctgttgtgccacctgaatcttactgtatgcaaaagtaagttgaactactttaaggatgacaacatgcctttggctattaccttgttgtcacaaattttaccggaaaaatacagaagcacctagatgtctcaccaagatgtataatgtatgttcaaaagcagaccctagtttttttttccatcaaaaagagatctgaagagcctcagtcagagaaacaacggtttcataaatacaaacctaagctacaagttgtctagagtaataaaagaaaaatctttctctgcccccaaatctggtaactattaatacttcagcaataccagtagttaataaaaacatctattttacatttgtaaaaaaaaagggaaagtattagcaagaaactgcattatcaagaaggcttagtaaagctgcattttttaaaagtcatctgatttattaggggagttattctctcgcagtcatttatttgcagaagatattacagatttccagcggaaagagaaagtgctgaaatgggtgtgttctcaagtagccatttggaggatgaaagaacagttgagtatattggaccttgggtaccaaaagtgggccaactggatcttgcctgataagcatttcaggaggaacttggggtcttcatagcataactttgggcttcttgaaacagttgaagtgatcccagatcatgctttgaaaagaaaaatttggtaaagtaagtaaatgaataggtgttttatttccaggttgagccccatgatatgtaattgatagggggtggggaatgtttaaagaggcttagagcaaagcattttgcaaggaaaggtcaggttgctgcatttgaatagctttcatgtctgatgtctgagaacttgccccagctagctctactctcttctcagggacttagaagaattttctgcactagcgtctcctgctcagttgcctgctacaggaatgccaggagaactgtagagatggacttacatgtaaatgctttgggctgttctaatagaaagggcttagaacaaagtcaaagtgaaaaaagaatcaaagcagctttgagacagaaaaaaaatggcactgaaaaattaaaattacctgaagcatttttgaagaagacaaagcaacttcaaacactgttttaagataggcggaatcccatgaaattttattgaaataaattaaaatttttcttttaaaatattcttataaaccaatggttaaacaccaatttgcataaaatattatggacttgatgctgtactaggagggttagatatctgccatgttctttacatggttgcaaacagtgtggagaaagagaaacacaatgttgatacggatgcataaacgagcttgttcaggcaaaggccttgcgggtgaaaaatgaggtaattaattatggaagacatccataaccatgtttttgtcaaggaagtaagttttgggaggatatatttttggaaacagagatacggagagagagccacagatctttacctatttggggtaggcagagaaggaccaaggagggcatt

SEQ ID NO: 26119 - DNA, 2300 bp, Homo sapien
aaaggggaaggtcaactactgttcatgcctgtaatcccagcactttgggaggctgaggtggccggaattacttgagcccaggaattggagactagcctagacaacatagtgaaactctgtctctgcaaaaaaaattaattagtttaaaaaagaaaaaaaagaagaatttaaaaatggttaaaggttggtgcaggtattacatttccggactaaaagaaacatacccctcataaaagaaactttttatctttactaaattagtgcttgtgcaaaaagcttggttatcaccagcttagtgctctggagacttgtttcttgactattttatgatgcttgcttcaccttaaataccagtcaacagtttgcttaaaccaggagtaaaagaattcatctgaagtaagtacttatcagaaattccaaatctcatacttcccagtctgcagaaagctgttctcctgacattgcattcaacttatctctgtcaaaagtaatacaataacctagctcaaaagaaactgtggccaggtgcggtggctcacacctgtaatcccagcactttgggaggccgaggcgggtggatcacctgaggtcaggagttcgagatcagcctggccaacatggtgaaaccccgtctctactaaaaatacaaaaaaaaaaaaaaaagattagccgagtgtgatggtgccagagtcccagccactagggaggctgaggcaggagaatcgcttgaacctcggaggcagaggctgcaatgagccgagattgcactactgccctaaagcctgggtgacaaagcaagactccgtctcaaaaacaaaaacactgtggttgtatttctcagataaattaatccaaatatcccaataaattttcaccattaataagctcttaggacttaacaacctcaccagcccttccagaaagttatcaaaatcccacttctttacttctataaaacagagcgatactagccagcaggtgcacaaaccaaacctaatttggagttctgaggccttgagcaaattgctttttagcaattttcccagcgttgaatcctttggtgagtaaaacgagggaaactcaaagtgattccacactctgtggtgaattgtctccttcatctattctgtgtatcctgcttgggtagagaagaggatagaaagccagactaggtaggagacgtttcattttttgtgggatagatcctgactgggggattagggaagaaggaggatctatggtggaaaaaaagggggaacctgaaggagactctggagacaaggatgagatcctaaagtgaagaaaggagggggtgtctctggaaagacagtgaagatcccaaggtcctagggaaagaacttcaggacaggtgattagggtgtggagagggaggcattggcaccctagggccaagaatggaattctggggaaggaactctgtggaaagactgaaaaggatgctgaaggtggacggccagatatgaaatcatggagggggctccgggaaaaacaggagggttaagggagattatgaggttcgaagacgggatcctggtggaaaagccttctgtgacagaaagacccgaggagacaacgagggcggggaatggggaccgagagagccaagaatggcaccctggcggaagaattctgtggagaaacctggagggagggggtatctacaaggtgggggcgggagacccctaaaatcagcgatctgacttactttctccgctggacttgtactgctttaaacacatcttcacgtttcagcaccacgaagtcgccgtcgcggatgcggtggtctccgggatgctgtggttgtgggcccggctgctcccctgagccctccatgacgctcagccggtcgccgtgctccacggcgtcccgcccctcctcctcggttgtcgccaccgccagcctcacttcccacaacctggcgcactaggagccctccgaccggcaccgcccccacgtgttgcacgccgcttccgctttccggcccagacctcaagaccgcttccggaagcctctcggcttccgtctggccaaactccttgattggctgcactccgccccgcccctctcgtcttgccgcttctttgagcggaagttggatcactgaagcgccaaaaaagaatttaggggaagacctgattttcgcttgaggcatttttgcggcgctgtgcgctacagacaccttctggaagctgcggtggggaaactgagtttcccgagccgttgagacagatggggttcagcaccgcgcggggacgacaggaaagctgcggctgaagaga

SEQ ID NO: 26120 - DNA, 2300 bp, Homo sapien
aagcaggtatatgttagtaaatgaattacagtaatacaagatgtagcatccaaagacaagttaagaaaatatgatttatggtgcttttttgtactttttaaaccctaccttcagagaaataaagcttccagcctttatatggtatgaatcgatccaatgttgactgcattgactgtggggtctttgttgaaagcaaaaactgtggggtttgttctgaaaaaaataaaatactaggttagtagaaacagagtgaacatttttccaatatgcttctctttccaaatgagactctcattaatagagtatccaaattaggggttttagtaaaaatctgggacatcaatgttcaaatacttactaaggagtagcatgaaataaaagacaaactgaagtatgagataaaccgccttgtatgatagacgtgaattgcttccttaagtgaaaaaaattgaacaatcattgacctcacctaccagaagtacgttttcctgtggttttactcagatcaggtctgtgttctctttctctccattttcctgagaagttcccaccacctcttccccttttccagctttgaaatcttcctcgtccaaatcctctgcctctatactctccattcatctctcctaaaagatagatattaaaaaggtcttcaccaaaactgtaaggaaaatagtgctcttaaaaatgtattaataaaaagggaaaaattaatgtattctaggttcaagagtagcaaacaggcttgcaaagttgtacagctatgatacaagacccaaatattctgcagttaagtttctaatctctatcgctttttaaggtataccataatagtttaataactattaaatatggtttacgtatactagacgctcacaggttaaaaataaggacaggtactgtacctgtttacaagtccccattacagaaatgaaaataggacaggtaattaactctatgaaaacttatttgcagtatttgagacttcttattatagggcaggacaggatgaacataattctggcctgtgagacactagggatacatcatcatagcttcttacatacagtcaatcctgcagtgtcacatccattttttgtgcagtttttctgtaaatccaaaactgttcttataaaatacacgtctacttaaaaatgattcatatcctaagtatacaagtaaataaagatatacctgtacgctgcagtgcaattcattatcaaatactctacccaaatccttacttaaaaggggtttagttaataaaacaagatagtaactagaaagttcacgatttaacggcatgacagggctccaataattaggcattacacattatgaaactgatgctcaaagaaattaagcaaaccgatcaagatcaaagttgtttgtcgacagtacagagataaaactttcagcctcccaagctgaggcgctccttcaacaacgctgcgtgccatacccttctcaaacgagacaatatgctgagaacagtaacaaattcaaaaaaacgttaagaagtaggactggagaaagagtaaaaagaaacagttgggtacctgtgcttcttcaaatactactttatttacatctcctaaggctaaagttcttacttgcttgggacagaggtcccaaagctctcctagttcacaactgggccggctccaggatacgcgcagatctgtccggccggattctccctccctccctcccgtagagaagcaccacggggctaagagtctccgggatcttagctcctcaggcgactcctgccaagtccgcagttctcttcagccgcagctttcctgtcgtccccgcgcggtgctgaaccccatctgtctcaacggctcgggaaactcagtttccccaccgcagcttccagaaggtgtctgtagcgcacagcgccgcaaaaatgcctcaagcgaaaatcaggtcttcccctaaattcttttttggcgcttcagtgatccaacttccgctcaaagaagcggcaagacgagaggggcggggcggagtgcagccaatcaaggagtttggccagacggaagccgagaggcttccggaagcggtcttgaggtctgggccggaaagcggaagcggcgtgcaacacgtgggggcggtgccggtcggagggctcctagtgcgccaggttgtgggaagtgaggctggcggtggcgacaaccgaggaggaggggcgggacgccgtggagcacggcgaccggctgagcgtcatggagggctcaggggagcagccgggcccacaaccacagcatcccggagaccaccgcatccgcgacggc

SEQ ID NO: 26121 - DNA, 2300 bp, Homo sapien
ttttcttaacttgtctttggatgctacatcttgtattactgtaattcatttactaacatatacctgctttaatcttagttcacccaaacaattaaatgatgtttatgtttcaaaagcattttagactttatatcagtcaggaaagcagaaaccatactaggtatttcaaaaaggggacttaatacaagaaattggatacaaaaatggaagactgaaagagcagaaaggaaatattgaggtaactccccagaaagtagtaattcaggaagcagcaaccatccttatggctaagagactaaaagaagttctgaggttaccagaatgtgggaattcaaaggttggagaggtcacagcatagctgttattttgacttttgaggggcaccctacaaagctatgcttggacttctgaaggctaccttacagagctgtgcttagaccactaaggcaaatgaagctggttgccactggtaactgagggggcatgactcagtggtgcttggaactggaggctagcactatcgttatcttctgcagctgcagagatgctgaaaagagttggaaacaagaataaattcctttctcttcctgccaccttcccgtctctaaagtgccttcaattggcagaatttaaagagaatctgagacatgtagggtacagatctgaattatagcatcgcagagcaggaagtagaacagtgggcctgaaatcaagggacaataacaaatacagctttgtgtagaaacacaggtaaggaatctccctttgataattaggaataccaattaacctacatcagtctgtataggtgcagggaactgtcttttttgtgctgttaaaatacccatttgtttcttatgtctcatgaggggtgtgtgtgtgtgtgtgtgtgtgtgtgtgtgtgcatactttttatttttttttgagatggagtcttgctctgttgcccaggctgaagtgcagtggcgcgatcttggctcactgcaagctctgcctcccaggttcacgccattctcctgcctcagcctcccgagtagctgggactacaggcacccgccaccacgcccggctaattttttctgtttttagtagagacggggtttcaccgtgttagctaggatggtcttgatctcctgacctcgttatccgcccgcctcggcctcccaaagtgctaggattccagacgtgagccaccgcacccagccgcatactttttttttttaggaaaactagacgtttgaggtccaggaccctccctgccccataccaggcatgcagtagtcattttgtgaatgaatagagtactttacaaatgttttctttattggaaatctgttcgtttttttccatcaatagaatctgtttcatgaatgatcttttgttcctttaggatgtattagccaccagcactcccattgctcccctagcagatagctcagaacactataagtgatctttggacagtcctaaagatggagttcaagaggtgccttagccttcaccatctgtgcttccaaactactttattgtactgttcttctgtgagagacatatttgaaaatgtagaactttagagtgttaaaaaaaaaaaggcttttcagttttgccaccagggtcaagtgttggtctgtctcctgatctcaggaaagactgtgattgtgattgtcttcagctctgtcagagtaagagcttagtttatgtgtctggctttggctttattataatttttagtttaagcttattgtctaaattatctgaactaacatgtcctattaggtgtcaaagatgcaaaacaaagtttcccagatagtggggcttttagagagagagagtttctgtctgcatttcacattatgcaaacctaaatttgttttagaatcttaagtttacattctatactagttcttatatgaatgtaatcaaaatacaaagcaattagaaaaaaatcatctaccatgtatatagtgctgcttttgtctcatgaaaaatgtgcatgtacctgtgtgattatttgtgctaatgccatatttgttggattagtttacagcgatagctctcctttgattgagaagattcaagcatttgaaaaatttttcacaaggcatattgatttgtatgacaaggtaagattcctctacagcaaagctaccagtcatgtgccatcttaccaatgtattcgaggtacttgtgattatgatcgtaggcactggagtcagacttccttggttcagacctcagttctgccacttacctgcagtatggactttgattaattacttctctgtgcctcagttttcttt

SEQ ID NO: 26122 - DNA, 2300 bp, Homo sapien
atttatttatttattttgaaatggagttttgctcttgttgcccaggctggagtgcaatggtgtgatcttgcctcattgcagcctcagcctcccaagtagctgggattataggcatgcactgccacacttggctaatttttgtatttttagtagagatggggtttcaccatgttggtcgggctggtctcaaactcctgacctcaggggatccacccactttggcctcccaaagtgctgggataacaggtgtgagccactgcgcccagcgtgtttatattatttaatgttaaatgccaagggagtgagtattaggtattttaaaggtcatttttattttctgtgtcttgattggtcagtgaatatagagaaataggaatgcatttttttttttttaattagtatcaagaggtgatggttttggggactaatgtaagggcttttaatgttaggtttagttgggacagaaagtagcagactgggatgctggagtttttcagcacagggacagcaaaatccaatgtaaaacatccactataaagtaagtagtcataattaaatattagatatttaaagggctgttaaagttttctgtttttattctgtttctgtccataaactttatattctctataaaaatagagttctgtataaagaggatgttttgttttccaacttcagagtaaatgtctgtcctgtttaggtgttaactaaggaccttgaaaggcatgcagctgagttacaagcccaggaaggattgtctaatgatggagaaacaatggtaaatgtgccacatattcatgcaaggtgaggaatttgatgtattaaagtattacttagaatgggacattgaaggccatttaagaatgaaaacgctcattttataaaaatgaggaaatcagtaaaaaggacatgagttccttgccatctcattgatcatcacactgaaataaactcattgaaaattattcaaagacatcatgacagatacttcctaaataaggaagaaaatgttgatttcctaacctgcagatttttgtaaacattggttttggatgtgaacttatcaagaccctgctgtgtaagtttaataatccatgtatgggttgagtatccctaatctgaaaatctgaaatctgaaatgctccaaaattcaaaactttgagccctgacacgacactgaaaggaaatgttcattggagcacttcagatttttgaattagagatactcaactagtaatattgcaaatatttggaagtccaaaaattccaaaatacttctggtcccaggcattttggataagggatatactcagtctgtaatacactaagtgttctttgttaaattattaggtttttgttagatacaagggaataatgaaattattttgtttttcttgaattcatctttaagattttaaattcattagaagaattcattataaggtaatcatcagcattttgtttttcttttccagaatttatagaagaaaatttcctagcagttctttaaaaagaacttagaaacccaaaggtttttgaatctgtagattttccttttggcattatttttttccttaaatttcttttttcttttttccttgagaacagcctgtgagacaagaagaaaaaggaagatttagtgttgtttcttgttaagaatggtttggctgggcacggtggctcatgcctgtaatcccagcactgggagtccgaggcaggcggatcacgaggtcaagcgatcgagaccatcctggccaacatggtgaaaccctgtctctactaaaaatacaaaaattagctgggtgtggtggcacacacctgtagtcccagctactcgggagactgaggcaggagaatcacttgaacccgggaggcagtggttgcagtgagccaagatggcacccctgcactccagcctggcaacagagcgagactccatctcaagaaaacaaaacacaacaagaatggtttaattcttgtgatatttctgatatatcgaagggatgatttgatttgagaattccatagttgctcctaaaaggaacttgtgaaaatataaaaaacatcaattttctgttcattacttcctgttttgtctttagggtgtacaactatgagcctttgacacagctcaagaatgtcagagcaaattactatggaaaatacattgctctaagagggacagtggttcgtgtcagtaatataaagcctctttgcaccaagatggcttttctttgtgctgcatgtggagaaattcagagctttcctcttccagatggaaaatacagtcttcccacaaa

SEQ ID NO: 26123 - DNA, 2300 bp, Homo sapien
ccacactcattcatttacataagtgtgctgcttttgtgctacagtggcagagttgaatagttgtgacagagaacatatatatggctcacatatttttgctttatccttttatagaaaaaatttgctgatctctagtttaaacaatacagaatatttactatcttatacaagaagtttgtcactcaacggaagagtgagggaacagtgaattccaaagccatttcaattagttctgtgtagggtgttgctcatagagattcaaatcgaattaacatatattcaaaaagtatttgataattttatttccatgctattgccatgccgtggagaagcagcaaagtataggcattttttgctttagtggttaagagcttttctttggagacaaacctaagttagactcctgctttgggcatttacttccagtgtgatctgggacatattacttaatttcccctttatttgtatcaccttaaaatggaaataataagacttacctcagaaggttgttctaaagattaagtgggattttataatgtacttaacataactactgcaacatactgttacttttgataattttttgacaactgtggggtaattttgaagaaataggagaaaatgagagagactgaataatagatatatctaagagaggtaaagaactgagaacgttttgaaatgcattgtattataaaaagtgatcttggccaggcacagtggctcaagcccgtaatcccagcactttgggaggccgaggcgggtggatcacctgaggtcaggagttcgagaccaaccggaccaatatggtgaaaccctgtctctactaaaaatagaaaaattagctgggcatgatggcaggtgcctgtaatcctagcttcctgggtggctgagacaggagaatctcttgaacctgggaggcggaggttgcagtgatctgaaatcgcgccactgcactccagcctgagcaacagagcaagactctgtctcacaaaaaaaaaaaaaaaaagtgattttgtcatgcttttctgttcagtaggctcaggtctgtaagaggatttgatgctttttctttctggctttaatatgttaattagctgactgagtaaagaatagtgctccacaggggttttttgtccttaaatcctacttccctctgaataaaagccattcagacccaccctggaagagaggctgctctaacttagcgttgctggggtggtcttggagtgagtcctttgagcaggtggccaaggaagcaacctggtcgacaatccaaacatctttggttcctcttaacagttgtaaattaaaactgaacatttttagtggtccctcttctcccatacttatagaagagtaagtatggaaaactttagttttcttcccacagtttgctttttccccctccatgtttgtgatttcagcatcaaaactagaatttttcatggtcctctattatcagtctagcagagattggcaaactaggcaggctgcctgtttttgtaagtcaaattttattaaaacacagccccacccagtttacttacattactgttcacagttgcttgcacactacaagttgaatagttgtgactgagacagtatagcctgtgaagctgaaaatactttctggccctttaagaaaaagtttgtcaacccagcctaggtgacagtagaagtttatgttttagtttaggttccttcagaagcaatgatttggatcaacatagtttacttgggaggtgattctggagttactggtagggaaatgatggcagccagtgtaggtgccttaacgaacaggtgacccactagcatctgggacataatcctcctgggccagtggaaaactccactgtggaaagccagcttcagtatttttccatttaagggcctacatttgggactgcccccaggagtattaaacacctcagcacttctggcctgcccatcctgcctgccaatgatgcttgtgtggccatagaaaggtctttggcagacaggtgcagatgccagtaggaagccggaacatactgaacagtgagtgccaaggggatatgagcacaccaccacctccttctgtgtttacatatattaaaagggaataaagactcatgttttactcctgattttctctcccaccctatttttgtttgttccttgtttataaaattgacaaatgtaaatgtactgttttatattctttctcttaattttttttagagacagggtcttgctgtgttgcccaggctggattgccgtggcacaatcagagctcactgtagcttcaaactcct

SEQ ID NO: 26124 - DNA, 2300 bp, Homo sapien
ttatcccagattaacctgttcatttattgacttctgtcaagttctagaaaatgagatcaaagactgatagctggatgttctcccgtcttaaaatgttagggaaacagtttgttaaaagcatgttactctttagtcataagtattgagcagtcattgtctttcaggccaaaatgccagccactttattttcctactttttaaagacaattagccatcagcagtttgtagtagagctggctttttaaatacaaaacagtttattatattttaattggcggactctattgtatcttggagtttttttctctaattttatattgaagtgaaaaataggaagaacataaaatttgctacatagataattttggggatgttctattttaaacattgataacagtataattccatattttgaaatatacaaaaaatatatacaactaaaatggtatctaaaacagaaacctatgaatgctagctccaaacaataaggcaaataagtgaagagctcaggtaatggtgttattcttgagggcacaaagcctggataaaactagattaccataaatagtagtacggaagttgaagaaatcaacacagtaactagaattaatttagaaaaaattaataaaaggttggacaaataccataagtaatagaaataaaacctatgagagcaacaaagggaaaaaacacaaaaacaagtttgtgtcctcagtgccaaggattagaggcagatgaagtacaggctgaatatagggaatagaaagaagtcccaagacacaatgagtgtcttaggaagcggagagtgaataaaggcaatctcatgaaaggaagggagagactggaatcctgcccactccctcttgccagggttatccagaattaatgtttacctatgagaactgtgtttttaaatagtttttaaattttttaaaatttttacattgctgttgcagaagtttccatttttctctcaatgtcaggatttcaatgtaagaaatagattttttttggataaatacccgctgcttcatctacaatgttgctcactttcagttggcctttccctttcctaactacccgaattaagactttaaactcaactgtaaggtagttcagccatcatagatggggttagtggggcgatagtggagaggcggcaataatcattcaaattcagttcaacactgaattcaacaagaaaaaattctgtaacattgcaaatattgatgtatcaatatgtttagtatactaatctgaatatattaatcagctaattaatggtgagctgattcataactgtctcggatattataggcaagtttcttaacctctctaaacctaagtttccttatctgtaaaagtaataatggaaccctcatcttgcagtcgttgggaggattaaacgggatgatgcactatagcctggttatatagtataattgaaacttttgtactagcaatgtaaaaatttaaaataaaaactatttaaaaagacaattctcataggtaaacattgattctggataatatagtattactgttttcagcaaaacaatcagccattgctattactaacatttactaatgcttatatttttagcatatgcatctttattcaatgctcaaagaggagagaattacagagccaatatttattaatcatttcttctgcactagatactgtaaaccacccacaagaaccgtagggcgccgcacgcaccttggagggggcccttctgccggccacccgcctcagagggtttcaggccagggcctgaggtggctccggccccctcgcggctacgtcggctgcgcggtcatcctatcttgttcgtttctcccctttccccgcccacccccgggccttggctcccggctgcgggccaggagaagagagcgccgcgtacccgctgcttcccaaaacccactgagcctgatgcgcgcgcctccgctgtgccaggggcgccgggaagcccgacgacgacggtgtcgtaaaagcgtcgcgaaggcgtccgcccttggcggcttcctgccacctgtataagtggagtgtgctggggtgtgtaaagtagtatggaggcagcggtagcccagtgtctgagtggttgccgggtctccatggagaagcggctcgccagtgtcccaggctgctgagctctcgccgcccgagaccccgcggcgcggccgcagggccatgctagccttgcgcgtggcgcgcggctcgtggggggccctgcgcggcgccgcttgggctccgggaacgcggccgagtaagcgacgcgcctgctgggccctgc

SEQ ID NO: 26125 - DNA, 2300 bp, Homo sapien
gcaatacaaacctctactctgagatcttttactgaaagtaatccacattatacaatgaaaacattcttggaatacatcccaaattcaagttcaaatatcagagtgtttcagagtccaaagaaaaaagataagtctgttgaccatactatggtagagaataagtcaaatactgatcaaaggttacagcaactcaaagggaagagtgggaggggagaaggctgcacacggttgcaaaaaagcagtaagcaaaagatcagaaaaaaggtccccaaattaacttcagaaattatccacagggcaaaattaaagacaaagttgtaaacagaaacatcatttcatttggcgaattaacaaacagaactcaatgttgctggaacagtgaagggagttctttttagctccacatagaatatttcagttaaggtgtctcattaatttgtaatcattaaatccgtaaaagtttcaaagttaatgttaggagagctaatctcagattactcaaccagataacctgtggcatactcgaccaactactgccgttctgggaaggacttcagtcaggatatggcaacttcaaagtatccagcattcaaaccccaacatgctttagctatcagtggagttgagacccctgccaggatctggccacctcaacccatgctgtacaactgatgaaagcagtacaggggccactgaagacataacaattgaagatgtaataattgcatgagtcttgctaacatgacatcaaaagctctcccacactcatgctcgggtgtcttctgtctgggtagcatatcaacaggtaagtggacaaatacttccctccgttacctcaagaatagtttaaatctttttctataattaaaggttaaaagatcttttaattacgacctaaattatttaattaccttcatcctataatgtgtaaggttaccaaaggtcaaatgatggtgaacggaacttgcacaagcaaacagaagggcctgtatacctttctaaatattcccaaagacttgccctaaacactggggattcacttcaaaagaattaaaaataggcttttagtaagacaagcgaaggctacctttatcaatgcaatatgcagaggcggcccttccagcaacgggtgcagatagaagggggatgagaggatttctaacttgaccacagagaccgtaggtggaccccgctggtgaccctgaaattcatcccgaccgaatgacctgccagtaacttcttttcagggaagagtctaaaagttaggaaacggaagcgtccgagctgcaccacccagagcttgttacctgagtgcaggggcggcgaccccagcccagggccggcccgccgccgcctcatcggtacgtaccaggctgggggtgctcgccgggccccactggccgcccggggcttcggcagcggcgcccgctccggccgctggcctgggagccgccttccccgcgcccgaacagtggttccgctggccgatcccgggcagccgcaagccaagagcggccggacgcagcctccagcgttcggccaggcagcccaagcagcagggcacgggcggcagcagggcccagcaggcgcgtcgcttactcggccgcgttcccggagcccaagcggcgccgcgcagggccccccacgagccgcgcgccacgcgcaaggctagcatggccctgcggccgcgccgcggggtctcgggcggcgagagctcagcagcctgggacactggcgagccgcttctccatggagacccggcaaccactcagacactgggctaccgctgcctccatactactttacacaccccagcacactccacttatacaggtggcaggaagccgccaagggcggacgccttcgcgacgcttttacgacaccgtcgtcgtcgggcttcccggcgcccctggcacagcggaggcgcgcgcatcaggctcagtgggttttgggaagcagcgggtacgcggcgctctcttctcctggcccgcagccgggagccaaggcccgggggtgggcggggaaaggggagaaacgaacaagataggatgaccgcgcagccgacgtagccgcgagggggccggagccacctcaggccctggcctgaaaccctctgaggcgggtggccggcagaagggccccctccaaggtgcgtgcggcgccctacggttcttgtgggtggtttacagtatctagtgcagaagaaatgattaataaatattggctctgtaattctctcctctttgagcattgaataaagatgcatatgctaaaaatataagcattagtaaatgttagta

SEQ ID NO: 26126 - DNA, 2300 bp, Homo sapien
agtgaaccagcttccttccccctcagggtctctgttcagtccaggcgtgtttccatggatttggctccctctcatctgggaaagccctgcctggactccccaaacccctgctggcctcagcatggtcagtcgccttacatgggtggacctggctggtttaactctgagggaaacatgatgttctaattctttttgtttgtttgtttgatagagacgaggtcttgctatgtcgcccaggcctgtcttgaactcctgccttcctgcctcagcctcccaacatgctgggattacaggcataagccaccatgcctggcttaatgttttaattattgggcgtggagctgtccgtgcaaaggcaaagaggaagcaggctgcccactggtctgcgtgctgaccccacctctaagctgaacccacctctctctgacttcttcccacctggcctcctatgtctccatggcatgtgtttatacctctggggcctgggcccaggctccctgggaggtgactgcatgagccccaggctggggagcacagagcggcctctccctgccccgctcgggcagaggagcaacgcttgtgagcagcagggtcctagctggcactgagactggaaagatcttcaggctgtgggtggagaaggcctcaatggagatcctcgggaatttccaattaaccaatcaaccctaataggccagtttctgaggtatcctggagttcctcagggctgtccagataaggactgacaggaggaaagttctggtctcagtgtctgtcacgcaaagctgtggctcattaaccctgatgaactctcagatggggctaggcgggattgggggaggatgcagatcaaaggccctcagaggaaatgaccgagctctgccttgggactctgggagagagaggtgctgtctgctctaaacaaaaaaaaaaaaagaaaaagaaaataaagccacctaaatcccgtcatcccaccatctagagataatcacttctaaacattttgttatttagtatttcctttcattatgactacaacatagagtataataagtgaacatttattatatataggtgtgttagtctcttttcatgctgaaactgggaaagaaactgggaagaaactgggaagaaaaagaggtttaattggacttacagttctatgtagttggggagccctcagaatcatgacgggaggcaaaagactcttcttacatggtggcagcgaaagacaatgaggaagaagcaaaagcggaaacccctgataaactcatcagatcttgtgagacttattcactatcaggagaacagcatgggaaagactggcccccatgattcaattgccttcctctgggtccctcccacaacacacaggaattctgggagatacaattcaagttgagattttggcggagacacagccaaaccatatcaataggtgtaagataaaaatgaatatttttatttaaaaactaaaaaaaaaaaaaaaaaaggtctctaaacaaagctcactcaagcatcacatcttcgggagacctggggctggtagtcaggacccatcctcccaggcatgcagcgggaatgttctttctgcatttctgtcctctgtttattctcactccttacgagagacaaacgtccacactgtcactgagcgggggcccagagccaccaaacaaactgtcctcggggcctcttgggtctggtttgagcctgctctgccccagacccttctgaggatcctctctcctgccactttttcctggaaatccctgcaagcttcctctagactcggatgccttccctcctttgggagaattggcttccagccatcccagaaaatgggagccacctggcaggaaggatcaaattcctaagaggtgacagcgctgctctgcctcactgcactccactagccctcaccgctactcctttcatttctccagcctgggaaaggtagtgttccgagaggtaaagatggggagggctaggaggaggtgccaggcctggaaagggccaggggcaggccctagcgggagaggagggagctgagcaatgagggtgttggctaaagacaacagcgtcttgatgggaaaggaggagcaatgggaaagactggagtatctcagtccctctcagtggatgggggttgtgggagagaggcagctgggagacaggcctccctctggagttcatagctgagttgctgtccaaatcagtggtccctagaatctataaaacaaagctgagaacttcagaggtgcatccagagaagccacactccaaaaggaccacttcca

SEQ ID NO: 26127 - DNA, 2300 bp, Homo sapien
cctaccccactgcccctgctactttctgtcatcaaggtcacctcttggccacccatgaccttcacattgctgagtccattggtcgcctctcagtccttgcaccagctaccctctccgcagcatttgacacaatgagtcaccccttaccctttgccaacttgcatcacttgccttccaacacagctgactttcctggcttttctcctccctcactgaccagttcttttggtctccttggctggttctttctcatctttccaatctcttataataccagagtgcacagtcctcagttttttggttttttttttttttaattagaggcaggatctcactctgtcacagtggcacaatcatggctcactataacctcaaactcctgggctcatgtgatcctctcaccccagcctcccaagtagctgcgacttgtgagccaccacacctagctaactttcttttaggagatgggatctcactgtgttacccaggctgctctcaatctcttggcttcaagtaatccccttgcctcggcctcccagagtgctgggatttcagatgtgaatcactgcacccagccaggcctcagttcttaaagcattcctcttctcaatctctactcaccttcttgggttcagccattcttttgacttcatttatatgccaattactctgaaatatatatcttgagcccagaactgtctcttgaactggagattcataaatccagtgacccttggatatctaatgagcatctcatctttacatgtccaaagttccggatcttccccctaaactggctccccgctacatacttcttcatctcagtagaaggcaactcctcgccctagatgttcaggccaaatcctttggagtcattcttgactctgctctttctcttacaccaacatcctgcccataggcaactcctagtgactctaccttcaaagtacacacagaatccgaccacttcttccgcctcctcctccaccaccaccatcacagagccggtccagagtgatcctgcttggtgttcctgcctctaccctgatcccactaaattttcaacttagcagccagagggatccttttaaaatctaaatcagattttgtgaagcctctgctcaaaaccatctgggacaggtgtgacagcttatgcctgtaatcccagcactttgggaggcaaaggcaggaggattgcctaagttcgggagttcaagactagtctgggcaacataacaagaccctgtctctacaagacacacacacacacaaaatctgaaggatttcttatctcactcagagtaaaagccagatccttacagtggcctacaagacctttgctcttgaactcacatttctctcccctccttcactgtgtcagccacatgggcctcctggcaggtccttaagcacattaaaaaaaaaatttttttaagtggctgtgccctctgcctggaatactctttccccagatatccacgcggctcacatcctcatgcatatccattttttgatcaaatgtcaccttttcactgacctccctgtttcaaactgtaaccaccttattaccagtattccctgtagcccttccaactttattttccttcatcttatctggcatatgtacctcatacttatgatcttctccctcccacagtcagaaattttccatccgtttagtttactactatatctcccatgcctagaagggtgcccaacacagagtcagtaatcattttgaatgaatttatttgattccatcttatttttcttctctctgatgtcagttttacttaaagaccatctgcaggatagccttcattcttttttcacgctgtctatatcccaataaaaatgcccccctgcagaaagttaattcttcattgtccattcctctgaaatgattcagaaatactggtagtatttttaagaagttatatgtgagtgaacattgtattataggaagcagttgcttctcttaactaatattatgattcttttcagatttaaaggaagcaaaaaagatgacattctgggagtttcatataacaggttgattaaaattgatgcagccaccgggattccagtgacaacatggagattcacaaatatcaaacagtggaatgtaaactgggaaacccggcaggtaaagtgaaagtttttgctcttcagtgttgagcctataaatgtgtgtccctcagaattgcagattattctgagttttaaaaggtgttcttctatttagacctaagaaaccacaagcatatggtaactgtctgtctgctaaaatcatcatatgc

SEQ ID NO: 26128 - DNA, 2300 bp, Homo sapien
caacccctgtcctccccctagctcattctcacgtttcctattttgaatgacccaacctttaggcctgccactggcaccaccaaccttgtctagtccactgtataaagttttctggccccaacagataccaataccacagctggatacctttccccaaaatagtttttaataacagtagagtctatattgactagctgtagatatcgctgatttccatggttcactgagaattctcccatagtttctcttaagggtgaagaggaaactacagaaaatgctgctcatgtttatatctgacttgtatgtatggtaacctgaagcttgggctgtccatatcgacagctttttcaaatgcaaaaagtatgccgagattccaaatgtcaccagattcatgtcggttcctcacatacaccatcacagttaacacttcagttgcatcaggtgttgtgataagctcttcatgtagatgaactcattctgtcctcacaaaagccctgggttcccagactacgacggtccccatcacacagaggcagtgcacgcagcccaggtaagtgcaggatctttcccaggacacacgtgtagacagtagcagagccaggtgtggccccaggtggaggcttagtgttaaaatctacatcacatatcagcatttcatttccagcgcttggaaattagcaatttgaaattatttttgaaaaaacaaagtgtgttttctttgacacaaacatctgatctgatctgcttgaaatctgcagcgtgttccacatttctgggtggtggtttaaacattcactatctttgaatttgcaggcccaagaagttactaccaaaagctttcaaacaatattggtttatctttaaagacacatccatagcatactttaaaaataaggaacttgaacaaggagaaccactagaaaaactaaatcttagaggtaagagtaccctatatcttgctgtggctcatcgtaagtcagggcagacgcggtggctcaaacctgtaatcccagcactttgggaggctgaggcgggcggatcacctgaggtcaggagttcgagaccagcctggccaagatggtgaaaccccatctctactaaaaataccaaaattagccaggcgtggtggcacatgcctgtagtcccagctacttgggaggctgaggcaggaggaccacttgaagaggtgaaggttgcagtgagccgagatgatgccactgcactccagcctgggtgatagagtgagactctgtctccaaaaaaaaaaaaaaaaaaagaggtgagcagattaaagtcagggtttcgacaccatgaggcacggtttacttacttctagaggaaccaccagaaccagtgtcactgttttccaaatgacagcctggctgcagctgctcttccaagcatgagccttgaatgcagtctagtaaacatgattatttgcattctgctgttccatctttctcagtgtgtccagagtttatgatgtggtggtaattcatgtccaagagtatagcacatgaggtgctgtaagatcctgaaaagttttctgtattccagaacagttatatttaattcagtgtcactttaatgcctattctaatttctgaaggtcactgtgagcgtcctgataaccatctattaattgaaatatttaattaaccagtacactcaactcacattattgtgacaatcagagaattccttctgctttgatttattttaaagttcatatccacaattttttctatgagtttggagagccagcattaacctgaaaatgaactaaattgactttttaagaaaactgtaaaagaaaagcatttttctttatctatgttaattgttcataagatttatctaattatccattaattaatgttatcagcttgctcctccatttttcaaaaccaaagcaaatctgaggggcttgtattcaaagtctttatttcagatacacacctgatgtttatctaacagatgcctcagaactcagttttgtctctgatctttgtccttcaggctgcgaagttgtgcccgatgtaaatgtagcaggaagaaaatttggaatcaagttactaatccctgttgccgatggtatgaatgaaatgtatttgagatgtgaccatgtgagtaaaaccccaaaaatattaagtcacttcacctccactaagcctaagagcaaaacccaaaaatgttttcacaaatttagagcactattgtgtcactcagctattgctttgtaacaaacaatcacagtgtaacaaaatcacaatgacattctaacaataaacatttgccat

SEQ ID NO: 26129 - DNA, 2300 bp, Homo sapien
attacaggcatgagccactgtgaccggccaagaaaattctttaccgataaaaaccttatttctatttacttggtcatccatttcaaccagacaagcttgaccaaagttgtggcctttttctggaacattgcaaaaagtttctgaatgcttttgacttcaggagacaaacgaaaaccctccaataaaacaaagaaaactgttttgtcatctctttctccttatccatgaaaggtgaatgtcagctttataactgaaatgcccctcctgtttaattcactcatgaggtgccacacttttgtttaacttcggccatgggaataattattaatcacattgaatcagagaggtgggtccaccataattagatgtaagcagtaatcatggattagaattagttactatattcttctgcattcaatgtatgttctcttatcattaaatgtcctaaaataagaaactggtctcattcaggagcaaatacttcgtgcaaactaaacgccaagattctgtagagatgcagggccctgtgtcacgtttatagaagacataggccccatgaacttggagttctctgttgtctactttctccgctgaataaatacaacaggaaagtaattctttttagaataaataaaaagttatgtcctccctcccttaatagttttacgtgatgctaacaataggcttttcagtttgaaaacaggcaccagcctacattacagaatgaactttgaacaaggttcactttgaaagtttaatcagtgacctaggtgtagcaggagttacccactcttatataaaaattataaaatcttttgtttgcatataaaagtagtcatttctaattcagatttttaacttgaatgatagttatagggagtacttgatccactttttcatttttttcatctcgtttttcatttttgtaatctacgacacaaacagaaaagtgaaaaatacacatatgtacagcttaacaaattagtattcaattgtcacccaagtcaccactgaaatcaagaaacagaactttgccagccacctaggggacctcaacagggcccccattctcctcccaatcctccttactcccacacccagttaactatcagaaatgtagcgagtgtaaactgaagaactgagtttttcattttatttaatttgaattaattcaaatttaaataggcacatatagcaagggactgccatattagacagtgcaggttgagtatcagcatcacttatgaagttcctgcttttgaaactttatttgttttttcttaggaggacattactgatatccctaaacttgcagataatctcaaattatttaggtaagtaaacttttatggggaaaaggagttactcataacaaagtcttgaagataaagagtgcaggagtttaaattatatatccctgaggcaggttcatggttcaaaggtaaaatgtgcgctttgccatcagacaaacaatgggttgagtcgtagctctaccacacacaccagctaggtgaccttgagcaatatattatgtctctgagcctccattttccaatctataaaatgggaatatacctccccttgggcttgttgggaggattcaatgaaataatgcatatgaagcactgagcgtggtacctggttcatagtacatgctcagtgaatggcagcgtgaaccctcagtgaatggctgggttcacatcagcaataataaacacatccgccatactagagcttctagtaggttccatctgggaggctcagtacgctgataccatttgaaggcttataatttaaaagccatttctctctagaactttgatcctgggcttacagagagtagtcaccttagtttatctacctgtttaagtacttctgataaactcctccatcacctcaggttgacctgaaactgctaaaaaggcagagaaggagttttatttttccatggaaataatgaactgccacctctgcaatggtgccagcgtatgttaggttgaaagaaacaaggctctttgaagtcctgtcagttccttatttcactttatggtttgttgacttttcttaaccaacgggcacttcactggggcagttggctttaaaggaaacacaagttgcttttgataacacatgatgcaaagaaagaattagaaagaatgagcaatgaagccggtataaatgacaaacaagtgtccaaaggtaacaatatttgtcactgggtttctacaggtatggttttggggatttcttactgtgattgtaggatgtggtcgcaaacaatagggtcattcttttttctt

SEQ ID NO: 26130 - DNA, 2300 bp, Homo sapien
tgggattacaggcatgagccaccgcgcccagctgtcgctcttctctttaggcattctaatgagcaacttccttgagctctgtttgaaatggtctcagaaaatacacccaaactatttctgaaactaccatttctgttgttccccattgcctaccagataaagtcaaactcgtcaacagcattcaccttcctagaagatctggccccaacaggtgtctccgtgtcctcccatgctcccatggccccgtgccgcctgggtgcacactcattctttctgtcactgcctcacctccaggaccattcccctttaccaactgttcagtccctacctgtcatttaaggcccaaccacatgctgtctcctgctcaagtattaccttcaagatcggccccctccttgtagctctgtcctgacactttgctcactccaacatcacattgtccctttatttgaggcttggtctcccccagcagactgtcaactcttttaggatggtgattttgtgttggtcatcctctttccccagtttttatttctcaactctagaactctactatgcattgtacaggaacccctagccacatgtggatatctaaatgtggacaggattttaaattaattaaaattaaaatgtggcactaacagccacattcagctggggctaatgcatcagacagcacagatatgaatatttctctcattgcagaaagttctagacagtaatacagagctggcattggggcaaaccatctggtaaaaggagaagtggtgcaggtagtcaggacgtatggattctcaagctggccccataaccaagcctgtgactttttttttttttttttgagacagagtctctgttgcctaggctggagtgcaatggcatgatctcggctcactgcaacctccacctcccgggttcaaacaattttcctgcctgcctcagcctcccaagtagctgagattacagccatgtgccacaacacctggctaatttttgcgtttttagtagagacagggtttcaccatgttgcccaggctggtctcaaactcctgacctcaggtgattcacccgccttggcctcccaaggtgctggaattacaggtatgagtccccgcaccctgctgaggcctgtgatctttaaggatgatctaatgtcactcagactaagtctctttgtctacaaagctgagataataagaactgccctggccccttcattggattactttagagtatccatgagaaaaaaatctataaagcactttgaagactgtaagataaaatgcaaatataagctattattatgtgcttactgattttttgttatacaggttcagtatcccttatccaaaatgcttgagaccagaagtgttttgaatttcagaatttgttttttacactttttcaggtttggggatatttgcattatactcaccagttgagcatccctaatccaaaattctgaaattcaaaatgcttcagcgaggccgtgcacagtggcccacgcctgtaatcccagcacattgggaggccaaggcaggcagatcacctgaggtcaggggttcaagactagcctggccaacatggcaaaaccccctctctactgaaaataaaaaatttagccgggcatggtggcatgcacctgtagccccagctactcgtgaggctgaggcaagagaatcgcttgaacctgggaggcagaggctgcagtgagccgagactgcaccactgcactaaagcctaggtgatagagcaagactctggctcaaaaacaaaacaaaacaaagcagaacaaaatgcttcagtgagcatttcctttgagcctcaggtcagtgctcagaaagtgtcagattttggagaatttcagattttcaaattagtgatactcaatctgtattacataccctgattttgttcaaggatatatatatgtagtatataatatatgacataataatataatggatatatatgtaaaattgactggcttctaaaactcatgctgtcattttctagttggctagactcctcacgctcccttatggaacaaggcatccaagaggatgagcagctgctcttacgatttaaatattattctttcttcgacttgaatcctaaagtaagcaactttttctcttttgtctttctctttttaatatgaatgcatgaaaggataaaatggaggcatttgcttatgaaaattaggatgaatttatttgtgtgatcgcctgtttagccctgcagggtgagactgatacatggaccctggtctctgaatttttatcctttggtcgctactg

SEQ ID NO: 26131 - DNA, 2300 bp, Homo sapien
gacatttgggttgtttacattttcatgcacttacagaaaaagctgctgtaacacctgtctttcagagatcatttctgttgggtggtatagttcagagaaaaaaaatgctgattcataaggttttccaaaatagttgtgccaatttatgcttctactaacagcattaagaggagcattttctggctgagagcagtggctcacgcctgtaatcccagcactttgggaggctgaggtgggtggatcacctgaggtcaggagttcaagaccagcctggccaacatggtgaaaccccatctctactaaaaatacaaaaatttcctgtaatcccagcactttggaaggctgaggtgggtggatcacctgaggtcaggagttcaagaccagcctggccaacatggtaaaaccccatctctactaaaaatacaaaaatttcctgtaatcccagcactttggaaggctgaggtgggtggatcacgaggtcaggagttcgagaccagcctgaccaacatggtgaaaccacgtctctacaaaaaatacaaaaattagctgggcatggtggtgcgtgcctacaatcccagctactcaggaggctgaggcaggagaatcacttgaacacgggaggcagaggttgcagtgagctgagattacaccactgcactccagcctgggcaacagagtgagactccatctcaaaaaaaaaaaaaaaattagactgacatggtggtgcgcacctgtaatcccagctacttgggaggctgaggcaggagaatcgcttgaacccaggaggcagaagttgcagtgagccgagatcatgccactgcactccagcctgggcaacagagtgagactctgtctcaaaaaaaaagagtttctaatttaaaagagaaagaaaaaatcatttaaagaaaaataagaaaacaaagatactggtaactcttcattttgcaaaataaaagattgaaaattgactccaatattgatgaagggtaaagattctattttaatgccaacgttaaaggaggggaaagattgacattggtgctaacattgaaagggagaaaatattttaactctgacttcaatttggacactttggatatggtggtactgataaagagttggagattactgagaagaatgaaatgtcagttgtacagtacttctgtgtggactttgattggaggctattgctactcccttgtgacacagtggtataaggatacatttctataagagaaataatcttgattaaacaaagtcagatgctttctcagaaagggccatggcacagagattttagcgaacagaactttagcattcattgtgaacacatttttatgtttcttttcctccacggtatctaaatgtaaatgatggtaagatttagtccctattttccatttttttttttttgagacagagatttgctcttgttgcccaagctgtaatataatggtgtgacctcggctcattacaatctccacttcccgggttcaagtgattctcctgcctcagcctctggagtagctgggattaacaggtgcgcaccaccacacctggctaatttttgtatttttagtagagacagggttttgccatgtaggccgggctggtctcgaactcctgacctcaggtgatcgcttgcatcagcctcccaaagtgctgagattacaggtgtgagctacagcacccgaccctattattttttctttttcttttttaattattttatctttaaatttttttatttgatttaattttttaaatgttttttattttactttaagttctgggatacatgtgcagaacatgcaggtgtgttatatacgtatacatgtaccatgatggtttgctgtcccatcaaccctgtcatctacattaggtattttgcctaatgccatcccagtccctattttttccctggagactttggaaagaagccaaaagttgttaagccttgaattgtaaaaggccatgaggagctggagatcagttgttggtttccattttcgcacacaatgaaattgactctgcagctccaggaccctccaagctgggccctctctcattttacttaattgtgctttcatttttgcagatatatcccaagactggtcagactttgctctttggtgggaacagaagcattgctggcttctgaaaacccactggaccctggacaaatatggggtccaggcagatgcaaagcttctcttcacccctcagcataaaatgctgcgccttcgtctgccgaatttgaagatggtgaggttgcgagtcagcttctcagctgtggtttt

SEQ ID NO: 26132 - DNA, 2300 bp, Homo sapien
aacataatgttgaacacaagaagccagacacaaaatagtgcacatggtctgattccatttatataaagtacaaagacaggcaaaacccttctgaggagttagaagataagataatggttatcctgggcctggggtcgggggtaggggcaggcagcggcagtgatcataactgaaaggaataactaaaaggggtcactaacgggcttccgaggactggtgatgtcctgtttcttcaactgggcactctttatacgctagtgtctttatatactctgtatacaggtgtgttcagtttgcgaaaactcatcagctatacattcacgatttgtgctcttatctatatatattgtgtatatgtatgggtgtgtatatatatgatacacatttatatacacacaagtcactacataaaattacaagtttaaaaattaacctaggccaagaagaacgcttaaaaccagtcgaattctttagcacaatgcagatattttcaattgaaaagagaaaaaccatattggtatgaatagatagagccataattcaaggtcacacataaaatcttgaccacaggctgggcacggtggatcacacctgtaatcttaacactttgggaggccgaggcaggtagatcacaaggtcaagagatcaagaccatcctggccaacatcatgaaacctggtctctactaaaaatacaaaaattgtagtcccagctgctcgggagactgaggcaggagaatcacttgaacccgggaggcggagggtgcagcagtgagccaagatcgtgccactgcactcctgcctggggacagaacaagactccatctcaaaaaaatatatgtgtgtgtgtgtgtgtgtgtgtgtgtgtgtgtgtgtttgtgcgcgcgcgcgcgcgcgcactgaccacagtctaagttctaatgggccataagcagggtttcatgatgttaagaggtagggaagtgggaccagatgacccttcccatcgttgacaaacgctaccaagtgaagacattctgtttcaagtttttaatgattttatttcaattataatatcctatatttgccaacaatgttcaactaacctttttaaattaaatgtactttcaaacccataataattcctgaatatggtaatgtttaagcgaaaacagattcaacttctaaattttataacttctttattaaaatttaagtgttcacaagccttttaatgcaaatcgctaaagcctgtactatattgcatgaaatccctccgtggaagagcacgcattctatctctgtacctatttcacagatgaggaaactgtcatttccatgtctgttttattaaccactgtattctctgagcccaggcccattgggaggcctgtagagcagtaagcactcaacaaatgtgattaaatgaacaaaggaggcttggagaggttgtgtaaactgcccaggtcacccacccttcctgggtggccccagccctctttgaaaataaatccaacaggaaggcgactggcgggaccggtggtgatcctgaggtgagccataccaggtgtggcccagacttccgcatgcagcctgcccttgggtctcctggagtctcccctggtcgggagcctcagccttctggagactgacaccaccctcttactcagagacgaatcgttttgtcgttgccttcacctccctgaccacaagtgctccggggctctttctgagggaggcagctgttctaggcgggaggctggagtctcctgggcctggacgcaccccggggtgtgagtgatgggtatgcctgaaaggaggggaagtggcgcggctttaatcatctgggctagtccccggcgggcctgggggaacagggaaactggaggcggccttaaagcgtcaggatgagacatcgcaagaggagctgcagatactgagcgtgcgccccgggttctcgccgccttctctccgccgagcagcccttcggccaccctttgcccttaaaaatctgcagactgcgcctcctctccgcgggagcgagacctagcaggcccggggctgggcgtgccctcgcctgccacgctgcgcgctgccctcagccgggccgctggggccgtgcagtgcaccgggcacgccgcgccaggctgggggcaggcaccgagcctccgtgggaggtcccgaggcagcttcgcctgctcgccctggctccagccctcacctgccgcagccttagctgagcagccgccgccactgggcgccccccgctccccacttcgccagcgcccgctcctcggctcggcccggggtagtttgtaggga

SEQ ID NO: 26133 - DNA, 2300 bp, Homo sapien
atatgtatgaattaattaaataacagactcagtgaattgattctgcttgttttttaagggggcaaagggtgtgctttttttaatatatatgtacaaaattttgaagttcagaatacactttttaacccacttctaacccaggaccttgggggatgggttggacctgtgtcacacaaacgacagtaaccgtgtaataagtaaaacataaagttaaattaaaagcctaggacagccggccatggtgactcacacctgcaatcccaacaatttaggaggctaagatgggaggatggcttgagcccaggagttcaagaccagctcaggcagctaaatttaaaaattagccaggcacggtggttcacacctgtagtcccagcttgggagcctgagacatcaaggctgcagtgagccatgatcatgccactgcactctgacctgggggagagcaagaccctttctcaaaaaaaaaaaaaaaaaaaaaagcctaggacacataatatggataaaactcacaaacataatgttgaacacaagaagccagacacaaaatagtgcacatggtctgattccatttatataaagtacaaagacaggcaaaacccttctgaggagttagaagataagataatggttatcctgggcctggggtcgggggtaggggcaggcagcggcagtgatcataactgaaaggaataactaaaaggggtcactaacgggcttccgaggactggtgatgtcctgtttcttcaactgggcactctttatacgctagtgtctttatatactctgtatacaggtgtgttcagtttgcgaaaactcatcagctatacattcacgatttgtgctcttatctatatatattgtgtatatgtatgggtgtgtatatatatgatacacatttatatacacacaagtcactacataaaattacaagtttaaaaattaacctaggccaagaagaacgcttaaaaccagtcgaattctttagcacaatgcagatattttcaattgaaaagagaaaaaccatattggtatgaatagatagagccataattcaaggtcacacataaaatcttgaccacaggctgggcacggtggatcacacctgtaatcttaacactttgggaggccgaggcaggtagatcacaaggtcaagagatcaagaccatcctggccaacatcatgaaacctggtctctactaaaaatacaaaaattgtagtcccagctgctcgggagactgaggcaggagaatcacttgaacccgggaggcggagggtgcagcagtgagccaagatcgtgccactgcactcctgcctggggacagaacaagactccatctcaaaaaaatatatgtgtgtgtgtgtgtgtgtgtgtgtgtgtgtgtgtgtttgtgcgcgcgcgcgcgcgcgcactgaccacagtctaagttctaatgggccataagcagggtttcatgatgttaagaggtagggaagtgggaccagatgacccttcccatcgttgacaaacgctaccaagtgaagacattctgtttcaagtttttaatgattttatttcaattataatatcctatatttgccaacaatgttcaactaacctttttaaattaaatgtactttcaaacccataataattcctgaatatggtaatgtttaagcgaaaacagattcaacttctaaattttataacttctttattaaaatttaagtgttcacaagccttttaatgcaaatcgctaaagcctgtactatattgcatgaaatccctccgtggaagagcacgcattctatctctgtacctatttcacagatgaggaaactgtcatttccatgtctgttttattaaccactgtattctctgagcccaggcccattgggaggcctgtagagcagtaagcactcaacaaatgtgattaaatgaacaaaggaggcttggagaggttgtgtaaactgcccaggtcacccacccttcctgggtggccccagccctctttgaaaataaatccaacaggaaggcgactggcgggaccggtggtgatcctgaggtgagccataccaggtgtggcccagacttccgcatgcagcctgcccttgggtctcctggagtctcccctggtcgggagcctcagccttctggagactgacaccaccctcttactcagagacgaatcgttttgtcgttgccttcacctccctgaccacaagtgctccggggctctttctgagggaggcagctgttctaggcgggaggctggagtctcctgggcctggacgcaccccggggtgtgagtgatgggtat

SEQ ID NO: 26134 - DNA, 2300 bp, Homo sapien
tgcattcagaaaagacctttgaaaaatgcttgactgtcttcactttcttttaagcaagggagatttgagagaagacaaatcttttatcagattatttccagtcaggctgggagaggaaagtggaaaaagggtaagaaatggcaagtatgaaagattttgggccaggtgcagtggctcacatccataatcccagcacttggaaggtcaaggcaggtggatcacctgaggtcaggagttcgagaccagcctggccaacagggcgaaaccctctctctaataaaaatacaaaaattagctgggcgtggtggcacgtgcctgtagtcccagctacatggaaggctgaggcaggaggatcacttgaacccaggaggcagaggttgcagtgagatcacgcaccactacactccagcctgggtgacagagcaagactctgtctcaaaaaaaaaaaaaaaaagagagaaaagacaagaaagattttggacaacctctaaacttgtctaggtcttcatgatctggtgtcagggttctatttgacatagaattcctgaaaagcttggcacacacatattaaaatgttagaacatatttgaatatcaaatttaaataattgttgcttatttattacttggggttattcaaattttgttttttttttaaatataaatgcttgagaattgacagtagtgttttttctccaaaggacttaagaatgaaaagtttagaagtatgtcaacattgtgacagaaggcattaattgatgcccaagcatgaccctaacatgatttcatatgttttgatgtcatctctttctttaagctgcacagtatgttaaagtaaaagcttctgtttgaattgagtgaacacagagcttcagtttttcttttttaccatatatgtatagttgaatactgatatagtctctcattcatttttgtactgtttctcaatatctgattgccaaaagaaagagatttcttataaaataggcttcagaccacagggcttggattttaagattacatttttttaaatgaggagagagtggtagttctgtgaataaagtagcaagaataaaaaggaagagaccaaagatgacattttgaaggaagtaattgccttggcatggcggttttgagcccacattgttaagtggtttctggcatgatatgtgattttcctatgtgatatcctgaatgtttaccagaaaaattaaagacacatgctaagaagtcaaggcaaacctgtgagaatgaagcagactttttcatttgctcattcattaaatgtggatttatgtgcacacacaggcactcatatatgtatacataatacgtacacttataatgtgtatatatactccttaaatatatgtatgtacacatgtgtatatatctatgtgtgtatatatatacacacacacacacccctctttctctctctcctctcttttcctctcccccctcccttcctctctcccctcttttttctccaccgccatctccagtctttcccccttctctctctctcctctttcctccctttctccctctctccctgactcgctcccttcctcctcctctcccactcccttctttttctctctgcctcttcttccacttttcctctccccttctctttcttcttctctctcttgtctccctttctctttccctctgtctctctctccccatcctccctctctctccctccccttctccctctctctctttctctctgtctctgtagtattatgttgtcctaaattctgtgaggtgctaaaggaagtaatacaacatatctactcttaagagcttattttatgtcaggaaagaaaagggtatgttaacatattgctatgtaagcaaaaaaaacccatttattataatactaatatttatgatgatgataatataagggatgacaggaagagtatatgattcagacccaaaagaacaatataaataagcacattttcaaaagttattaaaaagaagaggcaatgagagttagagacatttgaggaagttgtagaggaagaaaaggaacaatcagtgggggaagtggtgagaccaaatgtgctgaggctgaaatggccttggtgtgcttgggagacagtgagtacgtgaatctgcctgcagaagttgggagtggggggaatattattaggattattaggaaggtaagctgagaacataatgtcaagagtcttaaatgctggctaataagtatcttagaaagttacttgagcaggaaagtgatgcaataaggtcctatttaattgacagctgattatagaatgg
